United States Patent Application Publication US 2026/0242817 A1 - sequence listing, part 4

SEQ ID NO: 12284 - protein, 193 aa, Zea mays
  VARIANT 18: note = Ancestral polymorphism is S, Derived polymorphism is F
MTRSDATSCAGPQSVHASAVLIIPGVQNLKSMCCTAALLYNPRRQKEAEFKLLEEELARRVEEAIRKNVEERLKSEEVKRDIEHRIEEGIRKLFDEVDAQLQKEKAVALYEARQKAEQERREREELDRMLEENRRKVEEAQRKEALEQQQKELERYLELERIQRQREEALRRKKMEEEEERANKLRLLGKNRG

SEQ ID NO: 12285 - protein, 879 aa, Zea mays
  VARIANT 630..879: note = Derived polymorphism lacks residues 630 to 879
  VARIANT 538..879: note = Derived polymorphism lacks residues 538 to 879
  VARIANT 484..879: note = Derived polymorphism lacks residues 484 to 879
  VARIANT 473..879: note = Derived polymorphism lacks residues 473 to 879
MAAEQTAEQFRGQARLPHFASPRRYDLRLTPDLPACVFTGSVAVSIGVAAPTRFLVLNAAELDVATGGVSFAPQGSDQVLQPLEVTNVPEDEILIIRFNEVLSIGEGTLTIAFKGTLNDKMHGFYRSVYELNGEKKNMAVTQFEPADARRCFPCWDEPAFKAVFKITLEVPSETIALSNMPVIEEKVNGPTKIVYFQESRIMSTYLVAVIVGNFDYVEDFTTDGTRVRVYTQVGKSAQGRFALEVALKTLVLFKEYFAVPYPLPKMDMVAIPDFAAGAMENYGLVTYRETALLFDEMHSAAANKQRVAVVVAHELAHQWFGNLVTMEWWTHLWLNEGFATWVSYLAADQFFPEWNVWTQFLEESTVGFKLDALAGSHPIEVDINHVDEIDEIFDAISYRKGASVIRMLQNYLGAEVFQNSLAAYIKRFAYSNAKTEDLWAALEEGSGEPVRTLMHSWTKQQGYPVINVKLKDGKFQLEQTQFLSSGSTGVGQWVVPITLCCCSYSRQAKFLFHGKQEDFDLSASGFTDCQKKDGFWIKLNVNQTSFYRVSYDEELAARLRYAIETNKLGAADRYGVLDDAYALCMAGKQKLVSLLHLISVYKDETEYTVLAHIITTSLHIAEMMVIAAPEELVHLKKFLIDFLEPFALKLGWDAKSDEGHLNALLRGTLLTALAELGHEATINEAVRRFNVFLEDRETPLLPPDVRKAAYVALMQTVSKSNKTGYESLLRIYRETDLSQEKVRVLGSLASSPDHDVVREVLNFILSPEVRNQDAIFLLRGVSSGAHEVAWQWLKENWDYILGAYSGTLLTYFVNITVSPLATDEHGDEAEEFFKSRTKANIARTVRQSIERVRINAQWVKNIKAEADLGNVLKKLAYKH

SEQ ID NO: 12286 - protein, 262 aa, Zea mays
  VARIANT 236: note = Ancestral polymorphism is R, Derived polymorphism is W
  VARIANT 228: note = Ancestral polymorphism is C, Derived polymorphism is Y
  VARIANT 182..262: note = Derived polymorphism lacks residues 182 to 262
  VARIANT 159..262: note = Derived polymorphism lacks residues 159 to 262
  VARIANT 142..262: note = Derived polymorphism lacks residues 142 to 262
  VARIANT 115: note = Ancestral polymorphism is G, Derived polymorphism is C
  VARIANT 112: note = Ancestral polymorphism is L, Derived polymorphism is F
  VARIANT 105: note = Ancestral polymorphism is P, Derived polymorphism is S
  VARIANT 77: note = Ancestral polymorphism is T, Derived polymorphism is I
  VARIANT 44: note = Ancestral polymorphism is C, Derived polymorphism is Y
  VARIANT 42: note = Ancestral polymorphism is A, Derived polymorphism is V
  VARIANT 27..262: note = Derived polymorphism lacks residues 27 to 262
  VARIANT 23: note = Ancestral polymorphism is R, Derived polymorphism is C
MAPAGGQQQPMKRPRPTEFSGRRVVVQPYNSLLTLKRLTLNADCVVVLDNTTLNSIAVERLHFSNPTFAQTNSLVSTVISASTTTLRHPGYMNNDLVGLLASLIPTPRCHFLMTGYTPLTVERQVNMIRKTTVLDVMRRLLQTKNVMVSSYARTKEASQAKYISILNIIQGEVDPTQVQFCQMTPSVDIYCLLFISKMDNIVSSDVVLQVSGLMLANHTSIRHLFGKCLGQYEKLRKKQTFLDNYRKFPMFAVRTFFSKFQI

SEQ ID NO: 12287 - protein, 191 aa, Zea mays
  VARIANT 40: note = Ancestral polymorphism is E, Derived polymorphism is D
MDPKLLRHGNLRSIVLPPVPRLARASAAATASPRKIFLYERMEVSAGLRLPPVAAAASLLGCRSASVPPRAAASHSVRSVSRAVKIRAAAINGLQRNRSNLESLFCYDKSVPEQDIGEPSGLNLEKKNVGDKPPCSSCEAKGALLCATCAGSGLYVDSILESQGIIVKVRCLGCGGTGNIMCSKCGGRGHT

SEQ ID NO: 12288 - protein, 144 aa, Zea mays
  VARIANT 111: note = Ancestral polymorphism is R, Derived polymorphism is W
  VARIANT 59: note = Ancestral polymorphism is E, Derived polymorphism is K
MEDEGSSGPSLGPDREASSSPLQRPERVLSDPQKRAAYDQYGKKGLKAFADIQERCEAEWSLHPHLDRDTTPEYNRKRIAQWIPPGQTSFIALNERTPCFFSTLSDRQQFRYKLAYSCNLSSMLEPIIKENYQLLTVCKNEPAH

SEQ ID NO: 12289 - protein, 164 aa, Zea mays
  VARIANT 67: note = Ancestral polymorphism is A, Derived polymorphism is V
  VARIANT 113: note = Ancestral polymorphism is L, Derived polymorphism is P
  VARIANT 114: note = Ancestral polymorphism is A, Derived polymorphism is S
MPNNGVRAVATPVAREEPLLRREDDAAPPKAAGGDGQPLDAGARDAGSFPWLPAAGVVYLTLSSAMALHRCWPDPGDVAFVVSAYVDLVLLFCCLRRYERAEPGSPLRERLKLAVWLLTSALTLLFSYKVAAVMPAAVAAIVWLMGLTTICGGFLAFFCFQKKA

SEQ ID NO: 12290 - protein, 449 aa, Zea mays
  VARIANT 57..449: note = Derived polymorphism lacks residues 57 to 449
  VARIANT 130: note = Ancestral polymorphism is Y, Derived polymorphism is H
MSWSGPELAEWSRDGQEAEQEPESVPRRKSWSAPELAQWSRAGKEKEQEEPESSEPQRKWVALVSVAVVLPGNEDERAHEIIPGTDMLMLDINDPPLPSYLVLHPRVAPNPRRTNEPLSAYILAADRSGYILLQVVEGNRPDFFLCNTHTRTVTILPPVSSYTRASHGVDILPELSMGLIADPQRSGQFVVAQLHPTISYHEPNKLLYFSTAKGRWFVRNLTRARQQVLMRNPNSEIGVVAHDGRLWWFAPSYGVFCCDPFTPVLECPELRFIPLPANSEMFGHVAFDPVVRPLVIKRRCVRPSEGKLRFVAIRGLSYKVPVDESNPTVWMWTLDDPEGPNPWTFEYEVAFAEIWEDETYAAAGLQPGKVPDVALVDPNDHYVVYFFQGSKLFGLDLREKKARLEWTRDADVDASNWRTWKMAPPQSDEEDTGGQADDEPEIQLPPSSP

SEQ ID NO: 12291 - protein, 76 aa, Zea mays
  VARIANT 16: note = Ancestral polymorphism is K, Derived polymorphism is M
  VARIANT 24..76: note = Derived polymorphism lacks residues 24 to 76
MDAFLQRLKRLDAYPKVNEDFYKWTLFGGIVTLVAAVVMLLLFISETRSYFYSATETKLVVDTSRRERLRVNVSTF

SEQ ID NO: 12292 - protein, 403 aa, Zea mays
  VARIANT 11..403: note = Derived polymorphism lacks residues 11 to 403
  VARIANT 127: note = Ancestral polymorphism is G, Derived polymorphism is S
  VARIANT 128: note = Ancestral polymorphism is C, Derived polymorphism is Y
  VARIANT 178: note = Ancestral polymorphism is S, Derived polymorphism is F
MSWSGPELAEWSRDGQEAEQQPKSEPRRKSWSAPELAQWSRAGKEEEQEPEPSEPQRKWVALVSVVVLFGSEDERAQEIILGTDMLMVDLNDPPLPSYLVLHPRIAPNPRRTNEPLSAYILAADRSGYILLQASHGVDILPELSMGLIADPQRSGQFVVAQLHPTISYRKPNKLLYFSTAKGRWFVRNLTRARQRVRMHNPNEIGVVAHDGRLWWFAPSYGVFCCDPFTPVLKCPELRFIPLPANSEMPLVIKRRCVRPSEGKLRFVEIRGLSYKVPVDESNPTVWMWTLDDPEGPNPWTFEYEVAFAEIWKDETYAAAGLQPGEVPDVALVDPNDHYVVYFFQGSKLFGLDLREKKVVACEECLIDRDRLEYQSSRPIVDAWELSPPPPILSGDDDSSTDGI

SEQ ID NO: 12293 - protein, 446 aa, Zea mays
  VARIANT 155: note = Ancestral polymorphism is L, Derived polymorphism is P
MSWSGPELAEGSRDGQEAEQEPESVPRRKSWSAPELAQWSRAGKEKEQEEPESSEPQRKWVALVSVVVLPSNEDERAHEIIPGTDMLMLDLNDPPLPSYLVLHPRVAPNPRRTNGPLSAYILAADRSGCILLQVVEGNRPDFFLCNTHTRTVTILPPVSSYTQANDGVGLIFLDLSMGLIADPQHSGHYVVAQLHPSTSYSQPNKLIYYSTATCRWFARNLSRARQQVRMRNPDSEIGVLAHDGRLWWFSPAYGVFCCDPFTPVPESPALRFIPLPAGSEMAGHVAFDRVIKPLVRKRRCVRPSEGKLRFVEIRGLSYKVPVDESNPTVWMWTLVDPEVPNPWTFEYEVAFAEIWKDETYAAAGLQPGEVPDVALVDPNDHYVVYFFQGSKLFGLDLREKKVVACEECLIDRDRLEYQSSRPIVDAWELSPPPPILSGDDDSSTDE

SEQ ID NO: 12294 - protein, 81 aa, Zea mays
  VARIANT 59: note = Ancestral polymorphism is R, Derived polymorphism is H
  VARIANT 13: note = Ancestral polymorphism is V, Derived polymorphism is F
  VARIANT 11: note = Ancestral polymorphism is L, Derived polymorphism is H
MQNEEGKTVDLYVPRKCSATNRIITAKDHASVQINIGHLDANGLYDGHFTTFALSGFVRAQGDADSSLDRLWQKKKVDIKQ

SEQ ID NO: 12295 - protein, 523 aa, Zea mays
  VARIANT 133..523: note = Derived polymorphism lacks residues 133 to 523
  VARIANT 154: note = Ancestral polymorphism is I, Derived polymorphism is N
MSWSGPELAKWSRDGQEAEQEPESVPRRKSWSAPELAQWSRAGKEKEQEEPESSEPQRKWVALVSVVVLPSNEDERAHEIIPGTDMLMLDLNDPPLPSYLVLHPRVAPNPRRTNEPLSAYILAADRSGCILLQVVEGNRPDFFLCNTHTRTVTILPPVSSYTQANDVGLIYLHLSMGLIADPQHSGHYMVAQLHPTTSYSQPNKLLYYSTAKCRWFARNLSRARQQVRMRNPNSEIGVLAHDGRLWWFSPAYGVFCCDPFTPVPESPALRFIPLPAGSEMAGHVAFDRVIKPLVRKRRCVRPSEGKLRFVEIRGLSYKVPVDESNPTVWMWTLVDPEVPNPWTFEYEVAFAEIWEDETYAAAGLQPGEVPDVALVDPNDHYVVYFFQGSKLFGLDLREKKVVGCEEWLIDRDRLEYQSSRPIVDAWELSPPPPSPPILSGDDDYSTDDKDQSELPCTEEKKRQVAESVESWLNQARLAWTRDADVDASNWRTWKMAPPQSDESSVDAGGQTEDEPEIQLPPSP

SEQ ID NO: 12296 - protein, 439 aa, Zea mays
  VARIANT 187..439: note = Derived polymorphism lacks residues 187 to 439
MCCNAKVSPLPVEMDTSASKVLTNDDLLHDILLRLGCPSCLVSAALTSKCWLRGASDQVFARDFCADHQPRLLGIYVSSGGISGSEFIPFRQPAGGSRPEVSTVLNHADFGLGDLPAPSVWDCRNGMVLFQFGGETFNPAGLAARSPLLYPNMHESVVLPPSPQPSYFPEYPHAMLLPTDKGDDALCYRVDVRIWESHNKAAALVWVLRSGSWHIRCIAAGVLAKSPAQILPTTVLDGGKIYMATQAGYILGLDLATARFFIVDLPRGVELDQYPGNLVHCRGDDSVLYLFHVDGDNRLNVWLRRMEDDQKGHGGPGAAGGSAGATKGWVLRDTISVRETCGHLVEQGWEKAGDGDEDAAAVMIVGAGDNAEFVFLELGVTGVVAYMHVKTREVKQVYQRQPDDDHFISVRPFMLVKPPVFPVLEDAHEGEAAAALHQE

SEQ ID NO: 12297 - protein, 880 aa, Zea mays
  VARIANT 507..880: note = Derived polymorphism lacks residues 507 to 880
MQIAELMVCFLQSRHLHVVLHCWWLQSFTRLLPSVAAGSSTLLFSSSPHFLSRGRSRAGKMGANCLAQTNALFRKNLVIQRRNHRSNCCLICFPLVVCLLLGGVQLIVAIAYASSAAHRPRVDCGGCTASTTSSSSADTVVGGPVCPTQCPLPTAPKWPPVLQLPPAPEDMEEIGSSTSTDDLTGASTARPNPPAATFLVTGTNRSFAEGVMSNMFSKHDELSSAANISAVADFALGTNEMRFISNGAEELGSDFDRRNHLFFLQTSCTPNATLSFPVQQGRSNFTKAYDLTSSDLSKFNLIVSYNSTYKGAIELSLSVASFSFSPILLRVPRLLNLVSNAYLQLRGSDTKMQFEFIKDMPRVAQQEFPIDISFLVGKLVFVWMIMLYFPVILSNLVYEKEQKLRTIMKMHGLGDMAYWIISYCYFLLLSLLYMLFLVSFGSIFGIKLFRLSDYRVQFVVYFAYINLQVSFAFLMATFFSNCRTASGSWSTLMELFPPFCLYRIIYEFSPPPSPLYRTDFSGVHWEDLSDHKNGMLDILIIMAVEWATFLLLTFFVDEFGTFRNGIRKTVSIFRSNTDQSSHTCQMQTIQLEEFLPSVETDRTDVSRERETVQQLLRESDSNFSVICDNLKKVYHGKDGNAEKIAVAGLSLSVQRGQCFGILGPNGAGKTSLISMAVEHSLRSVRLFDGGIADKRVAKYSGGMKRRLSVAISLIGDPKVVYMDEPSSGLDPASRRALWNAVMSAKENRAIVLTTHSMEEAEALCDRIGIMVNGSLQCIGNSKELKARYGGTYMLTVTAAAGEEAAVEQLVRSLCPAANGVYRISGTQKFEMPKQGLRISEVFQAMERAKSWLNIAAWGLSDATLEDTFIKVASGSDASSV

SEQ ID NO: 12298 - protein, 764 aa, Zea mays
  VARIANT 137..764: note = Derived polymorphism lacks residues 137 to 764
MGASRLEQTDALFRKNLVIQRRACKTNCCLILFPLALCSVIGGLQIAINHASSQGGGGGGGGGGATPAIRLDCSCSNVSVDENALGGIQCPDECPLPRAPKWPPVVRTPSPEYRAVQDGLFPFADLPDASCRAEGSCPATFLVTGDNHSFVGSVIDNILPTHSSSVNLSADVSALSDFVLADDGEFHQSFLQNKCSPNLTLSYPVQYGNNVVSQVYDFLSSDQSNFNLIISYNSTNDYGVYDESEQSIPVINQAGPVQKPNLVQVPRLANMASNAYLHLKGNGLKMPFEFVKEMPRAAIPIHDGQFDLAPYIGQLPFVWTMELLFPNNYGMQFIFYFAYMNLQISFAFLMTTYFSSVRTATVTGYLYIFVSGLLSQFMFRPYVEDSNISRIWITLMELLPAFSLYRIVYEFSRFAQAQPENYMASSGIQWADMTNPESGLAGVLTIMAVEWLLFLLFAFYLDHFRSYKDGIRKAAALVRSRIHGNHSEAAQQQNVQLQEFRASIQLERTDVLKEREIVELISKESDRSYSVICDNLGKVYRGKDGNADKIAVRGISISMSRGQCFGVLGPNGAGKTTLINMLTGFCKPTSGTALLWESLTGREHLLFYGRLKKLKAAALFEAIEQSLRSMHLLAGGVADKLVGKYSGGMKRRLSVAISLIGDPKLKDRYGGSCLLTVTTPAGGQEEEEVERLVQSISPAANRVYRVSGTQKFEMPKRGMKISAVFQAMEQAKSSLDIVAWGLADTTLEDVFVRVAKQTDMSTVT

SEQ ID NO: 12299 - protein, 558 aa, Zea mays
  VARIANT 385: note = Ancestral polymorphism is P, Derived polymorphism is L
  VARIANT 247: note = Ancestral polymorphism is P, Derived polymorphism is L
  VARIANT 236..558: note = Derived polymorphism lacks residues 236 to 558
MAGRGGAGRRPRAVFMAFGTQGDVFPIAALAAAFACDQQEYAVVFITHSAHRSLSAHLAASSVRYMPVSSPPVLAAEQLENISSDSIQSNHERESFSMRKKAIQAEHRKECLSFVEEVFGNDPSISGDFIVINFFALEGWHLAELFQVKCVIAAPYFVPYSAPTSFKRQFKQTFPLLYKYFQEAPANTVCWTDIIHWMWALFMESWGSWRNDCLNLSPIPFTVRSSNQSSFVACARGVTFITVSIMLLIINMKPMPYMRTIKLIHLHILYGFSKEIVECPGYWPFNAHACGFWFLPMDWQFSCDKCMELSGNINSSFGGMLCANHSSLEHFLTRNAYSSRPIFVGLSSIGRMGFLRNPKAFLMVLKAAIESTDYMFILFSSGYKPLDSAIQSIASSVNESRGVDSPSLGGDSALLFNGRLFCFLGRYSPCWQKILYFYCFDNSGSTAAALLAGIPQVTCPFMMDQFYWSERLQWLGVAPEPLQRQNLVPDNDDALSIHNAADVLVGAIRSALSPETKAQAARIADRLSSEDGIGEALRILKARVLTQNKIISSFIASK

SEQ ID NO: 12300 - protein, 157 aa, Zea mays
  VARIANT 31: note = Ancestral polymorphism is H, Derived polymorphism is L
  VARIANT 44: note = Ancestral polymorphism is K, Derived polymorphism is N
  VARIANT 54: note = Ancestral polymorphism is G, Derived polymorphism is R
  VARIANT 65: note = Ancestral polymorphism is E, Derived polymorphism is K
  VARIANT 101: note = Ancestral polymorphism is S, Derived polymorphism is T
  VARIANT 127: note = Ancestral polymorphism is G, Derived polymorphism is R
MNMIYMKFLISIGFMVYVLENGLHVDPHDQHAIADALYKMLSEKQFWSRCREDGLKNIHQFSWSEHCKNYLSRISTLGPRHPSFVCKEDHKVPVKCRKHISVIAVDSVNKEDLIQIIRNSIEATRTGTVRFYRFCAVDFIDNSRATDSNSLHRHALD

SEQ ID NO: 12301 - protein, 114 aa, Zea mays
  VARIANT 46: note = Ancestral polymorphism is G, Derived polymorphism is D
  VARIANT 39: note = Ancestral polymorphism is R, Derived polymorphism is H
  VARIANT 29: note = Ancestral polymorphism is G, Derived polymorphism is W
  VARIANT 24: note = Ancestral polymorphism is P, Derived polymorphism is R
MSMPPALAATFASCGSGGGGHGWPRNLAGGGGNGELGWRAPRPAAGGVGAVVRALWAWIARGRRKVVISRTGSSVKEQQYGHEEYAQNFDEGGAAREPENLSRSFSARRLVLAT

SEQ ID NO: 12302 - protein, 77 aa, Zea mays
  VARIANT 22: note = Ancestral polymorphism is S, Derived polymorphism is I
MSRPIHSRRIAAPPDSVSSCFSVKIMAAAGKSSSAMEETVAATAAARGRRGIDRQAVDRGIAYLLMVAALVATYALH

SEQ ID NO: 12303 - protein, 260 aa, Zea mays
  VARIANT 33: note = Ancestral polymorphism is D, Derived polymorphism is Y
  VARIANT 240: note = Ancestral polymorphism is S, Derived polymorphism is R
MQAAAAPPLPPPRRRVYTAVDPRCEWRSTEDADTLVVDVSGFKKDELKVVYSVRRKKLKATGGRQPDGAPRLKVTGERRADGGRWARFLKVVPVPRSCDAGTIQARLDTERAQLSVVLPKPKGSSSSSKDSQKERHPAERAHSLEELMRADTAGGSSGRSDGSMRSAQEDAGNGKVEDKEQKQDRHQAMEEPRHDQAMNVQDLPGGDGGATENAARNNDGDGKGEDGRWWRKIRNLRVLSFLLVLALVGVGATVLYIALL

SEQ ID NO: 12304 - protein, 408 aa, Zea mays
  VARIANT 17: note = Ancestral polymorphism is A, Derived polymorphism is E
  VARIANT 8: note = Ancestral polymorphism is A, Derived polymorphism is S
MAAAPALARELLDAAREPEFAEWQRGVRRRIHQHPELAFQEHRTSALVRAELDAIGVPYAWPVAQTGVVATITGPAAGPVFALRADMDALPIQEMVEWEFKSKEDGKMHACGHDAHVAMLLGAARLLQSRRDDLKGTVKLVFQPAEEGHAGAYHVLKEGVLDNVQAIFGVHVDTALPVGLVGSRPGPFLAGSARFTATITGKGGHAAGPQHVVDPIVAASSAVLSLQQLVARETDPLQGAVVSVTFIKGGGGAFNVIPESVTMGGTLRSMTNDGMSYLVKRIREVIQGQAAVSRCAATVDLMEEKMRPYPATVNDEAMYSHAKAVAESMLGEASVMLCPQFMAAEDFGFYAQRIPAAFFSVGVRDEATGKVHHVHSPHLDIDEAALPVGAALHAAVAMEYLNKHAPCK

SEQ ID NO: 12305 - protein, 708 aa, Zea mays
  VARIANT 246..708: note = Derived polymorphism lacks residues 246 to 708
MASRVKEDERHEKILRGLLKLPANKRCINCNNLGPQYACTNFWTFVCTNCSGAHREFTHRVKSVSMAKFTAQEVTALQEGGNERAREVFFKEWDPQRNGYPDSSNADKLRNFIKHVYVERRYTGERSTDKPPRAKDDKDEYSENRRSDGNWGGSRSPPDGSYSDRRSYSGRSDDRNSRYSYGDRSPGYDQNDYKKSPRYFEVVDDRSGKTTPVQRFEDRWSSEPRKPDSGSPDFQKEADGSSPVVRPVRDILGDNTPQLRVGEPSKPATEPPKPSVVRPIDPPKPSVVRPIGPPKPNGTRAIDPPPLTKTISSASSIGSSEGTSEQTKVASAVSLIDFSADPEPASTAPPQPTPMPQQPPFNAAAPQPILEQGKSDPSVSGGDWASFDSFGQQQTPQTSSSVNPLESALAQLSFSEAPSAPNASAYPVSLDPTLKANDGGHSSVLDQSHSLFDAPFGISGNQASTVMSGQGSSVQQSPLAAPTAGPPSQATANPQGTSGIQGAASSTDSKFSSRKELPVDIFTALYPPSTQMMPGWQRAPHFGMGYAMQYPPGVGLQSYLHGAFPQPTYQQPVYSQHAYSHPQPVKASNPFDLGNESAHIQAHMPPSGPPGASAGSAPQTLIGNSSFGVPPQQPHQLYQSEAHLSHFMMQQVPNSMPMPEQQPNSMLATQQGLGSFNMGFDQEAPLGYPQANTSPSYGSVGGGSNPFG

SEQ ID NO: 12306 - protein, 553 aa, Zea mays
  VARIANT 53: note = Ancestral polymorphism is R, Derived polymorphism is C
MDRLVIPEPSNEVMIRVEPGMQARGELTLRNAMHTMPVAFRLQPAVRGRFAVRPHTGILAPLAAVTVEVLYLASAPPDRPSGSGRGGGSRGEDAFLLHSVVVPGAAVKEPVTALDSVNPEWFSARRKHVFVDSGIRASFVGASVAARLVEAGAVEALREVLDRSEPEWRAADAADEYGRTLLDLAVGLGRADIVQVLLEYGADADKPSRGRTPLEAAAASGECLIAELLLANGATPAGSDAIHVAAAAGHDDVLKLLLGKPAPASLASSSSASFSSSFTSIDAAGRDGKTPLRLAAEAGRRDAVKALLAAGARADARCGTDGATALHAAARRGDEAVARLLLSHGVAGTATVRDAAGKTAFEIAAQEGHGGRILQFLGLGEAILAAARKGEVRSVRRAADGGASVEGRDAHGWTPLMRAAFKGRADTARDLIARGADIDAADAEGYTVLHCAAEAGRADVVDLLLKNGANAKATTVKGRTAADVAAAAGRSKVVRLLDRASVIGRKQDVTEKVAKGGSMDRKQRGRKGSSGAIRFGGGKEGFEAAVVTFGWSH

SEQ ID NO: 12307 - protein, 1127 aa, Zea mays
  VARIANT 763..1127: note = Derived polymorphism lacks residues 763 to 1127
  VARIANT 251..1127: note = Derived polymorphism lacks residues 251 to 1127
MEFSKQGQAPVPNNIGSQPLPSSNVQSNQTERPSMFYPSSLPGDWSSQQMFSMGTSVPVSSYCIVPMNQQPVQLGASRPEISRPLGPQPLLSRVSLRPPQQVLNIHTSLPGMAGSQHSPSMAGRRSQQTIGSPKVQMLKSPSFQSSNKRSAQKEPPSKVQHQQLESVRSKFRESLVAALSLDSDQQNKIQSDNVQSAGSIDNFKPGAGDAVQDLVATTSKDVCTTNSGVDTTVAPSRCEENEKLSSDLALEMTTSINDGMQQQSIQVSSEDDLLGQCMVADELLQGHGLSWVSDLDAGISELNAEPNALKRPRTSNVESESKRIKSANELAMEKEKFNQRAEILAFRIEEELFKLFGGVNKKYKEKGRSLLFNLKDKSNPELRERVLSGDIVPERLCSMTAEELASKELSEWRLAKAEEFAQMVVLPTMEVDPRRLVRKTHKGEFQVEVEEPDGFSVEVELGSNVTNIPSKAVEDQTKSNGTAGKVDVQEKDKASDSASHDEDGRTGNNGIPGDVECIDNEKADLMQELILDDVKDTVNLPPIPSLDEFMQGLDSEPPFVDISVGTPQEDVNDSDELDTTMEPSDLPETEDNASAPEKTESKSDKSSAQVNSEHRLESPGHIAVQNSDLTEPRDGELSKSSPSPDKDEAKKTTVDNASNSDSVHHNQAASLPMIRESIWEGAIQLTVSSLCNVVAIFKSGEKPSLKDWRSFIEIKGRVKLSAFQEFVDQLPKSKSRAIMVFLFLAVVCLCIPFITELCWKEGSSESGRQNILQVTFYLLPLTTVGAILIGYRGLGILNLVLVVQTIDAYISDERVGLAEPAEGIELYLCPPHGKTVEILSRHLPKEHQESLAVAGSSFIGVVVWRRPSISRAPTSHHNNRHDGSKRQSILGKPQVTNPAARPSLPPNSYGAPPGFTSQREEEDVTDDAPPGFGPGVARDEDDLPEFNFVKSSHHAANVTAHAYKGPWPHVPPPSARPAEQMRELVQKYGKRSSVQEAPRAWDDDDDDIPEWNPTHQTIKQPPLPHAPQQLPLPPPPVQQMNAAYQQQYHIPSAVQPQVPITSLPHAYLRTQQPQPGQAWQQPSNAWWPAQGVAAPAAQQPQYGVVPGSSGVQGYDSSNAGGMAWRPR

SEQ ID NO: 12308 - protein, 362 aa, Zea mays
  VARIANT 111: note = Ancestral polymorphism is S, Derived polymorphism is F
  VARIANT 91..362: note = Derived polymorphism lacks residues 91 to 362
  VARIANT 26: note = Ancestral polymorphism is K, Derived polymorphism is N
MPQEMKDKDITEDRLLLLKGVSGAGNTTLMDVLAGRKTGGHIEGDISISGYPKKQETFARIAGYCEQNDIHSPHVTVYESLLYCTPRGSGCPHEVDSEARKCGTRQDLFNSLGFMYAAVLFIGIQNGQTVQPIVDVERTVFYREKAAGMYSAVSSTLRFCAGKKNGSFPSFILELMSSNSSTLEQVLIEIPHIFLQTAVYDYGLIVYSLIDFDWTVEKFFWYMFFTFMYFTFYGIRDDGGRHDAEQRHRRYSLDRVLPTRYGTYLCRDDGFLLHYRIPIWWRWYSWACPVAWTLYGLVASQFGDITHVRLEDDGEAVKDFVNRFFGFEHENLGYVATAVVGFTVLFAFVFAFSIKVFNFQRR

SEQ ID NO: 12309 - protein, 228 aa, Zea mays
  VARIANT 85: note = Ancestral polymorphism is K, Derived polymorphism is I
MSPAVIPLPPHHLRPPLRSPSVEGSLPPLPSPPQSMDAPAPRRAHTCLVLLLIPALLLLPSMARSPIAHLLLFYCVCLLNMVDKKLMIQVVEVSTSKTGKHGHAKCHFVAIDIFNGKKLEDIVPSSHNCDIPHVNRTEYQLIDISEDGFVSLLTSDGNTKDDLRLPTDETLVAQVWGTRNWDRIRSCLQDSKVCRSLQNKNEKIAHLSQVNLKCYHVTGYYFSNIKHI

SEQ ID NO: 12310 - protein, 373 aa, Zea mays
  VARIANT 4..373: note = Derived polymorphism lacks residues 4 to 373
  VARIANT 34: note = Ancestral polymorphism is D, Derived polymorphism is G
  VARIANT 37: note = Ancestral polymorphism is R, Derived polymorphism is C
  VARIANT 42..373: note = Derived polymorphism lacks residues 42 to 373
  VARIANT 51: note = Ancestral polymorphism is T, Derived polymorphism is M
  VARIANT 111: note = Ancestral polymorphism is G, Derived polymorphism is R
  VARIANT 117: note = Ancestral polymorphism is L, Derived polymorphism is P
  VARIANT 148: note = Ancestral polymorphism is V, Derived polymorphism is A
  VARIANT 152: note = Ancestral polymorphism is S, Derived polymorphism is W
  VARIANT 157: note = Ancestral polymorphism is C, Derived polymorphism is Y
  VARIANT 163: note = Ancestral polymorphism is C, Derived polymorphism is F
  VARIANT 166..373: note = Derived polymorphism lacks residues 166 to 373
  VARIANT 223..373: note = Derived polymorphism lacks residues 223 to 373
  VARIANT 225: note = Ancestral polymorphism is P, Derived polymorphism is L
  VARIANT 226..373: note = Derived polymorphism lacks residues 226 to 373
  VARIANT 266..373: note = Derived polymorphism lacks residues 266 to 373
  VARIANT 290..373: note = Derived polymorphism lacks residues 290 to 373
MSAGSAAAVPGTNSAAHFVLVPMMAAGHTGPMLDMARTLSGRGALVTFVTTPLNLPRLGRAPSDGALPIRFLPLRFPCAEAGLPEGCESLDALPGLGLLRNFNDACAMLRGPLVALLRDREGDAPPASCVVSDACHPWTGGVARELGVPRFSFDGFCAFSSLCMRQMNLHRIFEGVDDDTRPATKRPFIWVVKPSNLAEFERWLSEDGFESRVGETGLVIRDWAPQKAILSHPATGAFVTHCGWNSVLECVAAGLPMVSCPHFAEQFMNEKLVVDVLRVGVPVGVKGAAQWGVEAEGVLATRQDVERAVAAVMDCGEEGSARRARAAELGRKAREAVVHGGSSFRNVALLIQHVQHRASTRNPWIEKKPNDRR

SEQ ID NO: 12311 - protein, 287 aa, Zea mays
  VARIANT 209..287: note = Derived polymorphism lacks residues 209 to 287
  VARIANT 196: note = Ancestral polymorphism is V, Derived polymorphism is A
  VARIANT 187: note = Ancestral polymorphism is W, Derived polymorphism is R
  VARIANT 146..287: note = Derived polymorphism lacks residues 146 to 287
  VARIANT 111: note = Ancestral polymorphism is S, Derived polymorphism is I
  VARIANT 107: note = Ancestral polymorphism is D, Derived polymorphism is H
  VARIANT 102: note = Ancestral polymorphism is H, Derived polymorphism is Y
  VARIANT 93: note = Ancestral polymorphism is A, Derived polymorphism is T
  VARIANT 91: note = Ancestral polymorphism is A, Derived polymorphism is V
  VARIANT 87: note = Ancestral polymorphism is N, Derived polymorphism is I
  VARIANT 84: note = Ancestral polymorphism is F, Derived polymorphism is I
  VARIANT 63: note = Ancestral polymorphism is P, Derived polymorphism is L
  VARIANT 20: note = Ancestral polymorphism is D, Derived polymorphism is E
  VARIANT 14: note = Ancestral polymorphism is H, Derived polymorphism is Y
  VARIANT 13: note = Ancestral polymorphism is G, Derived polymorphism is S
  VARIANT 11: note = Ancestral polymorphism is A, Derived polymorphism is V
  VARIANT 8: note = Ancestral polymorphism is P, Derived polymorphism is S
  VARIANT 3: note = Ancestral polymorphism is H, Derived polymorphism is R
MPHFVLVPMLAAGHAGPMLDMARALASRGALVTFVTTPLNLLRLGRAPGDGELPIRFLPLRFPCTEAGLPEGCESADALPGIDFLRNFHDACAMLRAPLVAHLREAHPPASGLVSDTCHPWTGAVARELGVPRLGLETFCAFSSFCMRQMSIHSVFEGISDHKRPRNMPLSATSGSDDATAVRCGSWLEQKKPRSAVLVSFGSLARSSQPQLVEIAHGLEASNRPFIWVDVERALEAVMDGGVVGAARQARAAELGRKAWDAVARGGSSDRNMSLLVDFVEQMKATV

SEQ ID NO: 12312 - protein, 315 aa, Zea mays
  VARIANT 106: note = Ancestral polymorphism is P, Derived polymorphism is L
MVDLALLLAERGARASLVTTPLNGARLRGVAEQAARAKLPLEIVELPFPTDVDGLPPGIENMDQVTDNGHFVPLFDALQKLAGPLEAYLRAQAPRPSCIVSDWCNPCAAGAARSLGIHRLFFHGPPCFYSLCDLNATDHGLRELAAAAAAADVDDGQERFVVPGMPVHVEVTKATAPGFFNSPGWEALRGECVEAMRAADGAVVNTFVGLEGQFVSCYEAALGKPVWTLGPLCLRNRDADTMSSRGADGGVGVRVQQHSAVAAWLDSKDTGSVVFVSFGSLARKLPKQLFEVGHGLEDSGRPFLFGLKHSVTKAN

SEQ ID NO: 12313 - protein, 217 aa, Zea mays
  VARIANT 163: note = Ancestral polymorphism is V, Derived polymorphism is G
  VARIANT 159: note = Ancestral polymorphism is Y, Derived polymorphism is F
  VARIANT 148: note = Ancestral polymorphism is I, Derived polymorphism is T
  VARIANT 139: note = Ancestral polymorphism is K, Derived polymorphism is E
  VARIANT 134: note = Ancestral polymorphism is V, Derived polymorphism is F
  VARIANT 131: note = Ancestral polymorphism is G, Derived polymorphism is E
  VARIANT 129..217: note = Derived polymorphism lacks residues 129 to 217
  VARIANT 106: note = Ancestral polymorphism is A, Derived polymorphism is T
  VARIANT 99: note = Ancestral polymorphism is G, Derived polymorphism is R
  VARIANT 95: note = Ancestral polymorphism is E, Derived polymorphism is G
  VARIANT 93: note = Ancestral polymorphism is G, Derived polymorphism is D
  VARIANT 87: note = Ancestral polymorphism is G, Derived polymorphism is R
  VARIANT 84: note = Ancestral polymorphism is A, Derived polymorphism is T
  VARIANT 83: note = Ancestral polymorphism is A, Derived polymorphism is T
  VARIANT 79: note = Ancestral polymorphism is P, Derived polymorphism is S
  VARIANT 72: note = Ancestral polymorphism is R, Derived polymorphism is Q
  VARIANT 21: note = Ancestral polymorphism is S, Derived polymorphism is L
MAQASLKLRRRPRPGSASRLLQPSGRPSSAQGKRSGRKRMGSASSLGARPRRGRLRGVMTNVTSVPRPERVRAMSSIRPAWPATIIGTSTKCGAGSVPGTAAALPADMALADETTGPGEYLTERRSCSRFGTFVTILAKKGVVVLPDIYANSGGVVVSYFEWVQNIQGFMWAEEKVNDELEKYMSSAFQHMKAMCKSLVLPKCAMTLELRGLKKQAH

SEQ ID NO: 12314 - protein, 143 aa, Zea mays
  VARIANT 3: note = Ancestral polymorphism is A, Derived polymorphism is V
  VARIANT 10: note = Ancestral polymorphism is P, Derived polymorphism is R
  VARIANT 14: note = Ancestral polymorphism is S, Derived polymorphism is P
  VARIANT 16: note = Ancestral polymorphism is P, Derived polymorphism is S
  VARIANT 22: note = Ancestral polymorphism is P, Derived polymorphism is L
  VARIANT 25: note = Ancestral polymorphism is A, Derived polymorphism is V
  VARIANT 26: note = Ancestral polymorphism is A, Derived polymorphism is V
  VARIANT 30: note = Ancestral polymorphism is G, Derived polymorphism is D
  VARIANT 37: note = Ancestral polymorphism is R, Derived polymorphism is C
  VARIANT 88: note = Ancestral polymorphism is E, Derived polymorphism is K
  VARIANT 110: note = Ancestral polymorphism is R, Derived polymorphism is H
  VARIANT 115: note = Ancestral polymorphism is A, Derived polymorphism is V
  VARIANT 117: note = Ancestral polymorphism is L, Derived polymorphism is F
MSAGSAAAVPGTDPAPHFVLVPMMVAGHAGLMLDMARTLSGRGTLVTFVMTPLNLPRLGRAPSDDALPIRFLPLRFPCAEEGLPEGCKSLDALPGLGLLRNFNDACAMLRGTLVALLRDREGDAPPPSCVVSDACHPWTGGLP

SEQ ID NO: 12315 - protein, 245 aa, Zea mays
  VARIANT 123: note = Ancestral polymorphism is R, Derived polymorphism is L
MAMEVRHRVPWPHGSAPRRQQATGGEGQRVRVQAGDALPLSIRHTNLIFSTLFAASLVYLMRRWREKIRASTPLHVVFLAEIFAPPLYYTSRRIPGPDAINPLPPTRSSQPVPPPAHACPNYRSDLGAAGGAPSRGPRRQGGPEGGAAEMRRDTVPERAAAAAAAARAIAGLPPHERINLPSNSEDLVSIYGSNPQGQALEELEEVFYEEEFDPIKYILQSIPDEGSDATYFDEQVSGASFCFSF

SEQ ID NO: 12316 - protein, 279 aa, Zea mays
  VARIANT 1: note = Ancestral polymorphism is T, Derived polymorphism is M
  VARIANT 136..279: note = Derived polymorphism lacks residues 136 to 279
MPAPCSALRDREGDALPPSCIVSDACHPWTGGVARELGVSCFLFDGFCAFSSLCMCQMNLHRIFEGVVDDDTRPARVPAFPIDLVEIGHGLEATKRPFIWVVKPRNLAEFEWWLSEDGFESRVGETGLVIRDWAPQKVILLNPAMGAFVTHCGWNSVLECVAAGLPMVSCPHFAEQFMNEKLVVDVLRVGIKGAAQWGMEAEGVLATRQDVERAVAAVMDCGEEGSARRARAAELGRKAQEAVVHGGSSFRNVALLIQHVQQRASTRNPWIEKKPSDRR

SEQ ID NO: 12317 - protein, 148 aa, Zea mays
  VARIANT 127: note = Ancestral polymorphism is R, Derived polymorphism is Q
  VARIANT 104: note = Ancestral polymorphism is R, Derived polymorphism is K
MPHFVLVPMLATGHAGLMLDMARALAGRGALVTFVTTPLNLLCLGRAPVDGALPIHFLPLLFPCAEAGLPEGCESADALPGIDFLRNFHDLCAMLRAPLVADLREADTLASGLDSDTCHPWTGAVARELGMPRLALETFCAFSSFYMR

SEQ ID NO: 12318 - protein, 100 aa, Zea mays
  VARIANT 13: note = Ancestral polymorphism is A, Derived polymorphism is S
MPLGLTLGSLGRSMRRKRLSSLDILSSKRAPRDYYKGKNCKPTGFHTRKGGYVIVDEKLPRFVVPDLTDFKLKAYVSQCARDLTASTASSTSAESTESKS

SEQ ID NO: 12319 - protein, 222 aa, Zea mays
  VARIANT 24: note = Ancestral polymorphism is V, Derived polymorphism is D
  VARIANT 28: note = Ancestral polymorphism is A, Derived polymorphism is P
  VARIANT 39: note = Ancestral polymorphism is A, Derived polymorphism is V
  VARIANT 49: note = Ancestral polymorphism is A, Derived polymorphism is V
  VARIANT 60: note = Ancestral polymorphism is R, Derived polymorphism is W
  VARIANT 62: note = Ancestral polymorphism is R, Derived polymorphism is C
  VARIANT 67..222: note = Derived polymorphism lacks residues 67 to 222
  VARIANT 69: note = Ancestral polymorphism is A, Derived polymorphism is T
  VARIANT 73: note = Ancestral polymorphism is L, Derived polymorphism is Q
  VARIANT 84: note = Ancestral polymorphism is T, Derived polymorphism is M
  VARIANT 97: note = Ancestral polymorphism is D, Derived polymorphism is N
  VARIANT 138: note = Ancestral polymorphism is C, Derived polymorphism is S
  VARIANT 198: note = Ancestral polymorphism is G, Derived polymorphism is S
MVPTEESAADTPAPPPPPPHFVIVPLVAQGHTIPMVDLALLLAERGARASLVTTPLNGARLRGVAEQAARAKLPLEIVELPFPTDVDGLPPGIENMDQVTDNGHFVPLFDALRKLAGPLEAYLRAQAPRPSCIVSDWCNPWAAGAARSLGIRRLFFHGPPCFYSLCDLNATDHGLRELAAGAAAADVDDGQERFVVPSMPVHVEVTKATAPGFFNSPGWEAL

SEQ ID NO: 12320 - protein, 407 aa, Zea mays
  VARIANT 1: note = Ancestral polymorphism is M, Derived polymorphism is I
  VARIANT 3: note = Ancestral polymorphism is A, Derived polymorphism is V
  VARIANT 8: note = Ancestral polymorphism is A, Derived polymorphism is V
  VARIANT 9: note = Ancestral polymorphism is V, Derived polymorphism is E
  VARIANT 15: note = Ancestral polymorphism is A, Derived polymorphism is V
  VARIANT 16: note = Ancestral polymorphism is P, Derived polymorphism is R
  VARIANT 19: note = Ancestral polymorphism is V, Derived polymorphism is M
  VARIANT 22: note = Ancestral polymorphism is P, Derived polymorphism is S
  VARIANT 26: note = Ancestral polymorphism is A, Derived polymorphism is V
  VARIANT 42..407: note = Derived polymorphism lacks residues 42 to 407
  VARIANT 149: note = Ancestral polymorphism is P, Derived polymorphism is S
  VARIANT 166..407: note = Derived polymorphism lacks residues 166 to 407
  VARIANT 167: note = Ancestral polymorphism is M, Derived polymorphism is I
  VARIANT 202: note = Ancestral polymorphism is R, Derived polymorphism is L
  VARIANT 206: note = Ancestral polymorphism is P, Derived polymorphism is S
  VARIANT 207..407: note = Derived polymorphism lacks residues 207 to 407
  VARIANT 216: note = Ancestral polymorphism is E, Derived polymorphism is V
  VARIANT 324..407: note = Derived polymorphism lacks residues 324 to 407
  VARIANT 326: note = Ancestral polymorphism is G, Derived polymorphism is C
  VARIANT 362..407: note = Derived polymorphism lacks residues 362 to 407
MSAASAAAVSGMDLAPHFVLVPMMAAGHAGPMLDMARTLSRRGALVTFVTTPLNLPRLGRAPSDGALPIRFLPLRFPCAEAGLPEGCESLDALPGLGLLRNFNDACAMLRGPLVVLLRDREGDAPPASCVVSDACHPWTGGVARELGVPRFSFEGFCAFSSLCMRQMNLHRIFEGVDDDNTRPVRVPAFPIHVEISRARLVRSSLPQLVEIGHGLEATKRPFIWVVKPGNLAEFERWLSEDGFESRVGETGLVIRDWAPQKAILSHPATGAFVTHCGWNSVLECVTVGLPMVSCPHFAEQFMNEKLVVDVLRVGVPVGVKGAAQWCVEAEGVLATRQDVEGAVAAVMDCGEEGSARRARAAELGRKAREAVVHGGSSFRNVALLIQHVQQRTSTRNTWIEKKPSDRR

SEQ ID NO: 12321 - protein, 138 aa, Zea mays
  VARIANT 109: note = Ancestral polymorphism is A, Derived polymorphism is T
  VARIANT 100: note = Ancestral polymorphism is R, Derived polymorphism is H
  VARIANT 96: note = Ancestral polymorphism is E, Derived polymorphism is D
  VARIANT 85..138: note = Derived polymorphism lacks residues 85 to 138
  VARIANT 82: note = Ancestral polymorphism is R, Derived polymorphism is H
  VARIANT 71: note = Ancestral polymorphism is S, Derived polymorphism is F
  VARIANT 66: note = Ancestral polymorphism is E, Derived polymorphism is K
  VARIANT 64: note = Ancestral polymorphism is A, Derived polymorphism is T
  VARIANT 63: note = Ancestral polymorphism is F, Derived polymorphism is Y
  VARIANT 54: note = Ancestral polymorphism is E, Derived polymorphism is K
  VARIANT 51..138: note = Derived polymorphism lacks residues 51 to 138
  VARIANT 42: note = Ancestral polymorphism is P, Derived polymorphism is H
  VARIANT 37: note = Ancestral polymorphism is R, Derived polymorphism is H
  VARIANT 28: note = Ancestral polymorphism is G, Derived polymorphism is R
  VARIANT 17: note = Ancestral polymorphism is M, Derived polymorphism is V
  VARIANT 10: note = Ancestral polymorphism is C, Derived polymorphism is Y
  VARIANT 2: note = Ancestral polymorphism is P, Derived polymorphism is S
MPCFMLETFCAFSSFYMRQMNIHSVFEGIGDQKHPMRVPSFHIHVEMLRARSPENFSSFGKVFADEKKPRSVELLSFGSLARSSQPQLVEIAHGLEASNHPFIWVVKPTNLAEFERWLSDSDNGFERGVGDKGLVVTG

SEQ ID NO: 12322 - protein, 276 aa, Zea mays
  VARIANT 38..276: note = Derived polymorphism lacks residues 38 to 276
  VARIANT 85: note = Ancestral polymorphism is L, Derived polymorphism is V
  VARIANT 105: note = Ancestral polymorphism is W, Derived polymorphism is S
MRAADGAVVNTFVGLEGQFVSCYEAALGKPVWTLGPLCLRERDADAMSSRGADGGQQHSAVAAWLDSKETGSVVFVSFGSLARKLPKQLFEVGHGLEDSGRPFLWVVKLAEASPPEVREWLGALEARAAGRGLVVRGWAPQLAILSHRAVGGFVTHCGWNSLLESVAHGVPVVTWPHFADQFLNERLAVDVLGVGVPIGVTAPVMVFDDESVVVARGDVARAVSALMGEGKEAGERRRRAREYGEKAHGAMEKGGSSYENLTQLIESFGQVEARKG

SEQ ID NO: 12323 - protein, 293 aa, Zea mays
  VARIANT 236..293: note = Derived polymorphism lacks residues 236 to 293
  VARIANT 258: note = Ancestral polymorphism is W, Derived polymorphism is S
MTFGGVAAFPAALGHGQQVDYGEDAGGLGDSDAGGGRYMNGRTQDDHYQDLKGLDPTVKPDSWKNGCQQSEGYGIQDSICDDGHTETAKTKKKMDESLEPSGENNNCEQVEISSKDGKKVPMKLEVSSGVQTTSSIMEQEVHSGFVGVEVSVSHILTYIYITEYISLRVKSILLKTVPWSLLTKSPQWHMRVAFACSVCGQRTTRAINPHAYTNETVFVQGVQKHEEESVTSRHPQLHYESKLYMLLQGGIGIPHLKWFGVEGQYNVMVIDLLGPTMETYLTAAAESSHLKQY

SEQ ID NO: 12324 - protein, 517 aa, Zea mays
  VARIANT 111..517: note = Derived polymorphism lacks residues 111 to 517
  VARIANT 426: note = Ancestral polymorphism is D, Derived polymorphism is N
  VARIANT 463: note = Ancestral polymorphism is R, Derived polymorphism is C
  VARIANT 468..517: note = Derived polymorphism lacks residues 468 to 517
MENPAPPTNPASATPSPSRQLPDFQQSVRLKYVKLGYHYLITHGMYLLLTPLMVLVAVYLSTLSPRDVADLWAHLRLNLISVLACSTLLVFLGTAYFLTRPRPVYLVDFACYKPGPERRCTRDTFMRCSRLTGCFTDASLEFQRKILERSGLGEDTYLPPAVTRVPPNPSMDEARAEAREVMFGAVDELLAKTGVKPKDIGILVVNCSLFNPTPSLSAMVVNHYKLRGNVVSYNLGGMGCSAGLLSVDLAKDLLQTHPGSYALVISTENITLNWYSGNDRSKLVSNCLFRMGGAAVLLSNRRSDRRRAKYELVHTVRTHKGADDRCFGCVTQEEDGEGVVGVSLSRDLMAVAGDALKTNITTLGPLVLPLSEQLLFMATLVAKKLLKMKKVKPYIPDFKLAFEHFCIHAGGRAVLDELESNLALTDWHMEPSRMTLHRFGNTSSSSLWYELAYSEAKGRIRRRHRVWQIAFGSGFKCNSAVWRALRSVNPAEETNPWMDEIDRFPVDVPKVSKVSSD

SEQ ID NO: 12325 - protein, 346 aa, Zea mays
  VARIANT 13: note = Ancestral polymorphism is R, Derived polymorphism is C
MGVDYYKVLQVGRGASDDELKKAYRKLAMKWHPDKNPSNKKEAEAKFKQISEAYEVLSDSQKRAIYDQAGEEGLKAQVPPTGAGGPSGSSFYGGNASTFQFNPRSADDIFAEFFGFSSPFSTMGGMGGGAERGMRGSRFGMFGDDIFGSHPQFPGEASMHVPQRSQKVPPIENRLPCNLADLYKGTTKKMKISREVLDASGRTLVVEEILTIDIKPGWKKGTKITFPEKGNEAPHIIPADIVFIIDEKPHDVFTRDGNDLVMTQKITLAEALTECTVNITTLDGRNLTVQINNIIYPGYEEVVPREGMPIQKDSSKKGNLRIKFSIKFPSRLTSEQKAEIKRLLGS

SEQ ID NO: 12326 - protein, 440 aa, Zea mays
  VARIANT 258: note = Ancestral polymorphism is A, Derived polymorphism is V
  VARIANT 297: note = Ancestral polymorphism is S, Derived polymorphism is L
MATHAGENGSGHENGGGHAEWRFARAAKEGALAVAGDKMSIRAVRFKISASLDARDPRPVLPLAHGDPSVFPAFRTAAEAEDAVAAALRTGKFNCYPAGVGLPEARRALAEHLSSDLPYKLSSDDIFVTAGGTQAIEVVVSVLAQPGTNILLPRPGYPNYEARAGLHNLEVRRFNLIPERGWEIDIDGLESIADKNTTAMVIINPNNPCGSVYTREHLAKVAEVARKLGILVIADEVYGNLVFGDTPFVPMGVFGHIAPVLTIGSLSKRWIVPGWRLGWVAVCDPNKVLQETKIIASITNFLNVSTDPATFVQGALPHILKNTKEDFFKRIIGLLAETSEICFSGIKDIKCITCPHKPEGSMFVMVKLNLYLLESIHDDIDFCCKLAKEESVILCPGSVLGMENWIRITFAIDSSSLLDGLERLKSFCQRHKKKNLLNGH

SEQ ID NO: 12327 - protein, 63 aa, Zea mays
  VARIANT 10: note = Ancestral polymorphism is G, Derived polymorphism is E
  VARIANT 14: note = Ancestral polymorphism is C, Derived polymorphism is S
  VARIANT 28: note = Ancestral polymorphism is S, Derived polymorphism is Y
  VARIANT 31..63: note = Derived polymorphism lacks residues 31 to 63
  VARIANT 58: note = Ancestral polymorphism is K, Derived polymorphism is N
MVPIPPIVRGTFHCERSCSSLEYHEANSGIRHHVSHICINTFRTNKVSLTLYCALFSKITILL

SEQ ID NO: 12328 - protein, 371 aa, Zea mays
  VARIANT 221..371: note = Derived polymorphism lacks residues 221 to 371
  VARIANT 198..371: note = Derived polymorphism lacks residues 198 to 371
MAHRVLLLLSLASAAAVAAAVDAEDPLIRQVVPGGDDNDLELNAESHFLSFVQRFGKSYKDADEHAYRLSVFKANLRRARRHQLLDPSAEHGVTKFSDLTPAEFRRTYLGLRKSRRALLRELGESAHEAPVLPTDGLPDDFDWRDHGAVGPVKNQGSCGSCWSFSASGALEGAHYLATGKLEVLSEQQFVDCDHECDSSEPDSCDSGCNGGLMTTAFSYLQKAGGLESEKDYPYTGSDGKCKFDKSKIVASVQNFSVVSVDEAQISANLIKHGPLAIGINAAYMQTYIGGVSCPYICGRHLDHGVLLVGYGASGFAPIRLKDKPYWIIKNSWGENWGENGYYKICRGSNVRNKCGVDSMVSTVSAVHASKE

SEQ ID NO: 12329 - protein, 503 aa, Zea mays
  VARIANT 271..503: note = Derived polymorphism lacks residues 271 to 503
MPPGRMDGARTRKDLGEVPITEYEKERALNVMRNNKMLSSLGITGLTSLIRSSSTRKNSIAREDFDPLYEPDHSEDNDHHVADQDEPFCIERRTTNMSTGFGGTKGSKRVVAPNVEDQVGRVTRQKTKELSLVEKDIHGSTANTDEHTLISANFSAHHDDEIQMCDEDKWIRGKSMGKQLERISRGLNTKIPLVITEGNRRPEVPMQAAMLASEGGIVIRQHMPILTHWKEYKNDKSYLEDFVGRIGGQFAIDTKNKDVKYACADLMRCNQRQMRYKLKKAYFNGVAADKVRTTSPLSTMTDEQWMQLVNMWSTPKHKDKCVNNKVIRGKVRFQQKTGSRSYIAHMHVVKQAKYGDAPPSAIDLFKECHCSRKTGFAEPVKEAIDTMEALVAEPGVEGKESKTPTEAVAQVLSSSKFLYNIGLVPTTKKSCNGGDPTCVAELEAELESEKQNSLEVRAQLDALKKKVEESEEARAKELEKINDLQKGADETNALLRRLFSLNK

SEQ ID NO: 12330 - protein, 963 aa, Zea mays
  VARIANT 170..963: note = Derived polymorphism lacks residues 170 to 963
MPPFRMPSHFLALPLLLLLLLQAPSPEAAESTPGTRTRKIGSSGASSVFSLFNLKDKSKFWTESIIRKEFDDLEGSASRDSSKNGLLNFTRAGNIANYLSLAEVDSIYLPIPVNFIFIGFDGNGRHEFKLGPEELERWFTKIDHIFEHTRIPPVGEVLTPFYKTTVKKLQHYDLPLVSHVNHNFSVHAIHMGEDVLSVFEHAIKVLSCKDDLVDSRENEEIFLQVDSAQMEHIFSTLVDHLQIQEAYNIFVLNPKPIGKRINYGYRKGFSESEINLLRENKTLQARILQSKSDNKLFLDIEKGVNRRPLYESHPLSSFSWTRTDSMDMILHGTKDEVHDIVQSALKSSDLKGLHAQCLTDIWIGRERFAFVDLSAGPFAWGPSVGGDGVRTELSLPNVAKTVGAVAEVTEEEAEEKLQDTIRERFSSFGEDYHAVDILLAEIDVYELFAFKHCVGRRIQLALCKELDERMHDLKKELEGYNTGDFDETNKKKALDALKRMESWNLFRDTSVEHHSYTVAHDSFLAQLGSMLWGSMRHVIAPSASHRVYHYYEKLSFQLYFVTREKVRSIKQLPVNVKSIRESLNSVLLHHQNSMFSQNMLSLSEDPSLMMAFSMARRAAAVPLLLVNGTYKSTVSTYLDSAILQHQLQKLNEHNSLKGRHSNHRSTLEVPIFWFIHNEPILLDKHYQAKALSNMVVVVQSDDDSWESHLQCNGRPILWDLRNSADSDLAFAATVLMQHYLLTIRKPVKAAIAATAEYVSGLLPPHLVYSHAHETAIEDWTWSVGCNPSAVTSEGSQLSEFQQDVIARNYIITSVEESIQVINSAIQQLVIERTTEKGFKIFKAHESKMVEKYNAVVSLWRRVSAMSKGLRYGDAVKLMSMLEDASNGSVILALSGFCMHAVLALFGLFSSAVNSTISSLHPVQCTRERKVDVQLDLTTLPAFLAVFLLLWFLLRPRRPKPKIN

SEQ ID NO: 12331 - protein, 269 aa, Zea mays
  VARIANT 163: note = Ancestral polymorphism is W, Derived polymorphism is C
  VARIANT 144..269: note = Derived polymorphism lacks residues 144 to 269
  VARIANT 102: note = Ancestral polymorphism is F, Derived polymorphism is S
MASVGLARVSGVARPLMRLVTMSRMPILQQLHLEEQLLRRTSDNWCIINDGTAPATIVMGVSGRVSELVNIQLVLRDKVPIVRRFSGGGTVIVDQGTVFVTFICNKNVVAGLQPFPRDIMSWSGQLYGKVFDRFGEFHLRENDYAFSHRKFGGNAQSITKNRWVHHTSFLWDYDVKNMDYLKIPKRAPEYRLARNHTDFLCRMKEYIPSRSVFTDGVIAALGEHFSVQPMDLQAILSGDEEFVPSTKLLSQQYLEEIVSSKESLEIIES

SEQ ID NO: 12332 - protein, 671 aa, Zea mays
  VARIANT 227..671: note = Derived polymorphism lacks residues 227 to 671
MGIPRMVSPSSSQTPPPPTAAAAHRLPRHHRLSAVVAASTRREGYRSRTTAPGRRGDGGVGSIWVNPSAPPRPGVASRTLRRLVELDNLDAALRLLLGGPSSTPATSDSAPEPPAVISCNILIKKLCARRRLADAERVLEALKASGAADAVSHNTLVAGYCRDGSLGDAERVVEAARASGTANVVTYTALIDGYCRSGRLADALRLIASMPVAPDTYTYNTVLKGLCCAKQWEQAEELMREMIRNSCHPNEVTFATQIRAFCQNGLLDRAVELLEQMPKYGCTPDVIIYSTLVNGFSEHGRVDEALKLLNTMLCRPNTVCYNAALKGLCIAGRWEEVGELIAEMVRKDCPPNDATFSTLINSLCQNRLVEYAVEVLEQMQKYGYMPDVVSYNTIISCFSDQARADDALKLLKSMLCKPDTISFNAVLKCLCKAKRWYDAVELVAKMLKKDCRINEMTFNILIDSLCQNGQVKDAIEVFELMPKYRCMPDIVTYSSLINGFSEQGLDEMAFDLFRSMPCRADIFSYNATLKGLCMAARWDDAGELIADMVTEDCLPNEVTFNILISSLCQKGLVNRAIDVYEQMPKYGITPDIFTYNALINGYSEQGRLDDALKFLSTMPCEPDTISYNSILKGLCRAERWKDAEKLVTEMLRKNCTPNEVTFKYANQLFIK

SEQ ID NO: 12333 - protein, 123 aa, Zea mays
  VARIANT 19: note = Ancestral polymorphism is R, Derived polymorphism is C
  VARIANT 50: note = Ancestral polymorphism is V, Derived polymorphism is F
  VARIANT 66..123: note = Derived polymorphism lacks residues 66 to 123
  VARIANT 69..123: note = Derived polymorphism lacks residues 69 to 123
  VARIANT 88: note = Ancestral polymorphism is E, Derived polymorphism is K
  VARIANT 100: note = Ancestral polymorphism is E, Derived polymorphism is K
MAFAAGGTSRFVIKLNANRRDGPGRGPPWHLRWCGLCRLIATVIDWAFEVLCCWHFGRNADDLVNRHFQSQTREPGNIVVQFSHGENERKHLHLIFDIVELYVGFNAYTQPFDRMLWFLRLRR

SEQ ID NO: 12334 - protein, 325 aa, Zea mays
  VARIANT 11: note = Ancestral polymorphism is S, Derived polymorphism is I
MITVDDDQVRSCGGDSGGIPVPTSDDAAAGRQMLTTMGEHHQQQLTVSRIRTAVSMLTRRTGHARFRRGPVAERHHASSSDHHQLRPPAAGGGVALDLDLLVAKTCDDAAAGFSASASWTSSSLPSTTSLTAGEGSVSKGRAQQQGCGALFFVQPVSGGGGDGHSAGKPLRLAPSSMQQQHACPGYSSPGNALEDGKCHDRARSENDAAAAAGKTHGDRCHCSNKRKSRVKRVVRVPAISSRNADIPPDDHSWRKYGQKPIKGSPYPRGYYKCSTVRGCPARKHVERDPGEPSMLIVTYEGDHRHEDRPAGGGAQTDQDRTTTSS

SEQ ID NO: 12335 - protein, 157 aa, Zea mays
  VARIANT 28: note = Ancestral polymorphism is A, Derived polymorphism is V
  VARIANT 36: note = Ancestral polymorphism is P, Derived polymorphism is R
MADDANRAAFMELQSRMIDTTAKIKQVAPLVPFSDRFHRFRSCLILGLFSCRVLLQTQMRSKEGEKKRAYLTLEELRQLPDDTNTYKTVGKVFILEPKSVLFNEQEQKLNDSESAIASMQTSKDYLEKQQGEVENNIRELLQQDPGLARQILSMTVQ

SEQ ID NO: 12336 - protein, 230 aa, Zea mays
  VARIANT 177: note = Ancestral polymorphism is H, Derived polymorphism is Y
  VARIANT 100: note = Ancestral polymorphism is G, Derived polymorphism is S
  VARIANT 51: note = Ancestral polymorphism is P, Derived polymorphism is L
MGLISDELFQSLVTTCNGKYWNNSNPSCQENMEQFYTQIKGINMEHILCPPCRYKMGITNQFIEYDSGQMFESLSKTSKHGLECNDQELALEKLFDTRSGREKLHAKKVEVSGPWKRCPKRVLYTRDILTLIEYHLNITSKGYRVFIYSGDHSLLVPFTSTLEWLKKLNYKEIEKWHPWYLENQIAGYSIRYENNILFATIKGAGHVPSDYLPFEVFAAYQRWIDGAASL

SEQ ID NO: 12337 - protein, 267 aa, Zea mays
  VARIANT 217..267: note = Derived polymorphism lacks residues 217 to 267
  VARIANT 170: note = Ancestral polymorphism is P, Derived polymorphism is T
  VARIANT 127: note = Ancestral polymorphism is P, Derived polymorphism is H
  VARIANT 92: note = Ancestral polymorphism is H, Derived polymorphism is Q
  VARIANT 85: note = Ancestral polymorphism is H, Derived polymorphism is R
MPRQRTLTSEAAGGRLLLVVVAVLLCLSVPLGRAAPPGAEVAEFPGFTGKLPSKHYAGYDLSSSIYEKKSNILCRVQYLRLHCIHTISSVLQTFRVRRYVTVGQHEQRKRHLYYYLAVSERNPSLDPVVIWINGGPACSGFSAFLHSFGPFRMEGSQVHINDGPRVAVNPYSWTKMASLLLVDSPAGVGYSYADHEDDYTTDDTSRVADLYDFLSKWFAEYAEFLSNPFYVAGCSYSGVIVPVLAHEIIKRNEESGGVKINFKVIHL

SEQ ID NO: 12338 - protein, 424 aa, Zea mays
  VARIANT 85..424: note = Derived polymorphism lacks residues 85 to 424
MTRISPFPCRVTHADLSIPIARTLEPDDLLAFVHAVSDARHTDKSPLRRHTLCALALVAASHPRDVVAPLVPRILAAALRRVRDQDSSIRAALVDTTCAAAAASASAALRPLTDALLHEPDDLLKLLRSNAFKAKPALITLIGACAAMGIDVEVTASITCLRDAIASDDWAARKAAAEALVALALEHTDLLTTYKSSCVTFFEARRFDKVKVVRESMNRMIEVWKEISGAEEDECSSALPPASQSQRRPSLTATRKSILSVSKSSLPDVSTSVTKTNSPSSIRNKKLSPPSYHKVRQANNCDYKVDIVVSLDATPIKVVMEEKLLKGRGVRDRLESRRTLFKGSEDRSTKLAAHKAGSRVVPYEGGGNLEEISEVEGGSERCSFIFEYFSNFKNKNYRQPITLPGTEQIRNWGCGRFFLISCEL

SEQ ID NO: 12339 - protein, 113 aa, Zea mays
  VARIANT 73: note = Ancestral polymorphism is I, Derived polymorphism is T
  VARIANT 70: note = Ancestral polymorphism is D, Derived polymorphism is E
  VARIANT 65..113: note = Derived polymorphism lacks residues 65 to 113
  VARIANT 61: note = Ancestral polymorphism is P, Derived polymorphism is H
  VARIANT 60: note = Ancestral polymorphism is D, Derived polymorphism is Y
  VARIANT 58: note = Ancestral polymorphism is N, Derived polymorphism is D
  VARIANT 40: note = Ancestral polymorphism is G, Derived polymorphism is E
  VARIANT 38: note = Ancestral polymorphism is M, Derived polymorphism is K
  VARIANT 28: note = Ancestral polymorphism is R, Derived polymorphism is H
  VARIANT 21: note = Ancestral polymorphism is K, Derived polymorphism is T
MGAPSIIFIDENDSIAPKREKTNGEVERRIVSQLLALMDGLKSRSHVIVMGATNRPNNIDPALRRFGRFDQVIDIGVPDEVGRLEVNLELISKDTHGYVGADLAALCTEAALH

SEQ ID NO: 12340 - protein, 214 aa, Zea mays
  VARIANT 197: note = Ancestral polymorphism is R, Derived polymorphism is C
  VARIANT 71: note = Ancestral polymorphism is P, Derived polymorphism is L
  VARIANT 47..214: note = Derived polymorphism lacks residues 47 to 214
  VARIANT 17: note = Ancestral polymorphism is G, Derived polymorphism is C
MGKKLQLADDEENCWYGVGGAEAECGVDDEFRATDLRPLSLLSPHTQAFHLAWLSLFVCFFAAFAAPPILPALRPALVLMPSDAPAAAVGSLSATLLVMPLAYELVLRLGVPITVAWRVTYLLPCTLLITTGLAVLAFPNDHPRGVGAGAKTGNSLWKVVPGGVGNYRAWVLALTYGYCYGVELIMENVAANFFRKRFHLPWRLRAPRRRASAR

SEQ ID NO: 12341 - protein, 218 aa, Zea mays
  VARIANT 164: note = Ancestral polymorphism is I, Derived polymorphism is N
  VARIANT 160: note = Ancestral polymorphism is A, Derived polymorphism is T
  VARIANT 150: note = Ancestral polymorphism is N, Derived polymorphism is K
  VARIANT 136: note = Ancestral polymorphism is M, Derived polymorphism is V
  VARIANT 122: note = Ancestral polymorphism is I, Derived polymorphism is N
  VARIANT 119: note = Ancestral polymorphism is P, Derived polymorphism is L
  VARIANT 113..218: note = Derived polymorphism lacks residues 113 to 218
  VARIANT 92..218: note = Derived polymorphism lacks residues 92 to 218
  VARIANT 4: note = Ancestral polymorphism is W, Derived polymorphism is C
MVLWVFGYGSLIWNPGFDFDDKILGFIKGYKRTFNLACIDHRGTPEHPARTCTLETDDEAICWGIAYCVKGGPEKELKAIQYLERRECEYDQKISIDFYKEGDPLKPAVTGVLVFVSTPDPIGNKYYLGPAPLQDMARQIATANGPTGYNRDYLFSMEKALASISHEDDSIIELANEVRKVLNRTKETKITGANASMKSHAPLVHLSALPEGTVVDSR

SEQ ID NO: 12342 - protein, 356 aa, Zea mays
  VARIANT 290: note = Ancestral polymorphism is A, Derived polymorphism is D
  VARIANT 261: note = Ancestral polymorphism is V, Derived polymorphism is E
  VARIANT 248: note = Ancestral polymorphism is E, Derived polymorphism is D
  VARIANT 247: note = Ancestral polymorphism is V, Derived polymorphism is M
  VARIANT 229: note = Ancestral polymorphism is V, Derived polymorphism is G
  VARIANT 213: note = Ancestral polymorphism is R, Derived polymorphism is C
  VARIANT 151: note = Ancestral polymorphism is P, Derived polymorphism is A
  VARIANT 107: note = Ancestral polymorphism is L, Derived polymorphism is Q
  VARIANT 93: note = Ancestral polymorphism is M, Derived polymorphism is V
  VARIANT 35: note = Ancestral polymorphism is K, Derived polymorphism is N
MVVMGKHDDDEKQQQQMEMEDVHEVGAVEVLPLENEAEAALVRKISGLAAAIAKLPSLSPSPEVNALFTDLVTACIPRSTVDVERLGPELQRMRAGLIRRCADAEAQLEAHYSDLLAALDSPLDHLPLFPYFGNYLLLGELEHGLLARHVPGPPPARVAFVGSGPLPLSSLVLAARHLPAAAFDNYDICAEANGRARRLVRADAALAARMAFRTSDVAHVTRGLATYDVVFLAALVGVAAEEKARVVEHLGRHMAPGAALVVRSAHGARAFLYPVVDPDEIRRGGFDVLAVHHPEGEVINSVIVARKPVPVAGVGHAHAHAHGHGAVLSRPCCLCCEMEARTHQKMEEVAMEQLPS

SEQ ID NO: 12343 - protein, 374 aa, Zea mays
  VARIANT 187: note = Ancestral polymorphism is P, Derived polymorphism is L
  VARIANT 277: note = Ancestral polymorphism is L, Derived polymorphism is Q
MAAEQCQSSGGSSPRPRAAYTIGYAMLPNKHDTFVQPSFIDLAAQHGIRLVALDASRPLAEQGPQLDLVVHKLYGQAWRARLEAFSALHPDVPIIDPPAAIDRILDRFTMLDVVSGLDCVAVPRQVMVHDAGALQQAADAAADDVLGLGGLRFPLVAKPVEVDGSAASHDLCLVYRREGLRGLRGRPPLVLQEFANHGGVLFKVYVVGDRATCVVRSSLPDVPPERLRDPAAAAAAPFANISLLAPSGGDEGSEKVVPPPQDFVDRVAREIRRAVGLHLINFDLIRTRDDAAGGDANKYLVLDINYCPGYSKMPGFEPVLTEFFLERLRSRSRSIDERPAPGAEARQAEAEAEAEPSSATIPIPPGAEARLAQA

SEQ ID NO: 12344 - protein, 531 aa, Zea mays
  VARIANT 40: note = Ancestral polymorphism is A, Derived polymorphism is V
  VARIANT 51: note = Ancestral polymorphism is A, Derived polymorphism is V
  VARIANT 181: note = Ancestral polymorphism is A, Derived polymorphism is G
MAVSAAKMAVATAVSLAVHWLLRSFLQAQHPALGLLLPTVVFIGIAASGNAAGAANDAPPGPPAVPVFGNWLQVGNDLNHRFLARLSARYGPVFRLRLGVRNLVVVSDPRLATEVLHTQGVEFGSRPRNVVFDIFTANGADMVFTEYGDHWRRMRRVMTLPFFTARVVQQYRGMWEAEMDAAVSDVASAAQRAAGLVVRRRLQLMLYNIMYGMMFDARFGSVDDPMFVEATRFNSERSRLAQSFDYNYGDFIPVLRPFLRGYLARCKDLQARRLAFFNSNYVEKRRKVMDAPGDKGKLRCAIDHVLQAEKSGEITPENVIYIVENINVAAIETTLWSIEWALAEVVNHPAVQRKVRDEIKAVVADHEPITESTIHRLPYLQAVIKETLRLHSPIPLLVPHMNLEEAKLGGYTIPKGSKVVVNAWWLANNPELWDKPEEFRPERFLGEEKSVDATVGGKVDFRFLPFGVGRRSCPGIILALPILALIVGKLVRSFEMVPPPGVEKLDVSEKGGQFSLHIANHSVIAFHPVSA

SEQ ID NO: 12345 - protein, 408 aa, Zea mays
  VARIANT 199: note = Ancestral polymorphism is A, Derived polymorphism is V
  VARIANT 313: note = Ancestral polymorphism is S, Derived polymorphism is I
MAPSQLLGSTDLWRPVAAARGGGWATAAVLLLLLASHLAVLLVRLRRRLRGGGRNAHPEAAVAPAPASTPPGSASASGIEGLVTEGDLRQLVGSLGLGAHEPEREGWEHVISKSSDDVSYKAWCDKPTAGPPKYLSITTYERCSAEQLRDFYMDNEYRMEWDNTVKKHEQLQYDENSGVEVGRTIKKFPLLTPREYILAWRVWEANDKSFYCFIKECEHPLAARQRKFVRVQLLRSGWCIRKIPGRDACQITVLHHEDNGMNIEMAKLAFSKGIWSYICKMNNALRRYPQHGSPSVSILTMQKLMKKDLTNLILFACQFPQDLETADASLSASQNTAASVVPSTPTSRTSPCKLEGRKSRQMIASGILLVGSIVCLSRGRSNLGAQLAMAFFLKKAFKQERQSSSSST

SEQ ID NO: 12346 - protein, 602 aa, Zea mays
  VARIANT 138: note = Ancestral polymorphism is E, Derived polymorphism is G
MSDTTPAATALNHWNRSIQLAAASGSYGHCLRLYAGPLLAAGLRGDASTFPSLAKSCAALRLPGLGRAVHALAFLSGAAVSRDAFVRTSLVDMYAKCGRLPDAHRLFDETPCSSRTLVAWNCMISAYGRSSQVEEAVGVFNAMRRAEVRPSGSTVVGLLSGCADSVSARYPGVSVYGLTIKSGLDADLLVSNSVLTMLVRGGQLDSARLLFDRVENKSVVTWSAMASAYLQTGDWMEVFALFSSMRETEQPMDSVVLANLITAAMLFGNNLVAKGVHALAIKVGFDRQEDLAASLVNLYSKCGNLLAAREVFDSLQWKSVIMWTSMLNGYVECGYPDEALATFDAMLCAKVEPNKATVLAVLSAGANLGSANVAQKVEEHVKAMELQSDLQVCTRLIDMYCKCGSIQRARKIFDSVPNRDLAIWSAMINGHACNGEGSEAVVLFNEMQSKGVRPDAIVFTHILTACSHSGSVDEGLRCFHSMTAEHGIEPSVEHYMCMIDLLCKAGHLSSAIKFFGEMPVRLRNQVLAPLISAHRVNGADSSVEFMSEGLLNLGSQDSGHCVLISNMLSCLGQWKKARSYRTLISKQGLVKKPGWSYIELGG

SEQ ID NO: 12347 - protein, 526 aa, Zea mays
  VARIANT 291: note = Ancestral polymorphism is I, Derived polymorphism is T
  VARIANT 289: note = Ancestral polymorphism is N, Derived polymorphism is I
MVEAAAGRRTGTSRRRPSGSGGEHRHLVALAVAARVAMVTTRSVGPAAVAEGDGAGAAVTDAGAAGGGGRCMEDFFDCLLGLLGALGMTWAAARPQRQPRPPLPRGAAGAGPAPTDSRRFAAELRATPGRIAGNGACAVASLYTLQGKKGVNQDAMIFWENFCSRDDTIFCGVFDGHGPYGHLVAKRVRDLLPLKLGEGLTTEDGRVTSTGNIKLNTHDVASPEHIDKGSTAISSEAQQNGEYPETFPALRTSFLKAFRVMDRDLKLHKSIDCFFSGTTAVAVIKQEHNLIIGNLGDSRAVLGTRDENNQLIAVQLTVDLKPNIPSEAQRIRQRRGRIFALPEEPEVARVWLPKYNSPGLAMARAFGDFCLKDHGVISTPDVSYHHITEKDEFVVLATDGVWDVLSNDEVVSTVCRATSQASAARFLVESAHRAWRTRFPTSKIDDCAVVCLFLNTDKASESSSSLAKNLADAVEASSAGRATTVQVSAGASTDVAALVPVPDGNEVSIAETITKLVTLMDLPKDG

SEQ ID NO: 12348 - protein, 502 aa, Zea mays
  VARIANT 302: note = Ancestral polymorphism is N, Derived polymorphism is I
MAPAPRRASSFFSVLLVLLFALSVVGRAGATGVFQVRRKFPRHGRRGVAEHLAALRRHDVGRHGRLLGAVVDLGLGGVGLPTAAGLYYTRIEIGSPPKGYYVQVDTGSDILWVNCIRCDGCPARSGLGIELTQYDPAAGSGATVVGCQDEFCVATNSAGGVPPTCSSTSSPCQFAITYEDGGTAAGFYVTDLVHYNQVSGGDGQTTTSNASITFGCGAQLGADLGSSDQAVDGILGFSQSDSSMLSQLAAARRVRKVFAHCLDTVRGGGIFAIGDLCPQAEEDAVGAQRVCEIYHRTSYNVNLQGISVGGATLQLPTSTFGSGGSKGTTIIDSGTTLAYLPREVYRTLLAAVFAKHQDLALHNYQDLVCFQFSGSVDDGFPVITFSFEGGLTMNVYPDDYLFQNRNDLYCMGFLDGGVQTDIVLLGDLVLSNKLVVYDLEKEVIGWTEYNCSSSIKIKDDKTGSVYTVDAQNISAGWRFQRHNSLVLLILVTTIWSCLSYIA

SEQ ID NO: 12349 - protein, 72 aa, Zea mays
  VARIANT 6: note = Ancestral polymorphism is R, Derived polymorphism is I
  VARIANT 8: note = Ancestral polymorphism is L, Derived polymorphism is F
  VARIANT 18: note = Ancestral polymorphism is A, Derived polymorphism is V
  VARIANT 33: note = Ancestral polymorphism is I, Derived polymorphism is K
MVQEGRMLLNYVTMNDIVIRKILKKYDKSPWLIELGAFHLNCDASDAYEGFFKNGFFRKQMFLVTRVEHSHY

SEQ ID NO: 12350 - protein, 518 aa, Zea mays
  VARIANT 438: note = Ancestral polymorphism is D, Derived polymorphism is Y
  VARIANT 25: note = Ancestral polymorphism is R, Derived polymorphism is C
  VARIANT 23: note = Ancestral polymorphism is V, Derived polymorphism is E
MAPAPRASSFFSVLLVLLFALSVGCASATGVFQVRRKFPRHGGRGVAEHLAALRRHDANRHGRLLGAVDLALGGVGLPTDTGLYYTRIEIGSPPKGYYVQVDTGSDILWVNCIRCDGCPTRSGLGIELTQYDPAGSGTTVGCEQEFCVANSAGGVPPTCPSTSSPCQFRITYGDGSTTTGFYVTDFVQYNQVSGNGQTTTSNASITFGCGAQLGGDLGSSNQALDGILGFGQSDSSMLSQLAAARRVRKIFAHCLDTVRGGGIFAIGNVVQPKVKTTPLVPNVTHYNVNLQGISVGGATLQLPTSTFDSGDSKGTIIDSGTTLAYLPREVYRTLLAAVFDKYQDLPLHNYQDFVCFQFSGRDHLMHGLLCLTNYCLCIFLTPSHSFCSIDDGFPVITFSFEGDLTLNVYPDDYLFQNRNDLYCMGFLDGGVQTKDGKDMLLLGDLVLSNKLVVYDLEKEVIGWTDYNCSSSIKIEDDKTGSVYTVDAQNISAGWRFQWHNSLILLILIRTIWSCLVIA

SEQ ID NO: 12351 - protein, 308 aa, Zea mays
  VARIANT 135..308: note = Derived polymorphism lacks residues 135 to 308
  VARIANT 102: note = Ancestral polymorphism is K, Derived polymorphism is N
  VARIANT 95: note = Ancestral polymorphism is T, Derived polymorphism is I
  VARIANT 36: note = Ancestral polymorphism is V, Derived polymorphism is A
  VARIANT 5..308: note = Derived polymorphism lacks residues 5 to 308
MSLEEAKLEMATLLQQQASKSLASARRDGVLEQRSVRDLMFGGADEEIMVLRVELLAAQKGVNILKQEGVKFGSFDILTDNDVREGMKKFSNWPTVPQLYCKGELLGGCDIVIAMHDSGELKDVFEEHNIPLKPQGSKNEEAGQPESATEKGGAVAEPIGLTDAQKARLESLINSSPVMVFIKGTPEEPRCGFSGKLVHILKQDNIPFSSFDILSDDEVRQGLKVLSNWPSYPQLYIKGELVGGSDIVMEMHKSGELKKVLSEKGVIPKESLEDRLKSLLYYKSELIGGCDIVLEMEKSGELKSTLSE

SEQ ID NO: 12352 - protein, 1145 aa, Zea mays
  VARIANT 234: note = Ancestral polymorphism is S, Derived polymorphism is I
  VARIANT 490..1145: note = Derived polymorphism lacks residues 490 to 1145
  VARIANT 572..1145: note = Derived polymorphism lacks residues 572 to 1145
MDLPSLAVVLRAALSHVPEERKAAEESLNQGAFVFVVGALIIPMHRVRVCFRGIVLGTCASFTAVLRNISYTARRCQKVGDSINCSSTDRLAGQHIQMGYIVDHNMKVLALITQCHELRIHHFRANGALKEDQFSFLKFQFTPQHLVRLLQIIVDGSCDMAVRQVASIHFKNFIAKNWSPNDPDESPKVLESDKAMVRENVLGFIVQVPPLLRAQLGESIKTIIHSDYPEQWPSLLHWVSHNIDLQNQIFGALYVLRVLARKYEFKSEDERIPLYHIVEETFPRLLSIFSKLVQIVNPPIEVADLIKLICKIFWSSIYLEIPKQLFDPNVFNAWMVLFINLLERPVPVEGQPMDPEIRKSWAWWKVKKWTIHILNRLYTRFGDLKLQKPESKAFAQMFQKTYAGKILACHMQLLNAIRSGDYLPDRVINLVLQYLTNSVTKNSMYQMMQPQIDILLFEIIFPLMCFNDNDQKLWEEDPHEYVRKGYDIIEDLYSPRTAAMDFVSELIRKRGKNNLQKFIHFIVDIFRRYDEAPADLKPYRQKDGALLAIGTLCDKLKQTDPYKTELESMLVRHVFPEFNSRVGHLRAKVEYISSSLAAWVAGQYAHINFSDQNNFRQAMHCIVSGMRDPDLPVRVDSVFALRCFVEACKDLNEIRPILPQLLDEFFKLMNEVENEDLVFTLETIVDKFGEEMAPYALGLCQNLAAAFWRCMASSEADDEADDSGALAAVGCLRAISTILESISSLPHLFLQIEPTLLPIMRRMLTSDGQDVYEEVLEIVSYMTFFSPTISLDMWSLWPLMMEALNDWAIDFFENILVPLDNYISRGTDIFLASKDPDYQQSLWDALQSIMMDENMEDSDIEPAPKLIEVVFQNCKGNVDQWVEHYLRITIARLRRAQKPYLKCLLVQVIANALYYNPALTLESLNKLGVAADIFNHWFAMLQQVKKSGARVNFKREHDKKVCCLGLTSLIALPADKIPAEALDRIFKATLELLVAYKDQVAEAKKENEEAADDMDGFDADEEDDDEVDSDKEMGVDDEDGDEISSLQLQKLAAEARGFQPADEDDDSDDDFSDDEELHSPIDEVDPFIFFVETVQALQASDPARFQNLMQTLDFRYQALASGIGQHAEQRKIEIEREKSEKANAQ

SEQ ID NO: 12353 - protein, 185 aa, Zea mays
  VARIANT 172: note = Ancestral polymorphism is S, Derived polymorphism is F
  VARIANT 162: note = Ancestral polymorphism is A, Derived polymorphism is T
  VARIANT 140: note = Ancestral polymorphism is T, Derived polymorphism is M
  VARIANT 118: note = Ancestral polymorphism is A, Derived polymorphism is T
  VARIANT 115: note = Ancestral polymorphism is R, Derived polymorphism is W
  VARIANT 114: note = Ancestral polymorphism is P, Derived polymorphism is L
  VARIANT 76: note = Ancestral polymorphism is G, Derived polymorphism is D
  VARIANT 48: note = Ancestral polymorphism is P, Derived polymorphism is L
  VARIANT 13..185: note = Derived polymorphism lacks residues 13 to 185
MRRYSALPNGGHQETLADRAHRYRGVVLVILAPLVLVSLVLLLMPRSPAGTMGGARRSGTAGADRYAVIFDAGSSGSRVHVFRFDANLDLVRIGSEIELFVQIKPGLSHYANDPREAAESLFSLLDDAKRVVPAELRDQTPVRATAELRNLDAQKSEAILQAVRDLLRKKSSFKNQPDWVTVLDY

SEQ ID NO: 12354 - protein, 783 aa, Zea mays
  VARIANT 178..783: note = Derived polymorphism lacks residues 178 to 783
MGGKQLNIPRASATSAGSVKRRPRRDEASVGSPSPSLESLPPDLGASSPCRLTLQYIGEEEELRFGRVNSTRRLAPVDRREGEIRAEIQGAAPAMASSGLAYPDRFYAAAAYAGFGVGEATSSAAISRFQNDVALLLYGLHQQATVGPCNVPKPRAWNPVEQSKWTSWHGLGSMPSAEAMRLFVKILEEEDPGWYSRAPEFNPEPVVDIQMHKPKDEPHSVPGSTNGTSIPEPNISENGSSVEAQDKDVILEGLSTVSSHDQWTPLSVSGLRPKPRYEHGATVLQNKMYIFGGNHNGRYLSDLQALDLKSLTWSKVDAKLQAEPADSTKTTQIAPCAGHSLISWGNKFLSIAGHTKDPSEGVTVKEFDPHTCTWSIVRTYGKPPVSRGGQTVTLVGTTLVLFGGEDAERCLLNDLHILDLETMTWDDVDAIGTPPSPRSDHAAACHADRYLLIFGGGSHATCFNDLHVLDLQTMEWSRPKQQGPTPSPRAGHAGGTVGENWYIVGGGNNKSVACDLLCIFMPNITHTLASTGVSETLVLNMSTLTWSVVSTVEGRVPLASEGMTLVHSNYGGYDYLISFGGYNGRYNNEVYTLKLSLKSDSQSTLKEETLSDTTSRVIEPEAEIYQDGKIREISVDNADSDLNNRNDEASEQLLADLKAQKEELEATLSREQLQTVQLKEDIARAETRNAELTKANHLSLTLNFKLSVANLLLSSQDVSNLRYTLVDVAELRQKLQSMDALEKEVELLRRQRAASEQAAMDAKQRQSSGGMWGWLAGSPTPAV

SEQ ID NO: 12355 - protein, 613 aa, Zea mays
  VARIANT 88..613: note = Derived polymorphism lacks residues 88 to 613
  VARIANT 470..613: note = Derived polymorphism lacks residues 470 to 613
  VARIANT 538..613: note = Derived polymorphism lacks residues 538 to 613
  VARIANT 580: note = Ancestral polymorphism is I, Derived polymorphism is N
MEVADEVVRVLGAGFDLTSDFRLRFAKASEGRRLVELGEDTRDVPLPGGGGATLRGVPRDVGVDKGDRIRFRSDVLEFNQMSELLNQKSSVQGKVPSGYFNALFELSGAWLTDAKDTKHLAFDGYFISLYNMHLKASPLVLRDEVKKAVPSKWDPVALSWFIKTYGTHIIVEMGIGGQDVICVKQSHSSTVSTADLKLHLEDLGDFLFSDGKNHSPIHRKTKDGKSTVPDVFVRIVQHSNNLHLSSYSETSTKDGLTVTCSKRGGEAYLPNHSKWLQTVPKKPDAIMFKFVPITSLLTGIPGSGYLSHAINLYLRYKPDLQDLQYFLEFQVPLQWAPMFNELVLGPQRRKGSYPSMQFRFLGPKLHVSTSQVSSSQKPVVGLRLYLEGRKCNRLAIHVQHLSSVPSMIADSVASSMSEWRESQDNDPGYIEAIQWKNYSCVCTSAIKYNPEWHKRAPGGVFIVTGAQLVSKGAWAKKVLHLRLLYTHIPNCTIQRTEWRNAPAASQKGSFLTTISTTLSSPFTQRADTHQAKHEPAVQLNSGVYPDGPPVPLRSRKLLKFVDISEVVKGPHDVPGHWLVIAAKLVKEGGKIGIHVKFALLGYEGQSQGNSFMS

SEQ ID NO: 12356 - protein, 247 aa, Zea mays
  VARIANT 102: note = Ancestral polymorphism is R, Derived polymorphism is C
  VARIANT 86: note = Ancestral polymorphism is T, Derived polymorphism is I
MVLLALPLIIPACSSCSYVDTDGPDPAYDDPHKPLLISNSHQMESNAMMQKPKENQMQVKGRLETLGEEHSAKKLIRCVDFWLYYTAYFCGATVGLKVSLARTGWLAAALVPMPMAFFLMWNQQDGSTLVAGTTLIVLSSGFIFAAAVSVTSELFGPNSVGVNHNILITNIPLGSLLYGQIAAMVYDANSQKMTVVDNRTGIVDTMIVCIGVKCYSTTFVVWACITFLGLASSIVLFIRTKPAYAHS

SEQ ID NO: 12357 - protein, 200 aa, Zea mays
  VARIANT 165..200: note = Derived polymorphism lacks residues 165 to 200
  VARIANT 85..200: note = Derived polymorphism lacks residues 85 to 200
  VARIANT 56: note = Ancestral polymorphism is E, Derived polymorphism is K
  VARIANT 36: note = Ancestral polymorphism is H, Derived polymorphism is Y
  VARIANT 15..200: note = Derived polymorphism lacks residues 15 to 200
MKRLHSGPGSAGGAQCPSCAVDGCKADLSKCRDDHHRHKVCEAQSKTPVIVVAGREMRFCQQCSRYILPLKLALAAAGLISPSSWQFISLLPIRLSSAKPTSLLNGNSCGGFYNGSFMQEVEALRTLGGRDVACAEARCTRGSRSSTRDRSEDADGTSRGKLSSQYNFPALARESDAQVGGKLGTSTLGRGSGRSYRGWR

SEQ ID NO: 12358 - protein, 65 aa, Zea mays
  VARIANT 52: note = Ancestral polymorphism is V, Derived polymorphism is L
  VARIANT 45: note = Ancestral polymorphism is T, Derived polymorphism is I
  VARIANT 28: note = Ancestral polymorphism is E, Derived polymorphism is D
  VARIANT 26: note = Ancestral polymorphism is V, Derived polymorphism is L
  VARIANT 25: note = Ancestral polymorphism is L, Derived polymorphism is V
  VARIANT 24: note = Ancestral polymorphism is R, Derived polymorphism is H
  VARIANT 7: note = Ancestral polymorphism is D, Derived polymorphism is Y
MHTLIRDRDITTPDFVFYSDRLIRLVVEHGLGHLPFTEKQVITPTGSVYMGVDFCKKLYGVSIVR

SEQ ID NO: 12359 - protein, 86 aa, Zea mays
  VARIANT 25: note = Ancestral polymorphism is R, Derived polymorphism is H
MVLQNDIDLLNPPAELEKLKHKKKRLVQSPNSFFMDVKCQGCFSITTVFSHSQTVVVCPGCQTVLCQPTGGKARLTEGCSFRRKGD

SEQ ID NO: 12360 - protein, 173 aa, Zea mays
  VARIANT 2: note = Ancestral polymorphism is N, Derived polymorphism is I
MNVAEEEVSMEREEKGGNVRDGEVRTTAAAAAAVSLETLRKRMADFATERDWEQFHSPRNLLLALVGEVGELSEIFQWKGEVPKGLPGWDDAEKEHLGEELADVLLYLVRLSDMCGVDLGKAALRKMEINARKYPVGQCKGSSKKHTHYGSTNNVGDSDKANAANKEQHSCGV

SEQ ID NO: 12361 - protein, 653 aa, Zea mays
  VARIANT 330..653: note = Derived polymorphism lacks residues 330 to 653
  VARIANT 225..653: note = Derived polymorphism lacks residues 225 to 653
MMSHEQQIVPPSKGSVNGFPHRKLDKEGSGTQSRINLVRSSSGGFTNSENGIKLGHGSHSRDRLIYVLTQLIGHHVDVHVNNGSIISGIFHATNPDKDFGVVLKMAQVIKDGSARGQRYPAVLVKKPETMIIPARELVQVFAKDIELGGELPKVPGNDKRKDLLIDSAITRYHYLEERELERWAPDGGDSECIELEKYDRKGNRSWDQFETNAALFGVKSTFNEEIYTTKLERGPHMRELEKHASRIAREIEGEDTRDIHLAEERGLFLGDDLDHDEEIKYSAVRRDTDNSKYKPPFTKVPSSTCHVDSFNRTVNIDPNDSLACSSTMVQTYNFFILMLLINYANAIFGSKTSAIFLVCFFDVQDKESSSHIFDDTDASATIHTNSVSQPTSDYLSDRPLSNDENRYKVLFTWTVQSSIMLDRKLNKESNENMDNRKLQHEDNLPDGARPLISEALDGRSSSSHAYEPSFSGQGFKSPETPDSTVPVKHPSAMEPVTSSQRPGSSTSSTSERIGANSAAGAPGLSPSSSIGSLTAEKSTLNPNAKEFKLNPNAKSFTPSASLRPPHPTSSDASYYYPNNMPAMPLGPGLPVGMGFPPAYGAQPVMYNTQPGASPHGYMHPAGPQYGQQMTIGGQTRPVYYYAPEMQQYRGRNF

SEQ ID NO: 12362 - protein, 138 aa, Zea mays
  VARIANT 7..138: note = Derived polymorphism lacks residues 7 to 138
  VARIANT 11: note = Ancestral polymorphism is C, Derived polymorphism is W
  VARIANT 16: note = Ancestral polymorphism is G, Derived polymorphism is R
  VARIANT 30: note = Ancestral polymorphism is A, Derived polymorphism is V
  VARIANT 34: note = Ancestral polymorphism is S, Derived polymorphism is N
  VARIANT 40: note = Ancestral polymorphism is R, Derived polymorphism is S
  VARIANT 53: note = Ancestral polymorphism is L, Derived polymorphism is P
  VARIANT 62: note = Ancestral polymorphism is V, Derived polymorphism is F
  VARIANT 89: note = Ancestral polymorphism is I, Derived polymorphism is M
  VARIANT 106: note = Ancestral polymorphism is T, Derived polymorphism is A
  VARIANT 107: note = Ancestral polymorphism is Q, Derived polymorphism is H
  VARIANT 121: note = Ancestral polymorphism is A, Derived polymorphism is V
  VARIANT 128: note = Ancestral polymorphism is L, Derived polymorphism is M
MVEEDVQPLMCDNGTGMVKAGFAGDDAPRAVFPSIVGRPRHTGVMSKRGILTLKYPIEHGIVGNWDDMEKIWHHTFYNELRVAPEEHPILLTEAPLNPKANMEKMTQIMFETFNCPTMYVAIQAVLYLMTVTQGSRQI

SEQ ID NO: 12363 - protein, 183 aa, Zea mays
  VARIANT 13: note = Ancestral polymorphism is A, Derived polymorphism is V
MSRALLMVAALAAVHGLTLTGVDATVVATCLAASNSDGRVNYDFCVSELNKHRDSPGADTAGLAKVAANVGLNSAGGAVNEIEALLAAKPPPPDARTSAALRLCERLYYDMELAFAGAYDEINALNYTAGKQMAADADSLVRRCTGGFAQAGLLPPEPVARRGAYAMQIAIVCTAITNLIISP

SEQ ID NO: 12364 - protein, 531 aa, Zea mays
  VARIANT 28: note = Ancestral polymorphism is K, Derived polymorphism is M
  VARIANT 346: note = Ancestral polymorphism is L, Derived polymorphism is Q
MSSPRLSSKEEELLRSVERAIERSYAAKQATNVPLWRRLLGNASKKSKNDSAALTTAPPSPGVLVGTQREEQERAKEGADVASSAPRHPSEAGAEGDDVQPAAQDRSVHAATMMKSALARIQGGQNSGAFVDMELAMKGLMDVSFKGRERVPVLPAEFRSKWPHGNTIDRFSYQWSSLGAAKRFLTVPNHLLRDIITAWCLDHEIPLPSSTSTSVASEEAPPPTEEEMQLLLEKLSMHSAAQKEALHRIQLLSTSSKGVHPCLDRWQDLLPKLMCLHKEWRSTWARQWEEERLTVMLNLSLHRVNRDILARQERLPHALKETSARAGRHGYPLTVMLKVSSLVTILSESEYSTFRRKFVEIDGIEELHVLLCNRDCLVRNEASAAILALCRDDAAALTRVPDASLVECLSDGMVTDECLLLLECTSDRESVRDRIAFSVELLMEAIMATENGQGYLSSRGTRTALALIYNCIKEADGRGRLRTTVILQGFVEALRILERKETPLRTVFQIEEIHSIVSQALAELTQWNIRS

SEQ ID NO: 12365 - protein, 798 aa, Zea mays
  VARIANT 750: note = Ancestral polymorphism is L, Derived polymorphism is P
  VARIANT 208: note = Ancestral polymorphism is C, Derived polymorphism is Y
MEDDYDFPAAGGYDPMGMMGMGMGGYGLGGPMGMGGYGLGGPMGMGGYGLGGEDDDDAMKDLHAGAGAGAGDDPPAELKVGEEREIGKEGLKKKLVKEGEGCDRPGAGDEVEVHYTGTLIDGTMFDSTRDRDSPFKFTLGQDSTGLASALSAAADCKTLAEKAIAALPPELSAQANDPKRKARSQDPGWQFGWWPDTTKKDFVQCVFCKKIVPSGIKRFKQHLAGGFGDTMKCARVPEVVSKEMHTYLRRNMRVMITADGDEGQVIKGWDLGIKTMKKGENAVFTIPPELAYGEDGSPPVIPPNATLQFDVELLSWVCIKDISKDGGILKKVVAKGDKWENPRDPDEVVVKYEARLEDGTVVSKSDGVEFTVRDGVFCPAISKAVKTMKKNEKAHLTVMPQYGFGVKGRQASGEEASVPPNATLHIDLQVVSWRTVTELGSDKKILKKILKEGEGYDCPNDCAVVRVKLIGKLEDGTLFVKKGHDGEEPFEFKTDEDQVIEGLDKAVLSMKKGEVSLVTIPPHHAFGTNETTKDLATVPPNSYVYYEMELVSFDKEKDSWDLKNVAEKIEAAAKKKEEGNVWFKIGKYARASKRYEKALSFVEYDSSFTEEEKQLSKPLQISCKLNNAACKLRLNDYKEAKELCTEVLESDNTNVKALYRRAQAHMHLVDLDLAEADIKKALEIDPDNRDVKMGYKRLKEKVKEYKRRDAKLYGNMISKLSKLEDTEDNGQMSQAVNKKRELLWPLAEMLRRFFTADGSKGSTLWLVLRLLIPVIVLVAVCVGYFMHSSVEEIDCINC

SEQ ID NO: 12366 - protein, 1078 aa, Zea mays
  VARIANT 41..1078: note = Derived polymorphism lacks residues 41 to 1078
MAEEKGRSKTDPFFTLTISAANRNTQSRARSWRGLQILPLQDSTAEFAPTTGPAAMAAAADLEPQLGISPATPDIVRKLARPSGTTTAVGYCCTALYTSTAAGPGKVDGDGLASVPLHAHEHSQSAALDNLVQVDCDPVGTQESSTLPALVGESSGKVAQQEQQHKEGVDSARDAGAASPAPTSTPENMEPTPRRRGKKSTKGVQRLKVAKDKVMKLKVTTPSTVKKKKMTEDDIQHIGAHRSNSARRKLDLDLHSSESKTCFSRAELMINLKCIGKSYGLISELTTHKRSKRGKKRKMMVGNKESGQLALLPYNWTTTVAVSRPLTHVKKLRAKVLGLTDETMRVCAVLANWNGSDNESFEGFDIGNGPEWDTTRQMFEQFVDIFINAMFDLIGPRKYSQWGGSLIDSVVGTFLTQNSADNLSSQAFMNIAAKFPKSERHCQDNATQLIDGVDRKMKSKEAFDNFDLVHSHFDEYIKSEEEVDFDKKVKSQYGEDYNRIIGNFAASMKQKNISTWDSDLMNLVKDKYGNPVCDENNLRKILASLRQPVTASNWKELQEEAYKKGYNNKSQTETSDVVDWESVLNAPFSEVAKCIAIRGQHNILAVRILAFLDHVKKAQDGSFDLDWLRFVSREKAKKFLLSIHGIGVKSADCICLLSLRHRAFPVDVNVARIVTRLGWVKLQPLNGADFHLIDLYPILDDVQRYLWPRLCTIDKEKLYELHCLMITFGKVVCRKKNPNCGACPFSASCKYYNSSLAKKSLPLPEKHEQGEQQTSMVAYGSCTPSSQQMYRYQIAISSTTTETPPIHSCEPIVEMPPSPEYEYNETPNEQEDFYEDYACDIEDFAPGVQYDSEINICSNKHTLNNNSWTPNCGKDLAVINPKCSFGQSKKLKNTGRLRTEHNAYVLPDGHVILEEFEDRVPGDRCPYLLVVISCPDDYKVKGTVLIPCRTANRGKFPLNGTYFQENEVFADYSSSRNPITVPRECIGMLERSIVYFGSSIHSITKGQTRQDIQECLKEGYICVRSFHRKTRIPLRLCSTLHATNTKPAREKPMKRTRTSPEGKKNGTSPEGKKNESLF

SEQ ID NO: 12367 - protein, 151 aa, Zea mays
  VARIANT 5: note = Ancestral polymorphism is G, Derived polymorphism is R
  VARIANT 62: note = Ancestral polymorphism is V, Derived polymorphism is E
MALGGLVNLALCLLCSSVELVATLLLRGLALLAVATVQLLRLPGQAGSAALEATKGAIDAAVELVLGVACDAVVAVVSALLDFLWSVASGAAALTTSAVTELVEAARDGGEEAAKALAAALEGAVDATLAVVTRLVESYVDALGHVVENLT

SEQ ID NO: 12368 - protein, 220 aa, Zea mays
  VARIANT 53: note = Ancestral polymorphism is N, Derived polymorphism is K
  VARIANT 66: note = Ancestral polymorphism is N, Derived polymorphism is K
  VARIANT 84: note = Ancestral polymorphism is N, Derived polymorphism is I
  VARIANT 99: note = Ancestral polymorphism is I, Derived polymorphism is T
  VARIANT 116: note = Ancestral polymorphism is P, Derived polymorphism is L
MDHKLKQSIIDDLNRFIKRNDYYKKIGKAWKRGYLLYGPPGTGKSSLIAAMANHLREEGEGHGKSKSTEQNRREEKVTLSGLLNFVDGLWSTSGEERIIVFTTNYKEWLDPALLRPGRMDMHIHMGYCTLESFQILANNYHSIEYHDTYPKIEKLIKEMMVTPAEVAEVLMRNDDTDVVLHDLIGFLKSRMKDVNEVKSEHKKVNNKMDEKKEDKDNDKD

SEQ ID NO: 12369 - protein, 88 aa, Zea mays
  VARIANT 17: note = Ancestral polymorphism is P, Derived polymorphism is L
  VARIANT 28: note = Ancestral polymorphism is F, Derived polymorphism is C
  VARIANT 33..88: note = Derived polymorphism lacks residues 33 to 88
  VARIANT 39: note = Ancestral polymorphism is D, Derived polymorphism is E
  VARIANT 44: note = Ancestral polymorphism is R, Derived polymorphism is I
  VARIANT 47: note = Ancestral polymorphism is S, Derived polymorphism is N
  VARIANT 53: note = Ancestral polymorphism is R, Derived polymorphism is C
  VARIANT 55: note = Ancestral polymorphism is A, Derived polymorphism is V
  VARIANT 56: note = Ancestral polymorphism is D, Derived polymorphism is N
  VARIANT 62: note = Ancestral polymorphism is S, Derived polymorphism is L
  VARIANT 66: note = Ancestral polymorphism is E, Derived polymorphism is K
  VARIANT 72..88: note = Derived polymorphism lacks residues 72 to 88
  VARIANT 80: note = Ancestral polymorphism is E, Derived polymorphism is K
  VARIANT 83: note = Ancestral polymorphism is V, Derived polymorphism is L
MNWSQTLGDYGKNFALPALKRLVEGHVFSFVIGRAFVTDVEKLRIHSKGRLLRVADVIGFFSDITELGICPGSNLLYAVEVLVTEVSE

SEQ ID NO: 12370 - protein, 199 aa, Zea mays
  VARIANT 190: note = Ancestral polymorphism is G, Derived polymorphism is R
  VARIANT 74: note = Ancestral polymorphism is G, Derived polymorphism is V
  VARIANT 61: note = Ancestral polymorphism is G, Derived polymorphism is R
  VARIANT 41..199: note = Derived polymorphism lacks residues 41 to 199
  VARIANT 25: note = Ancestral polymorphism is D, Derived polymorphism is G
MELFTRAKVVRLRSHHDKFLYADEDEVRVTQDRDRSSANAWWTVEATPHSAGAIRLRSRYGRYLTASREPFLLGMTGRKDWVLWDVEVVQLLTPAPRPERTGSAPVAKLSDSRPAPDLGKPLQAHGPHHHPSKSYATPPPTLEPEAPPPSSRFNKLERSADWAPQTVCGCGWDYHFGRKLVEARDELMKGRYMDIAYLK

SEQ ID NO: 12371 - protein, 130 aa, Zea mays
  VARIANT 120: note = Ancestral polymorphism is R, Derived polymorphism is H
MSSAPLQIAPVPEHVCYVHCNFCNTILAVSVPSHSMLNIVTVRCGHCTSLLSVNLRGLIQSLPVQNHHYSQQQENFTVQNMGFTENYPEYAPSYRMPTTLSAKGDLDHMLHVRAPEKRQRVPSAYNRFIK

SEQ ID NO: 12372 - protein, 521 aa, Zea mays
  VARIANT 340: note = Ancestral polymorphism is R, Derived polymorphism is H
  VARIANT 10: note = Ancestral polymorphism is R, Derived polymorphism is H
MVAGAGNPGRPVAVLALLLLAAAAPPGAWAGSAAVNGDRLRAEQIRKQASDAAASAAALAAASRRLHLDRARHLRLLSSLHRNLTNTLRALSVAADFASDPSSANVSSSRQLDLQAKDLIRAARAAIADSKPLFDPQLKIQRLKDTIFAQNELLARAKKRGAFASLIAAKSIPKPLHCLAVRLTAERIARPDQYADPVPPPPALEDPALFHYAIFSDNVLAASCVVRSAVANSNDPSKHVFHVVTDRMNLGAMQVIIRRMDLKGAHYEVKAFEDYKFLNSSYVPVLRQLESANLQKFYFENKLENATKDASNMKFRNPKYLSMLNHLRFYLPEMYPKLHRILFLDDDVVVQRDLTGLWKIDMDGKVNGAVETCFGSFHRYAQYMNFSHPLIKAKFNPNACGWAYGMNFFDLDSWRREKCTEQYHYWQNQNENRTLWKLGTLPPGLITFYSTTKPLEKSWHVLGLGYNPSISMEEIRNAAVVHFNGNMKPWLDIGMNQFRHLWTKYVDYDDSYIRQCNFAPP

SEQ ID NO: 12373 - protein, 66 aa, Zea mays
  VARIANT 10: note = Ancestral polymorphism is R, Derived polymorphism is K
  VARIANT 59: note = Ancestral polymorphism is S, Derived polymorphism is F
MLRNFDKSFRVWMHWKRRSSCFGDREPLRSKQQWMLSRGKVWVACGVGSLEARHQQFSSVIHIFYL

SEQ ID NO: 12374 - protein, 190 aa, Zea mays
  VARIANT 163..190: note = Derived polymorphism lacks residues 163 to 190
  VARIANT 156: note = Ancestral polymorphism is E, Derived polymorphism is K
  VARIANT 137: note = Ancestral polymorphism is P, Derived polymorphism is S
  VARIANT 126..190: note = Derived polymorphism lacks residues 126 to 190
  VARIANT 110: note = Ancestral polymorphism is P, Derived polymorphism is T
MTLAVALVLVNKKMLMNFLETTGIVDYRNYDVKKYAVGLVYGLLISFNVNSKPFFAVEEQRQLLDCSRPIYAGNTLCTVKYTGEDPCMMSIRSTSFSPTADAMSETKVAPITQVDLSFLNEGKSTWVNLTSQDTEWPDLANARVVVTGGRGLRSSENFKLLEQLAEKLGAAVGATRDAVEAGYVPNDLQL

SEQ ID NO: 12375 - protein, 603 aa, Zea mays
  VARIANT 337..603: note = Derived polymorphism lacks residues 337 to 603
  VARIANT 167..603: note = Ancestral polymorphism lacks residues 167 to 603
MGSPKAAKSMVKQRIWRHRLVAPFAAVLITAVVVFSGLFAQDPSATSEFTAVNAGNTLPVRDKSESTESSFFLFRFSWSLGFRIRTGLVGFSNLISKVQQPEDLPTRRILQQLHLSKNWMLEILSPIKLSKAPCLQQAREGQQRQCRSNEKEAVEDLVCSPAIIVKQSPDATNVAHTVYTCFLDSHLEPEEKQSPPQDQEGEETSAKSGLVQYTTCTPRTGATVCDLSNQRYDICELCGDARAIGRSSTVMYVPQPLTSNGEEWNIPAQSRKSLPWIKKVTVKTLKASQQAPSCTSRHTMPAIVFALGGFTGNVWHDVSDVLVPLFLTARQFDQDVQLLVTDNRPWFIKKYSAILRRLTRHSVIDFDADDEVRCYPHVIVGLRSHRDLGIDPDSTPQKNYTMVDFRLFVREAYGLPAPGVDIPYRADKDEPEKKKPRMMLIERGKTRRLVNTPDVLLGLGWFGFEVVRADPRTHSDLEEFARLVDSCDAMMGVHGAGLTNMVFLRSGAALVHVVPYGVEFMADGFYGAPARDMGLRHVRYSVGPDESTLLEKYGRNHAVVRDPEAVRSGGWEKVGEVYMTEQDVVLNVTRFGPSLLKAIEFIV

SEQ ID NO: 12376 - protein, 123 aa, Zea mays
  VARIANT 9: note = Ancestral polymorphism is L, Derived polymorphism is H
  VARIANT 20: note = Ancestral polymorphism is Q, Derived polymorphism is H
  VARIANT 49: note = Ancestral polymorphism is V, Derived polymorphism is L
  VARIANT 54: note = Ancestral polymorphism is I, Derived polymorphism is T
  VARIANT 56: note = Ancestral polymorphism is R, Derived polymorphism is S
MARIKVHELRGKSKTDLQAQLKELKSELSLLRVAKVTGGAPNKLSKIKVVRTSIARVLTVISQKQKSALREAYKKKNLLPLDLRPKKTRAIRRRLTKHQLSLKTEREKKREKYFPMRKYAIKA

SEQ ID NO: 12377 - protein, 329 aa, Zea mays
  VARIANT 85: note = Ancestral polymorphism is T, Derived polymorphism is I
MAAATAAAAALASPAGLSTSLARRGLVSFAPALRPGPDRSSRAVALLGVRTHVTAVDQAIVKGDTKLEGPVVVVTGASRGIGKATALALGKAGCKVTSLSNLLINIEKFIKCVLVNYARSSKEAEEVSKEIEASGGQAITFGGDVSKEADVESMIKVAVDTWGTIDVLVNNAGITRDTLLMRMKKSQWQDVIDLNLTGVFLCTQAATKVMMKKKKGRIINIASVVGLTGNAGQANYAAAKAGVIGFTKTVAREYASRNINANVIAPGFIASDMTAELGEELEKKILSTIPLGRYGRPEDVAGLVEFLALSPAASYITGQVLTIDGGMVM

SEQ ID NO: 12378 - protein, 364 aa, Zea mays
  VARIANT 85: note = Ancestral polymorphism is I, Derived polymorphism is V
  VARIANT 60: note = Ancestral polymorphism is S, Derived polymorphism is A
MQLKPPARPKLYSGLMPQEDLDPYRDLIPGLPEDLAKICLALVPRAHFPAMGAVSKRWMSFLESKELVAVRKEVGKLEEWVYVLVPDAGAKGSHWEILECSGQKQSPLPRMPGLTKAGFGVVVIGGKLFVIAGYAADHGKDCASDEVYQYDSCLNRWTVLAKMNVARCDFACAEVNGVIYVAGGFGPNGESLSSVEVYDPEQNKWTLIEGLRRPRWGCFGCSFEGKLYVMGGRSSFTIGNSRSVDVYNPNSHAWGQVKNGCVMVTAHAVLGKRLFCIEWKNQRSLAIFNPADDSWQKVPVPLTGSSSTRFSLVVHEDKLLLFPLEEEPGYQTLMYDPAAPMGSEWCTSKLKPTGSCLCSVTIKA

SEQ ID NO: 12379 - protein, 199 aa, Zea mays
  VARIANT 137: note = Ancestral polymorphism is P, Derived polymorphism is L
MSSSPDFADGQDPPQPPPTLQPQGAPSAPSDVCEGLVAQVDQFLREALEKPRERLSVLRMEQEILKFIHDPSRTEYEFNGLPTSYLRLAAHRLAQHYFLQSIAIPDNSLPDGTGSRIILRKTTFDCRLPAVRLADIPVNLPQEDISVAKVAIKQRPQKNFHGMKSSSAHSSRDNLQKSVEERKEEYNKARARIFNNRIG

SEQ ID NO: 12380 - protein, 897 aa, Zea mays
  VARIANT 132..897: note = Derived polymorphism lacks residues 132 to 897
MEMEQLCSLLRDLDALKQHPDDLTSTIDRMRERLVAMMNPAAGAASRSKIKDMSAEVVDNNPYSRLMALQRMGVVENYERIRDYSVAIVGIGGVGSVAAEMLTRCGIGRLLLYDYDTVELANMNRLFFRPEQVGMTKTDAAVQTLSGINPDVVLESYSLNITTVKGFETFLASLKAQSSHERSTGVNLVLSCVDNYEARMVVNQACNELGQTWMESGVSEDAVSGHIQLLVPGETACFACAPPLVVASGVDERTLKREGVCAASLPTTMCRVALVLNVISAYAPQVGLNENSKSTSFEGVHGGFGFGIRNQGEEILNFALAYDMFIANTFFRKRKSHLVTRTKWWKLKGDVAQTFKERVIEEGPWAEEGDANIMWRKMATCIRKIASEEFGLSQGNRREVKDTWWWNEDVQKTIKEKKDCYKCLHHDKCADNIEKYRIAKKPAKHAVSRARGQAYDDLYQRLDIKQGEKDFYRMAKIRERKTRDVNQVKCIKDEANQLLVKNEEIKNRWKEGFVRRIQEYEVKEALKRMKVGKAMGPDDLEKAYDKVSRSVIWWALEKHKVATKYINLIKDMYTNVVTSVRTSDGDTDDFPINIGLHQGSALSPYLFALVIDEVTRDIQGDIPWCMLFADDVVLIEESRSGVSQKLELWRQTLEAKGFRLSRSKTEYMKCDFSAMGYEDGDVSLDGQVVPKKDTFRYLGSMLQKEGDIDEDVSHIIKAGWLKWRQAASVLCDPRGVVAGLLVQNALKYLLNFGQVSRYLGYNSLKDYFPAMEMRPNPQCSNPACVLRQKEYMESKPARDAAAKTKMEAEASTENECPVHLDNEWNIRASILVCSVVDDETETSSIRNTPDILPEGLVRELPDADSYAGPAAPVSSSAIDDDDDLEELQRQLDALNAS

SEQ ID NO: 12381 - protein, 107 aa, Zea mays
  VARIANT 36: note = Ancestral polymorphism is D, Derived polymorphism is N
MVAPVVIASAGLGMLAGVAMANRSLGNGLPAASRWDARPRCATCGGSGRVECICNRWSDGDSGCRTCAGSGRMPCRSCGGSGTGRPLPARLTVQHQKPPPPPPPGYN

SEQ ID NO: 12382 - protein, 416 aa, Zea mays
  VARIANT 197: note = Ancestral polymorphism is G, Derived polymorphism is D
MTGSTDRTPAHHSEMRPMTNPPLLSPSPFPLLLRLLHLSRAPRRRNPTTGRAPTCTSRDRLPLLLPAAMSSASNTAPHSVVADPTTLARKIADIRAAGPTKLQAGTPSVIADFDGTLTRYWYDGARGQSSHGLLRQGNEEYDAKREALYQHYHPIEICPDIPLSEKAKLMEEWYYVPGAESLTIEVVVCYRWEKTHGLLIEGGLTYEAITKSVSDAAIAFREGVVELFEYLEVLSKPSLANTIFRNFFGTCLDTLLCSEREIPVLVFSAGLADIIEEVFRQKLHKTFKNIKVVSNRMVFNEEGRLIAFKGKTIHVLNKNEHALDMAAPVHGNPGDPNGSMDDYSLVKKRTNVLLLGDHIGDLGMSDGLNYDNRIAVGFLNANIEKSLKDYSSAFDIVYLNDAPMHGVVQLVSELCP

SEQ ID NO: 12383 - protein, 169 aa, Zea mays
  VARIANT 76: note = Ancestral polymorphism is R, Derived polymorphism is T
MEPQHGEKELQLLLLPTTTPLNAAFLHAPRPAAASSPSDHPQLDLSLSISIGPPTPHAAEQAGRGRTATAAEQSKRAADVQALKQQAAEQARMASAERAYAERVKELARRELELAEREFARARAIWERARGEVEKVERVKAMAARRIAAGASAAALEITCHACMQRFHP

SEQ ID NO: 12384 - protein, 296 aa, Zea mays
  VARIANT 258: note = Ancestral polymorphism is P, Derived polymorphism is L
  VARIANT 238..296: note = Derived polymorphism lacks residues 238 to 296
MVVSVRTNPSHAPPTPPGARPHLSTSGDYHQSTTMAATSLARLSRRATISATAAAPSLRRLLSVTSTASVAASAPPPPPSAAGAAAVGADRVRWDYRGQRKLVPLGQWMPKVAVDAYVAPEAVLAGQVTVHDGASVWSGAVLRGDLNKITLGFCANVQERCVLHAAWTAPTGLPAETLVDRYVTVGAYCLLRSCTIEPECIIGQHSVLMEGSLVETNSILEAGSVLPPGRRIPTGELWAGSPARFVRKLTNEEIMEIPKLATAINDLMQSHFSEFLPYSNAYLEVEKLKKSFSIPL

SEQ ID NO: 12385 - protein, 159 aa, Zea mays
  VARIANT 130: note = Ancestral polymorphism is Q, Derived polymorphism is L
  VARIANT 16: note = Ancestral polymorphism is P, Derived polymorphism is T
  VARIANT 10: note = Ancestral polymorphism is P, Derived polymorphism is R
MAASTALLDPEVAPAPAKPEPSLPSCAGAFRIDFRFSARLGGLSDGSCSRSLTEPSGTAREQWLMELEPIRMLEPEPQNKLCTAPRTVWRRPLSHAVYRRMQTMPVYADARVGALGILACLDGYMNIAMQQTEEYVNGQLKNKYGDAFIRGNDGADYMV

SEQ ID NO: 12386 - protein, 43 aa, Zea mays
  VARIANT 36: note = Ancestral polymorphism is S, Derived polymorphism is P
  VARIANT 29: note = Ancestral polymorphism is D, Derived polymorphism is G
  VARIANT 22: note = Ancestral polymorphism is D, Derived polymorphism is N
  VARIANT 20..43: note = Ancestral polymorphism lacks residues 20 to 43
  VARIANT 19: note = Ancestral polymorphism is K, Derived polymorphism is E
  VARIANT 18: note = Ancestral polymorphism is N, Derived polymorphism is K
  VARIANT 11: note = Ancestral polymorphism is Y, Derived polymorphism is C
MNIAMQQTEEYVNGQLKKEEGDAFIRGNGVLYISIPKRTLADN

SEQ ID NO: 12387 - protein, 638 aa, Zea mays
  VARIANT 59..638: note = Derived polymorphism lacks residues 59 to 638
MATAAAASTALTGATTAAPKARRRAHLLATRRALAAPIRCSAASPAMPMAPPATPLRPWGPTDPRKGADILVESLERCGVRDVFAYPGGASMEIHQALTRSPVIANHLFRHEQGEAFAASGYARSSGRVGVCIATSGPGATNLVSALADALLDSVPMVAITGQVPRRMIGTDAFQETPIVEVTRSITKHNYLVLDVDDIPRVVQEAFFLASSGRPGPVLVDIPKDIQQQMAVPVWDKPMSLPGYIARLPKPPATELLEQVLRLVGESRRPVLYVGGGCAASGEELRRFVELTGIPVTTTLMGLGNFPSDDPLSLRMLGMHGTVYANYAVDKADLLLALGVRFDDRVTGKIEAFASRAKIVHVDIDPAEIGKNKQPHVSICADVKLALQGMNALLEGSTSKKSFDFGSWNDELDQQKREFPLGYKTSNEEIQPQYAIQVLDELTKGEAIIGTGVGQHQMWAAQYYTYKRPRQWLSSAGLGAMGFGLPAAAGASVANPGVTVVDIDGDGSFLMNVQELAMIRIENLPVKVFVLNNQHLGMVVQWEDRFYKANRAHTYLGNPENESEIYPDFVTIAKGFNIPAVRVTKKNEVRAAIKKMLETPGPYLLDIIVPHQEHVLPMIPSGGAFKDMILDGDGRTVY

SEQ ID NO: 12388 - protein, 132 aa, Zea mays
  VARIANT 98..132: note = Derived polymorphism lacks residues 98 to 132
  VARIANT 40: note = Ancestral polymorphism is T, Derived polymorphism is A
  VARIANT 20: note = Ancestral polymorphism is G, Derived polymorphism is R
MLSSSAEESPVKPLRLWVVGYATQCLVHVGLVCADTRRETWRARRSASDVESAGAGTDSSDADSKDDERAEGRSSYTGRCETMNTLISFLWWIIGFYWIFSGGEVLKHGAPRLYWYATFIFVASGFTNDTCN

SEQ ID NO: 12389 - protein, 76 aa, Zea mays
  VARIANT 41: note = Ancestral polymorphism is M, Derived polymorphism is I
  VARIANT 43: note = Ancestral polymorphism is A, Derived polymorphism is E
MYQECLDCCILTLFGSTYSSWSVRSPTIKLNGGVELHVGMMHAPIKFRNVVLNCNLWPLNPFYLLLDLSYRIFKNV

SEQ ID NO: 12390 - protein, 315 aa, Zea mays
  VARIANT 165: note = Ancestral polymorphism is K, Derived polymorphism is N
MGEEEKAKEAAPPADKVKEAEEKKGEGGGGEEKKNEAPSLPPPPPEEVVMRVFMHCEGCARKVKKILKGFDGVEDVIADTKAHKVVVKGKKAAADPMKVVERVQKKTGRKVELLSPMPPPKEEKKEEEKKEEPEPPKTEKKEEATVLAVVLKVHMHCEACTQVIKKRILKMKGVQSVEADLKASQVTVKGVFEEAKLSDYVYRRTGKHAAIVKSEPVAAENVDDGNAKDDKKAAEGGEEKKDDGKEEKKDEDKKEADNQKDDGNAGDEGKDKDPGAVANMYMHYPRSNHLSEYGYAYQYPPQLFSDENPNACSLM

SEQ ID NO: 12391 - protein, 183 aa, Zea mays
  VARIANT 69: note = Ancestral polymorphism is V, Derived polymorphism is L
  VARIANT 79: note = Ancestral polymorphism is R, Derived polymorphism is L
  VARIANT 84: note = Ancestral polymorphism is L, Derived polymorphism is R
MATMLPGRKKDDENELAYQYAKKGACLALVARRKQALEGVAAAALERGAPDVLVIPADVSDAEQSRRAVEDTVAHFGKRTRPSLSLSVLHPVHGQLRPDFLVCVAVLICATKAAQLRFYETLRSELGSEVGVTILTAGFVESEMTKGKVIQKDGQVAIDLEARDVQIGVFPVARVEKLCDCAR

SEQ ID NO: 12392 - protein, 162 aa, Zea mays
  VARIANT 148: note = Ancestral polymorphism is Q, Derived polymorphism is H
  VARIANT 89: note = Ancestral polymorphism is A, Derived polymorphism is T
MKEGGEKKNILSKTLQRCRTSLAQRRRPPPPAAPKRAASSPSLGVPPPPPVPAAGYFTVLVGPEKERFGVRARCANHPLFRALLDAAEAEYGFAGCDGPLELPCAVDDFMEVMWEMELGDPSASPGCGRFAAGSTRGYHHVHQLAGYQLVVSPPARFLVAGR

SEQ ID NO: 12393 - protein, 96 aa, Zea mays
  VARIANT 61: note = Ancestral polymorphism is Q, Derived polymorphism is H
MATTKDPATTGGEPAIGIPYHPAAEAQGHYYYAPPPNPYAAGMPPPNAIYAGAPKGVPLQQTMFRDTPAPFHCQACGEAAVSSVRTSSSAAHFGAL

SEQ ID NO: 12394 - protein, 253 aa, Zea mays
  VARIANT 26: note = Ancestral polymorphism is R, Derived polymorphism is W
  VARIANT 35: note = Ancestral polymorphism is G, Derived polymorphism is D
  VARIANT 80: note = Ancestral polymorphism is E, Derived polymorphism is K
  VARIANT 184..253: note = Derived polymorphism lacks residues 184 to 253
MFPFLLAMAMQGLDPLTTAGLFAEAWCVGEKKVNGEECFILKLAADPQMLKLRSEGQAEIIRHVLFGYFSQRTALMVHIEDSHLTRIQPHAGGDVVYWETTTSSALEDYRAVEGVMIAHSGRSAVTLFRFGEAAMSHTKTRMEEAWSIEEVAFNVPGLSADCFIPPADIQSGPVGEACELPPSQSKPSLASVVACMMPFMLGVCFLCPSMDCLWHKYHYCPSCGEKVGEFRKSDPCLVVDATRWSEPSFAVPA

SEQ ID NO: 12395 - protein, 516 aa, Zea mays
  VARIANT 24: note = Ancestral polymorphism is S, Derived polymorphism is N
MAECSLATLRVRGQYQGRWTWSNSKLNMPIMDPKRNYALKIHLPCQSKAAREWTSVAFTPFGFHGRDHRVETSVKCYCLQPLMDSESMVSPNLILISDEALLTISMVFAYLAGVVPSGQTSPRVRNQNVSQHIPEPSSSHSGRDLKFLPERNAAFDPNDMWSEVSAKLSKALQAHVQDALLDSREDGLMSDRKNYPLSMLAIHAGPRLRLLLITFQLLEMEVRNISGSSELDGIRWLQVSTTLIDSLIQPVFMKWIEEEQALENGQINEKLMKTISSKLKEGNKILRRFNRFGKSELYLDMLFFLRFGSARCDSYFNVKFLAEHGERILEDLVISLADVIASIYLELMSVDGDMSAEVVGSSLVLCSLSTRELQKLRNEVAINWWLHQYFKSVVSMYEDRFELYVLCSKKCEKTADNQAERANWWRIASGKPNVLTLDYVNISPFSLPARRTKELRALIGWRYYFSLFLELSDIAMPFIRVAISKVSSAVSYFWVSMIGRSLGLIFSGIRQSLGWK

SEQ ID NO: 12396 - protein, 102 aa, Zea mays
  VARIANT 77..102: note = Derived polymorphism lacks residues 77 to 102
  VARIANT 59: note = Ancestral polymorphism is G, Derived polymorphism is S
  VARIANT 27: note = Ancestral polymorphism is V, Derived polymorphism is M
  VARIANT 25..102: note = Derived polymorphism lacks residues 25 to 102
  VARIANT 12: note = Ancestral polymorphism is P, Derived polymorphism is S
MDKEYIDLNLRSLYPNRGHHMRIRQHMNPLNSSFSEPTGPPEWKEVFDDPLLPLMVDIGCGSGRFLIWHAKNSGKTQNYLGLEIRQKVLLVLGFSLFGFWIG

SEQ ID NO: 12397 - protein, 509 aa, Zea mays
  VARIANT 221..509: note = Derived polymorphism lacks residues 221 to 509
MGCFSCFDSPADEQLNPKFGADCGYGGTSAAAAYGAGFGRHGDRGYPDLQQAPMAAPRVEKLSAAAEKARAKSNGLTKEASVPKDANGNAISAQTFTFRELATATRNFRPECFLGEGGFGRVYKGRLESTGQVVAIKQLNRDGLQGNREFLVEVLMLSLLHHQNLVNLIGYCADGDQRLLVYEYMPSGSLEDHLHDIPLDKEALDWNTRMKIAAGAAKGLEYLHDKANPPVIYRDFKSSNILLDESFHPKLSDFGLAKLGPVGDKSHVSTRVMGTYGYCAPEYAMTGQLTVKSDVYSFGVVLLELITGRRAIDSTRPHGEQNLVSWARPLFNDRRKLPKMADPRLEGRYPMRGLYQALAVASMCTQSEAASRPLIADVVTALSYLASQPYDPSTAFASRRLGGSKPGENGGRVVSRNDETGTSRSLGKDREDSPRDLPAILLNKDLERERMVAEAKMWGDRERLVAEAKMWGDRERMVAEAKMWGENWRDKRRAENGQGSLDSPPTRNS

SEQ ID NO: 12398 - protein, 410 aa, Zea mays
  VARIANT 38..410: note = Ancestral polymorphism lacks residues 38 to 410
MWDPRFPLDSNSSWHLVRIHLSLLIDYIFGSWDDLLLRSWKFLLFVYMLAPTRGGRGGRFEVIFVSPTGEEIKSKRQLTQYLKAHPGGPASSEFDWGTSDTPRRSARLSEKVKATESPEGEKTPKRARSSSKRGKKEEKVDAEDANEAGEDGAAAEGKGTDVEMKDAENAEDEKKDVPSAEKTEEVDDKKDAENVEMKDAAEKTEEVEDKKEEAPTVDAAENTVEGDDKKEEPPAEKTDEKEEAPAVDAAEKNEEGDDKKEEEPPAEKKTVEKEVVPAVDAAENTEQSTGGQAQPNDVAAPESENKGDGKPAESESAPLAFVDDAAPLVIVGEEKTEDSQAAESAVPSLASSEGEKKENGGATEPAAPPPADAEKGAENSGQVNTAPQEPTAANCDKGQIQPGASAVRCT

SEQ ID NO: 12399 - protein, 350 aa, Zea mays
  VARIANT 187: note = Ancestral polymorphism is R, Derived polymorphism is W
  VARIANT 188: note = Ancestral polymorphism is C, Derived polymorphism is S
  VARIANT 291: note = Ancestral polymorphism is R, Derived polymorphism is W
MGGLRSRILRTLQSFPTAAPAQSPNLLLAPLPPGAGPSPQPPAAPCVRLQEPAPQEPPLGDEARAAPGGGGDDDKENVSPGATPRKAKKMKLSSYHHDRSPGLGEEQRADGATRYRRPDLASATLFDPDLLAAFRRAVDAYAQALDAARRRDVDVDVDDGDGVPGGGGGGGGGGPGVTDPLDAFERRCPPGGERAVVLYTTSIRGVRRTFEDCARVRRLLGGLRVAFLERDVSMHAPYREELRALLRCGRGEGGGGAFPVPPRLFVDGRYLGGADEVVALHERSQLRPVLWRAARRGAAEVPCAVCGGAWFVVCGACGGSHWLHDASAGAGRVPCSACNENGLVPCPLCS

SEQ ID NO: 12400 - protein, 449 aa, Zea mays
  VARIANT 303: note = Ancestral polymorphism is F, Derived polymorphism is V
  VARIANT 286: note = Ancestral polymorphism is V, Derived polymorphism is I
  VARIANT 180..449: note = Derived polymorphism lacks residues 180 to 449
MFGRAPKKSDNTKYYEILGVPKSASQDDLKKAYRKAAIKNHPDKGGDPEKVCAVRGHVVYRDCDPSCVETRDCHLHVLAVFKELAQAYEVLSDPEKREIYDQYGEDALKEGMGGGGSHADPFDIFSSFFGPSFGGGGGSSRGRRQRRGEDVVHSLKVSLEDLYNGISKKLSLSRNVICSKCKGKGSKSGASMRCPGCQGSGMKVTIRQLGPSMIQQMQQPCNECKGTGESINEKDRCPGCKGEKVVQEKKVLEVHVEKGMQHSQKITFPGEADEAPDTVTGDIVFVLQQKDHSKFKRKGEDLFYEHTLSLTEALCGFQFVLTHLDNRQLLIKSNPGEVVKPDQFKAINDEGMPIYQRPFMKGKLYIHFTVEFPDSLAPEQCKALESVLPPKPSSKLTDMEIDECEETTMHDVNNIEEEMRRKQAHAAQEAYEEDDEMPGGAQRVQCAQQ

SEQ ID NO: 12401 - protein, 70 aa, Zea mays
  VARIANT 44: note = Ancestral polymorphism is L, Derived polymorphism is I
MVATAPAQVDGLLAIGLSDNSVALWDLSKRALVTRVKSPEKCLLYSMRMWGDSVREFLVASGTILNEILI

SEQ ID NO: 12402 - protein, 158 aa, Zea mays
  VARIANT 8..158: note = Derived polymorphism lacks residues 8 to 158
  VARIANT 39: note = Ancestral polymorphism is R, Derived polymorphism is C
  VARIANT 65: note = Ancestral polymorphism is G, Derived polymorphism is R
  VARIANT 68: note = Ancestral polymorphism is T, Derived polymorphism is R
  VARIANT 81..158: note = Derived polymorphism lacks residues 81 to 158
  VARIANT 109: note = Ancestral polymorphism is K, Derived polymorphism is M
  VARIANT 144: note = Ancestral polymorphism is L, Derived polymorphism is P
MANGEDIQPLVCDNGTRMVKAGFAGDDAPRAVFPSIVGRPRHTGVMVGMGQKDAYVGDEAQSKRGILTLKYPIEHGIVSNWDDMEKIWHHTFYNELRVALEEHPVLLTKAPLNPKANREKMTQIMFETFNVPAMYVAIQAVLSLYAILNGTYLYYINS

SEQ ID NO: 12403 - protein, 120 aa, Zea mays
  VARIANT 67: note = Ancestral polymorphism is E, Derived polymorphism is K
  VARIANT 29: note = Ancestral polymorphism is R, Derived polymorphism is C
  VARIANT 22: note = Ancestral polymorphism is E, Derived polymorphism is K
  VARIANT 15: note = Ancestral polymorphism is D, Derived polymorphism is E
MACFADVGVLYWHLDPKKSESEEELAKIRRDRGYSYMDLIEICPDKLENYEEKVKNFFREHMHADEEIRYCLEGSGFFDVRDKDDKWIRIRIREGDMIILPAGIYHRLTLDSAKYTKVPT

SEQ ID NO: 12404 - protein, 1029 aa, Zea mays
  VARIANT 29..1029: note = Derived polymorphism lacks residues 29 to 1029
  VARIANT 274: note = Ancestral polymorphism is N, Derived polymorphism is S
MPSQVMDPRRHLSQFSNPTVAASSFSEEQFRLPTERQVGFWKQESLHHIGSKSVASSPIEKPQPIGTKTVGRVEPQPYKLRDQKTAFSLEHKTFGQERHVNLPPSLWRADQDPNLQSDPSLFPDGRRTSPNEAYNENGLFSSSLSEIFDRKLGLRSMDVRLRQPVQKVDLTHVDDEPFELTEEIEAQIIGNILPDDDDLLSDVLDVGYTAHANMGDDVDDDIFYTGGGMELETDENKKNTELNGANDGLGLLNGTMNGEHPYGEHPSRTLFVRNINSSVEDSELKLLFENYGEISNLYTACKHRGFVMISYYDIRSAWNAMRALQNKPLRRRKLDIHYSIPKDNPSEKDINQGMLVVFNVDPSITNNDIHQIFSEYGDIKEIRDAPQKGHHKIIEFYDVRAAEGAARALNRSDLAGKKIKLETGRLSGARRSTQHMSKELGQEEFGVCKLGSPSTNSPSLPSLGSSNIAAMTSCGRENGSMHGLHSGLLTSMSPFREASFLGLSSTLPQSLSSPIGIASAATHSNQAPLGELSHSLSRMNGHVNYGFQGLGAIHPHSLPDVHNGANNGTPYNLNTITPVGVNKNSRTAEAVDSRHLHKVGSGNLNGHSFDRAGEGGKFVNFDILVSIFMFDPILSHFHSLSMCFVIKLLAMGFSRSGSGHNCGHQLMWNNSNNFHGHPNSPVLWQNPGSFVNNVPSRPPAQMHGVPRAPSHMIENVLPMHHHHVGSAPAINPSLWDRRHGYAGDLTEASSFHPGSVGSMGFPGSPQLHGLELNSIFSHTGGSRMDPTVSSAQISAPSQQRGPMFHGRNPMVPLPSFDSPGERMRSRRNDSGVNQSDNKRQYELDVDRIMRGEDSRTTLMIKNIPNKYTSKMLLAAIDESHKGTYDFIYLPIDFKNKCNVGYAFINMTNPQHIIPFYQSFNGKKWEKFNSEKVASLAYARIQGKTALIAHFQNSSLMNEDKRCRPILFHSDGPNAGDQEPFPMGSNIRARSGRSRTSSGEENHHDIQTVLTNGDTSSNGADNSGPTKDTE

SEQ ID NO: 12405 - protein, 360 aa, Zea mays
  VARIANT 298: note = Ancestral polymorphism is T, Derived polymorphism is I
  VARIANT 302..360: note = Derived polymorphism lacks residues 302 to 360
MTSPYASPFLLSLLLLISIPVVFLLAPRLLPPKTLPAIPDADESDDLALFRRAILSSSSATPTPTSAASYFFRRRPAPKVAFLFLTNSDLVFSPLWEKFFRGHTHLFNLYVHADPYSVLELPPTPSFRGRFVPAKATQRASPTLISAARRLLATALLDDPNNQFFALLSQSCIPLHPFPTLYNALLSDNAGPHSHHRSFIEIMDNMDNDTKLLHDRYYARGDDVMLPEVPYDQFRAGSQFFVLTRRHAIMVVRDMRLWKKFKLPCLIERRDSCYPEEHYFPTLLDMQDPEGCTKYTLTRVNWTDSVAGHPHMYEPGEVSASLIRELRKSNTTHPYMFARKFSPECLEPLMEIVDSVILRD

SEQ ID NO: 12406 - protein, 601 aa, Zea mays
  VARIANT 190: note = Ancestral polymorphism is A, Derived polymorphism is T
MASGSGRARGGGIRIQEPGSRHRDESNAGAAAAAAEPPPPSPSTDGLQERPHGPLGAESGSPSAAAAALKGKGVLAPSPLPSPTRSEETNSLVSSDIVSDEEAEELRSANTLADGDRRFGVSWKSPLVEAMMEVPKVTRHIDSKTAFDNLSMEQQWALAEEIEMQQRQQVRFLGSLERIREAKLLSCDLAAGILSFLRAQQRKCLWITFKGGMSNMFLDWIGRQMHNFNSDSTVIIPHVNHQTIPMTGIIEHYNLMETDAGRGVIFHSNVLNLRRAYSEFRPVHGDGDCFYRSFMFSYLEQVLDRQDTHEEHRLLAAVEGVARHHAHLEWNSEFSLRHKVRICTLFHISGAFKTLIKKVMRWKRHNRWKNVLTTDSYSKQKLLKFFSGCGRPDNIFAFLRLVAAIWIYSHSEEFEPLIPELDEYDTLREWCSQEVIRHKVFTDHVQMTALVTALGVPLRVEYLLQVGDGQDLYDRQEDSQDYTPTSTCWSSHRRQLPHVHVVPRVTVLYTNAHYDIIYPHRRDGPPVPSIDERCCQQTALVQRPTTESSGQQIAQRDSCSGTGESSSQHIAQVEISTDENSDQHAELKLTSTDAHEYDDHC

SEQ ID NO: 12407 - protein, 244 aa, Zea mays
  VARIANT 5: note = Ancestral polymorphism is D, Derived polymorphism is Y
  VARIANT 23: note = Ancestral polymorphism is L, Derived polymorphism is F
  VARIANT 60: note = Ancestral polymorphism is T, Derived polymorphism is A
MAAADASRTLLAAVSLALAACCLAQLAAGDTNGVYEPCSDGRIQRGDGFTFGVVFAGYNAFFSGNTQLSPCDRRLNLAASGQLAVFRPKVDEISLLTINTTTGFNPASAGGFMVAFAGRKYAARSIPIFVSNTSVTVSSFTLVLEFNKGRLENLHWKKDGCGACSGKSNFVCLGKQTCAIRTQSCKSQGPVDCSVGIQLAFSGTDKHESVLNSWYEVSNLRQYSLYGLYSNLKGTLSGQFNKIF

SEQ ID NO: 12408 - protein, 578 aa, Zea mays
  VARIANT 420..578: note = Derived polymorphism lacks residues 420 to 578
  VARIANT 409..578: note = Derived polymorphism lacks residues 409 to 578
  VARIANT 366..578: note = Derived polymorphism lacks residues 366 to 578
MSASRPSSGRQPLCPPLCPPLAACPSARRPPPAHLCPPPSSGCVPSSGRRPDAHLQPSRARGLQPLRRPPLAAAHLQPSRKPAHLCPDKSQQPVPPSQVTTSSRDMEDASADRPQGESGSQQPYDPAKDPKKKAKSKDPAWNYCYWLDLNKKDVVKCILCGKIVHAGVRRLKQHLVGGHAKRCDYLKNNARQKPIELDDDKEGDKDDEVEFEASNEVRLAVYFSFVQFQTSKECSIEGAGGSLPDEGLCSRRRLESGITVDVVCTEKPHIAPTWIIPWSPSFNQRAEELDRAIVLNVTVAINEAVEEAILANFARRLELVHDSLSLCRLGPASFLLILPSLEMADRAYDGGRIVNLSPTTKIHVMRWSRFLNSSVTASLPFHVEIEVSGIPAHAWELESVQALLNEWCWIADLHPDCERQREVFKVIAWCSSLSSIPREFKLQIVDPVTSDGGMLRRSLVYPIRVSVKVLDRPNLLQSLQPSPPPVEDDPDQGRRRRRRRSRRSSFGINAPGKSSTTAVLPRASVHQRLGPCVQVFVKEGIRMPRLPVHNRLGPLEVFIAEKGAIKKMKRVWIPKRKL

SEQ ID NO: 12409 - protein, 272 aa, Zea mays
  VARIANT 76: note = Ancestral polymorphism is E, Derived polymorphism is K
MLRVAGRRLSSALAWRPAAAASGSRGPLAGTLPGRDDDDTRDCRARFAIESPFFAAARGFSAETLAPRNQDVGLSELPATVAAVKNPSGKIVYDEYNHERYPPGDPSKRAFAYFVLSGGRFIYASLLRLLVLKFVLSMSASKDVLALASLEVDLSSIEPGTTVTVKWRGKPVFIRRRTEDDIKLANSVDVASLRHPEQDAERVKNPEWLVVIGVCTHLGCIPLPNAGDFGGWFCPCHGSHYDISGRIRKGPAPFNLEVPTYSFLEENKLLIG

SEQ ID NO: 12410 - protein, 205 aa, Zea mays
  VARIANT 57: note = Ancestral polymorphism is T, Derived polymorphism is M
  VARIANT 35: note = Ancestral polymorphism is T, Derived polymorphism is I
  VARIANT 10: note = Ancestral polymorphism is R, Derived polymorphism is C
  VARIANT 7: note = Ancestral polymorphism is G, Derived polymorphism is D
MAATMTGSTRASGGSFLVLLFVVLVGIVDVASAATTVASATVATNSGDSNAVALLTMPASASTEQLNGIIQCLLGCFTQVFSCSFGCMGKQGADLPLCIIGCDQRSVVCMIRCGLAPSPPTPSPPAPKPPSPKPPTPKPPTPKPPTPAPPTPTPAPTPKPPTPKPPTPAPPTPAPPTPMPPTPAPPGPPYTPPYAVTGRKTATFD

SEQ ID NO: 12411 - protein, 92 aa, Zea mays
  VARIANT 80..92: note = Derived polymorphism lacks residues 80 to 92
  VARIANT 62: note = Ancestral polymorphism is C, Derived polymorphism is F
  VARIANT 59: note = Ancestral polymorphism is T, Derived polymorphism is I
  VARIANT 38: note = Ancestral polymorphism is M, Derived polymorphism is T
  VARIANT 33: note = Ancestral polymorphism is L, Derived polymorphism is I
  VARIANT 28: note = Ancestral polymorphism is T, Derived polymorphism is M
  VARIANT 16: note = Ancestral polymorphism is D, Derived polymorphism is N
  VARIANT 15: note = Ancestral polymorphism is V, Derived polymorphism is I
  VARIANT 2: note = Ancestral polymorphism is A, Derived polymorphism is T
MADRLDVLLYLGPFVDSLNISPHDSVQTLVKFLGCVSTKIQNSLDQKLQLPIVGAEELTELCTKVADLGTVHLLKGLVLRTLDKVSCCYKGL

SEQ ID NO: 12412 - protein, 234 aa, Zea mays
  VARIANT 12: note = Ancestral polymorphism is A, Derived polymorphism is V
  VARIANT 63: note = Ancestral polymorphism is S, Derived polymorphism is R
MSATGVLWPQRAVAMSSDAVAEARKGRLKQRYDNEFRLVAGCVPYRVNKKDDDEVAGSPCSSSLGDDTGTAEVEVLMISTPNRADMVFPKGGWEDDEDVYQAASRETMEEAGVKGVIHRAALGHWVFKSKSSQSRAGPTGACKGYIFAMEVTEELDTWPEQDTHDRRWVAPAEAYQLCRYDWMREALTALLERLPVLEPVVAAAAAAATAELTTDQAGMYMMLQATSDGAVALC

SEQ ID NO: 12413 - protein, 140 aa, Zea mays
  VARIANT 91: note = Ancestral polymorphism is D, Derived polymorphism is E
  VARIANT 20: note = Ancestral polymorphism is Y, Derived polymorphism is C
MDGHSSNTAVTVPESFSMVCLDGVMVRVPVPEDSASLIPLAGGGFKFPAHDGHRAMIKTAKQMDHYQRVRRNARGMPEVAARLGGEDALVELMYGDVDEACSVFRVPPIAPTTGPYANYYVPRSCSYTREDAAVRPSAAR

SEQ ID NO: 12414 - protein, 97 aa, Zea mays
  VARIANT 34: note = Ancestral polymorphism is E, Derived polymorphism is K
  VARIANT 22: note = Ancestral polymorphism is R, Derived polymorphism is C
  VARIANT 4: note = Ancestral polymorphism is R, Derived polymorphism is G
MQRGSMLAMPSARSFGAAGWWRVSRDASAVHKKEGKSYRQGKAKPFFQVSLSPSKSFYVFGGGGNRSLLTGLLILSGHVSVCVCDCVLHLRVDLQLE

SEQ ID NO: 12415 - protein, 341 aa, Zea mays
  VARIANT 176..341: note = Derived polymorphism lacks residues 176 to 341
  VARIANT 182: note = Ancestral polymorphism is R, Derived polymorphism is H
  VARIANT 183: note = Ancestral polymorphism is R, Derived polymorphism is H
  VARIANT 187: note = Ancestral polymorphism is R, Derived polymorphism is C
MMSFKGHEGFGQVSGAGMSQASHGAAPAGAPLPWWAGAQLLSGEPAPLSPEEAPRDTQFQVVPGASQGTPDPAPPKGGTPKVLKFSVFQGNLESGGKGEKTPKNSTAVVLQSPFAEYNGRFEIGLGQSMLVPSSYSCADQCYGMLTTYGMRSMSGGRMLLPLIAPADAPVYVNPKQYEGILRRRRARAKAESENRLTKGRKPYLHESRHLHAMRRVRGSGGRFLNTNKGGHGTDVAANGGSKMAAAAAPSRLAMPPSAEPPWLSGLSDGSNPCCHSRSSVSSLSGSYVASIYGGLEQHLRAPPFFTPLPPVMDGDHGGPTAATISSFKWAASDGCCELLRA

SEQ ID NO: 12416 - protein, 665 aa, Zea mays
  VARIANT 494..665: note = Derived polymorphism lacks residues 494 to 665
  VARIANT 280: note = Ancestral polymorphism is R, Derived polymorphism is C
  VARIANT 277: note = Ancestral polymorphism is I, Derived polymorphism is N
  VARIANT 104: note = Ancestral polymorphism is G, Derived polymorphism is S
  VARIANT 64..665: note = Derived polymorphism lacks residues 64 to 665
MRLALSSGTGTCTMTPSRHTIEKLSGTATAALLLWPSMARCSSLLIAFSRGSICGITFTFTNRCGDTVWPGLLSGSGTPPLETTGFALAPGQLRSLYAPQGWSGRFWGRSGCTFDASGKGSCATGDCGSGEVECRGAGASPPATLVEFTLDDDGGKDFYDDSVCHWVQGEVGSLNDARYLENILLLLTGRQLDTATEIAASRGDVRLAILLSQAGGSMSNRSDLAQTLDQWKMNGIDFDYIEEDWLKAAFLDLPIDWKRYLGLIMWYQLSPDTPLDIIIRSYDQLLGEGKVPYPVPVYIDEGPLDEAPQWSSGDHFDISFYLMLLHANKDEKFGLLKTMFSAFSSSFDPLDYHFIWHQRSILEAVGAFSSNDLHLLDLSFVYQLLCLGRCHWAIYVILHMPYLDDAPYIHEKLIREVLSQYCESWSRDDAQRQYIVELGIPEEWMHEALALYHEYYGDKQGALENLIQCGNRKKAHTIFVTSVAHSMFLSSNHQEVWRITSALENHKYEIADWDLGVGIYIDFYVLKNSMQERNAMDDSGSLEEMSESCRSFFGRLNKSLLVWGSKLHVESSSSAPFGILKHSCLGLYLEYSLTGLADSVVFDRACYSKMAEELCALLVDTPSETLNLPMGCLLTMLNAPVPDESRSSYLQDALSVFTEILCSDP

SEQ ID NO: 12417 - protein, 459 aa, Zea mays
  VARIANT 375..459: note = Derived polymorphism lacks residues 375 to 459
MGDWIIGALINIVGSVAINFGTNLLKLGHDQREKLSSINNSEGNEKFVPKSVMHFQTWRIGILFFAAGNCLNFMSFAYAAQVRFAVLKTSSKFSLTSSVFGTEIDCLLALQSLLAALGSIQFVSNIAFAYFVLNKTISVKYVYFAPLSRVMVATTFIVFGNIFLVSFGNHQSPVYTPEQLIAKYSNLVFVLYCMSLVFVVAFNHYLYRSGETIISNSSKDAGTYWRTMLPFSYAVVSGAIGSCSVLFAKSLSNMLRLTMSSRYEFHSWFTYSIVLLFLCTAGFWMARLNEGLSLFDAILIVPMFQIAWTFFSICTGFVYFQEYQVFDTLRIIMFVLGMTFVFVGISLLAPDDSKADTKDGSSTADDSIIDIDRNGKMPMEETDTDDSISFVTSVKVNAKRVLSKAKSACSMSLGLGESTISASSVLAMPMVSSRTTGFRGIGNDRPKYVPLRTTDWSNL

SEQ ID NO: 12418 - protein, 230 aa, Zea mays
  VARIANT 194: note = Ancestral polymorphism is V, Derived polymorphism is A
  VARIANT 186: note = Ancestral polymorphism is A, Derived polymorphism is D
  VARIANT 182: note = Ancestral polymorphism is L, Derived polymorphism is P
  VARIANT 173: note = Ancestral polymorphism is L, Derived polymorphism is V
  VARIANT 160: note = Ancestral polymorphism is A, Derived polymorphism is T
  VARIANT 140: note = Ancestral polymorphism is N, Derived polymorphism is S
  VARIANT 137: note = Ancestral polymorphism is G, Derived polymorphism is D
  VARIANT 125: note = Ancestral polymorphism is P, Derived polymorphism is S
  VARIANT 120: note = Ancestral polymorphism is D, Derived polymorphism is G
  VARIANT 118: note = Ancestral polymorphism is F, Derived polymorphism is L
  VARIANT 99..230: note = Derived polymorphism lacks residues 99 to 230
  VARIANT 91..230: note = Derived polymorphism lacks residues 91 to 230
  VARIANT 90: note = Ancestral polymorphism is P, Derived polymorphism is S
  VARIANT 85..230: note = Derived polymorphism lacks residues 85 to 230
  VARIANT 39: note = Ancestral polymorphism is I, Derived polymorphism is V
MTTNLFHHLRGKDVFEAFYKKDLAKRLLLFNVAEFFWNIVSSKQTLLKAKRNLECHCFRVFSCCLMTQKLSFLDIKNYTGIEDKELRQAPQSLACGKVQVLQKIPQGRDVEGKDEVVFNDDFSAPLYRIKLIYVLMGKCNSNERDGDERVDMFCIYSNLASYSCQMEPAISILRSHLDVGTLLVIAFEVVFLCVSEIALHVFSSYEDDARQKLAPCPKCVSEHCSANAIP

SEQ ID NO: 12419 - protein, 130 aa, Zea mays
  VARIANT 7..130: note = Derived polymorphism lacks residues 7 to 130
  VARIANT 2: note = Ancestral polymorphism is R, Derived polymorphism is C
MCRKSLRGQTHMIQSGRKRKMSIKESVLRRSGRRLRNFSDDDESESSESDGEKPLAGEQRRDDEDEEEETEGRLRTSEVVRREMGLQWMLKPAISGELRAPGLIMPRRMKLHMKRLIRWFKLRLSECLAR

SEQ ID NO: 12420 - protein, 960 aa, Zea mays
  VARIANT 833..960: note = Derived polymorphism lacks residues 833 to 960
  VARIANT 829..960: note = Derived polymorphism lacks residues 829 to 960
  VARIANT 803..960: note = Derived polymorphism lacks residues 803 to 960
MASSAVAPRWLRGKVKAVTSGDCLVIMGCTKAEIEPEKSITLSYLMAPRLARRGGVDEPFAWESREFLRKLCIGKEVTFKVDYTAPNIGREFGTVFLCDKNVAYSVVSAGWAKVKEQGSKGGEQNPHLGELLRLEEVAKQQGVGRWSKEPGAAEESIRYLPPSAIGEASGFDAKGFAVENKGKSLEAIVEQVRDGSTVRVYLVPSFQFVQIYVAGVQAPSMGRRPSAPTVIAETDDTANDTNGEDSEGTPAQLTTAQRLVASAASAEIPPDRYGREAKHFTEARVLSRDVRIVVEGTDSFSNIIGSVYYPDGETAKDLALELVENGLAKYVEWSANMLDVEVKIKLKNAELQAKKDQLRIWTGFKPPVTNSKPIHDQKFTGKVVEVVSGDCIIVADDSAPYGSPSAERRVNLSSIRAPKLGNARTDVKPDHFAREAKEFLRMRLIGKQVAVEMEYSRRISTVDGQSVAPTANIADTRVLDYGSVFLGSPSQTDGDDISSAPSSASQPGVNVAELLLSRGFAKTSKHRDYEERSHYYDALLAAESRAEKAKKGVHSQKESPVMHITDLTTVSAKKAKDFLPFLQRNRRHSAVVEYVFSGHRFKLTIPKETCSIAFSLSGVRCPGKGEPYSDEAIALMRRRILQRDVEIEVEAVDRTGTFIGSLWESKTNMGSVLLEAGLAKLSSFGLDRMSDAHVLTRAEQFAKQQKIKIWENYVEGENASNGSAPESKQKEILKVVATEVLGGGKFYVQTVGDQRVASIQQQLASLKLKDAPVIGAFNPVKGEIVLSQFSLDNSWNRAMIVNGPRSVESLNDKFEVFYIDYGNQEVVPYSRLRPVDPSVSSSPALAQLCSLAFIKVPSLEDDFGQEAAEYLSECLLSSSKQYRAMIEEQSSINATMLEEGLARLERSKRWDTRERKTALQNLEQFQEKAKKERLRIWQYGDVESDEDEQAPAARKPGGRR

SEQ ID NO: 12421 - protein, 289 aa, Zea mays
  VARIANT 39: note = Ancestral polymorphism is D, Derived polymorphism is Y
  VARIANT 40: note = Ancestral polymorphism is R, Derived polymorphism is H
  VARIANT 44: note = Ancestral polymorphism is E, Derived polymorphism is K
  VARIANT 73..289: note = Derived polymorphism lacks residues 73 to 289
  VARIANT 86: note = Ancestral polymorphism is P, Derived polymorphism is L
  VARIANT 124: note = Ancestral polymorphism is C, Derived polymorphism is Y
  VARIANT 127: note = Ancestral polymorphism is K, Derived polymorphism is M
  VARIANT 129: note = Ancestral polymorphism is R, Derived polymorphism is H
  VARIANT 132: note = Ancestral polymorphism is T, Derived polymorphism is M
  VARIANT 154: note = Ancestral polymorphism is R, Derived polymorphism is L
  VARIANT 174: note = Ancestral polymorphism is R, Derived polymorphism is C
  VARIANT 190: note = Ancestral polymorphism is A, Derived polymorphism is P
  VARIANT 191: note = Ancestral polymorphism is A, Derived polymorphism is V
  VARIANT 202..289: note = Derived polymorphism lacks residues 202 to 289
  VARIANT 208: note = Ancestral polymorphism is A, Derived polymorphism is T
  VARIANT 212: note = Ancestral polymorphism is E, Derived polymorphism is D
MSDLHPPEHQVAGHRASASKLGPLIDGSGLFYKPLQAGDRGEHEVAFYEAFSAHAAVPARIRDTFFPRFHGTRLLPTEAQPGEPHPHLVLDDLLAGFQAPCVADIKIGAITWPPSSPEPYIAKCLAKDRGTTSVLLGFRVSGVRVVGPEGAVWRTERPEVKAMDTAGVRRVLRRYVSSVADEGMDCALAAAVYGGKGGVLSQLRELKAWFEEQTLFHFYSASILLGYDAAAVAAGGDGGGVTVKLVDFAHVAEGDGVIDHNFLGGLCSLIKFVSDIVPETPHTQPLGPS

SEQ ID NO: 12422 - protein, 151 aa, Zea mays
  VARIANT 35..151: note = Derived polymorphism lacks residues 35 to 151
  VARIANT 102: note = Ancestral polymorphism is G, Derived polymorphism is R
MAVHTQYLSHAFPYDHSTIRPALDNARNASVFISSAVVTRSRPNSVLSDLTGNNNNSNGCFLPRKRARVGDLAGATLNLDMQGQRALLPLVSAPVPLPLPAGDVQNRLLCSASASTSGHPTPSVAPVSQGLLSHLYRHGVEIDALVRIEVG

SEQ ID NO: 12423 - protein, 389 aa, Zea mays
  VARIANT 74..389: note = Derived polymorphism lacks residues 74 to 389
  VARIANT 228: note = Ancestral polymorphism is R, Derived polymorphism is W
  VARIANT 230: note = Ancestral polymorphism is G, Derived polymorphism is R
  VARIANT 272..389: note = Derived polymorphism lacks residues 272 to 389
  VARIANT 366: note = Ancestral polymorphism is V, Derived polymorphism is A
MAASSSSNSSPIGCLHPTLIFMRGTIVPNPMTPRSADSSCTHDLHPKRKDRLVERAPYARPVVPRGGAREEDGQAGLGLGLLARARQHGLHLLPHRTQSPLARSPFNLQALILMYQLCNSVAFVHDPKVLHRELKLHILLKDHKTMVLKIADLSLSHAISSSWPRAPSRTLPPLSAWRSPLPTTATPHDCELVKSIKRHRVLFDEEGKIVVRRIDNSMSRQVTFSKRWNGLLKKMKELSILCDAKIGLIIISSTSMLYEFSNTKSSRFGRLQGVKRAIAGRNLYKRCSCSCSTGDAMGMNMISKDVLFVRVGGSGEQGSKGEVACYIRLRHVWWRRAAGLGFVGNTLVEGDYLFVPSKCQGGIQRVHIIKGCVDGSLLLKILQEMEKEQ

SEQ ID NO: 12424 - protein, 35 aa, Zea mays
  VARIANT 26: note = Ancestral polymorphism is D, Derived polymorphism is N
  VARIANT 21: note = Ancestral polymorphism is M, Derived polymorphism is R
  VARIANT 19: note = Ancestral polymorphism is L, Derived polymorphism is F
  VARIANT 6..35: note = Ancestral polymorphism lacks residues 6 to 35
MRLASQLMQLRTCFVGGHLTMHASIDGLVHAWIIA

SEQ ID NO: 12425 - protein, 90 aa, Zea mays
  VARIANT 23: note = Ancestral polymorphism is Q, Derived polymorphism is K
  VARIANT 30..90: note = Derived polymorphism lacks residues 30 to 90
  VARIANT 72: note = Ancestral polymorphism is L, Derived polymorphism is P
  VARIANT 74: note = Ancestral polymorphism is L, Derived polymorphism is H
MTRMGIMFLLLEIISHLVIRSMQKWEKSTGISGLLRYAPEIFEQSGVASLFSDIGLSPHSTSILMSTLNALLILPCITAAMLLMDVCGRR

SEQ ID NO: 12426 - protein, 259 aa, Zea mays
  VARIANT 154: note = Ancestral polymorphism is R, Derived polymorphism is C
  VARIANT 130..259: note = Derived polymorphism lacks residues 130 to 259
  VARIANT 98..259: note = Derived polymorphism lacks residues 98 to 259
  VARIANT 21: note = Ancestral polymorphism is S, Derived polymorphism is F
  VARIANT 3: note = Ancestral polymorphism is E, Derived polymorphism is Q
MLEAKVSVLISPVVIFILPLSGKLYLSFFISVTVDAGGQGDPEECGVKAYELVCSNDKATIRINTGTYFVTSIDYINRSFWVVDANLDMHNSCPLPRWDPLLAICMLDTAPYTRAYYSQQAICMLPSRCWATPTAMGASSFSTIGRIHHINVVRLVGFCAEEMRRALACEYIFSAERSFSWDMLNEIALGIARGINYIPASRDRPTMGEIIEMLECGTHGLGLQMPSRPFFCDDDDPNMPAADSYHFSSELTAISEEDG

SEQ ID NO: 12427 - protein, 54 aa, Zea mays
  VARIANT 28..54: note = Derived polymorphism lacks residues 28 to 54
  VARIANT 31: note = Ancestral polymorphism is Q, Derived polymorphism is L
  VARIANT 32: note = Ancestral polymorphism is E, Derived polymorphism is D
  VARIANT 34..54: note = Derived polymorphism lacks residues 34 to 54
  VARIANT 41: note = Ancestral polymorphism is N, Derived polymorphism is K
MFDYTDYHRTIDCILQIVVKKLNPESVQGLQEWQDNMENFNPFGENGEQGTGSP

SEQ ID NO: 12428 - protein, 217 aa, Zea mays
  VARIANT 40: note = Ancestral polymorphism is S, Derived polymorphism is L
  VARIANT 45: note = Ancestral polymorphism is S, Derived polymorphism is N
  VARIANT 109: note = Ancestral polymorphism is E, Derived polymorphism is K
  VARIANT 168: note = Ancestral polymorphism is C, Derived polymorphism is Y
  VARIANT 169: note = Ancestral polymorphism is E, Derived polymorphism is K
MLMKDNNAVFHQALPTTSQFLAQDGDRLKLQLSSAVTMSLDRACNTSADDPTTNHDYMIVLSVKAATVASQWLELLHQDIMGCLIALKRSRKRVRNALHTELPYLISTKFSSNQENESSIANTCDAGCTEKAVSEAHLARWRSLFENRLKQVQEMQSNCDKGLKHMSCEAPLLGPMAELWKLKNPDISESEWAVQAAAASIYSTCNMTMITENVPCF

SEQ ID NO: 12429 - protein, 378 aa, Zea mays
  VARIANT 130..378: note = Derived polymorphism lacks residues 130 to 378
  VARIANT 110..378: note = Derived polymorphism lacks residues 110 to 378
MIIVDDAGGFLPALNHSPWDGVTVADFIMPFFLFIVGVSLTLAYKRVPDRVEATRKAVLRALKLFCLGLVLQGGFFHGVHSLTFGVDLTKIRLMGILQRIAIAYLLAAVCEIWLKGDDDVDSGYGLLRRYRYQLFVGLVLSIAYSILLYGMYVPDWEYQIAGPGSSSTEKSFSVKCGVRGDTGPACNAVGMVDRTVLGIDHLYRRPVYARTKECSIDYPENGPLPPDAPSWCQAPFDPEGLLSSVMAIVTCLIGLQFGHVIIHFEKHRGRIASWLVPSFSMLALAFVMDFVGMRMNKPLYTMSYTLATAGAAGLLFAGIYALVDLYGFRRPTIAMEWMGKHALMIYVLVACNILPMFIRGFYWRDPNNSLLKVIGIGA

SEQ ID NO: 12430 - protein, 393 aa, Zea mays
  VARIANT 150: note = Ancestral polymorphism is P, Derived polymorphism is L
  VARIANT 159: note = Ancestral polymorphism is D, Derived polymorphism is Y
  VARIANT 286: note = Ancestral polymorphism is R, Derived polymorphism is I
MAWRWLRSATRRGWWNAAPSGTPLFAAEQRATLVNVKVKWVKDRALDAAVSRERHLRTAHHLLDLVFSRPGHRVSRSDLLAEKSARRICGSAHSLLEFLRRYHTMFTLSRGGVSPTDMAFVLRQREVDCLFATEGDLVARLRRLLMLTLPRSLPLHTVDLLRWDLGLPSDYQDSILPRYPDHFALEQPEGDERVWLRLLSWDDLLAVSELEKSADGGDTTCIPFPVSFTRGYGLRSKCMSWLREWQALPYTSPYADASGLDRRTDVSEKRNVGVFHELLHLTVAKRTERQNVSNMRKLLGMPQKFTKVFERHPGIFYLSRVCGTQMVVLREAYGGGSQLLEKHAHPLVAIREEYSTLLRAALPPRTRGRERHGSFSRQHEGCVVGGDEFELSK

SEQ ID NO: 12431 - protein, 508 aa, Zea mays
  VARIANT 197..508: note = Derived polymorphism lacks residues 197 to 508
MHRARPTAHANDPDAPYAAAVAMLLEPKLEDEELPLQQLASPGPFVSLDQLMPAVAVPAEPRPLEALLQGPQLPPFLSKTYDLVNEPALDGVISWGAAGNSFVVWDPSTFARDVLPHNFKHNNFSSFVRQLNTYGFRKVHADRWEFAHEDFLRDSKHLLKRIVRRRSSPTKQSSVQPGSSSGESSLDPELHTLRREKNALLEEVARLKQEHRQTIEQMSTLNHRLESAEDRQRQMVSFLAKLLQNPSFVRKLKLHREKKEIDSTRVKRKFLKHVPHGSVESGESSSQHAGENGSYFAVSSPMATTTSVHDDITELQNFLLEDDDLNFGMDSENTGLEGTEATDDIGELIQGFDTQEELDLGSGAELQEMPPASGPLARDPTIGRFKGKNVLCPGLDATSSEGDCLSPLPDNMGLLSGTMLGTAGSMMAADDEQIWGVDASAALQSSCSGTSQQAFGSHASDPYLMDIANRPERFWELDFQALDEADLQLDKCAIDDPALQQQPSMKKL

SEQ ID NO: 12432 - protein, 246 aa, Zea mays
  VARIANT 147: note = Ancestral polymorphism is R, Derived polymorphism is W
  VARIANT 101: note = Ancestral polymorphism is R, Derived polymorphism is W
  VARIANT 54: note = Ancestral polymorphism is G, Derived polymorphism is D
  VARIANT 28..246: note = Derived polymorphism lacks residues 28 to 246
  VARIANT 17..246: note = Derived polymorphism lacks residues 17 to 246
MRQCEGHALAVDRGGARRHQRLGHRPHWLWLWDSSLVPAAYFTADSPARCRICGATAVELGAGMGLLGIAATVCLGAAHCVLADVVALLSGLKGNTFANRRRCGNVHDSGRLDIAPARAVYCDGVGGGGSVAGGAALLSAASRKRRRPIGATPAHSGVQEEEEPQQGDDPTATRALFAELDERGTTSELENLALNIQGLGKRRLDGSEKQGGHARSQQQRGFETTELTDDFFGGATERRDEGQCRG

SEQ ID NO: 12433 - protein, 256 aa, Zea mays
  VARIANT 180..256: note = Derived polymorphism lacks residues 180 to 256
MKVESPRTSPSRADPSPRLHPSDIHLHLIATSMACRAWPRLRPAHLRGWPPRIPFFPPYEDHADADAGRRKESTRPRDAVMPVPLRDAATPRCPCPSPRRRDARTARACPHPDAPPPHHAPSSPCDPCPQPSFPYYLKAGIPNSPFLLLPLLDWRWSAPTTCALPASLSHLTLPGGDTPEDGGAAASRSTDVVGSKKQSLRAPRRSPSAWTTARRDATTTLMTASIAYLHFFLVLRIFSLGLFFPLSFMAYQVLNF

SEQ ID NO: 12434 - protein, 511 aa, Zea mays
  VARIANT 64: note = Ancestral polymorphism is R, Derived polymorphism is C
  VARIANT 68: note = Ancestral polymorphism is T, Derived polymorphism is I
  VARIANT 84..511: note = Derived polymorphism lacks residues 84 to 511
  VARIANT 114: note = Ancestral polymorphism is D, Derived polymorphism is G
  VARIANT 119: note = Ancestral polymorphism is S, Derived polymorphism is F
  VARIANT 142..511: note = Derived polymorphism lacks residues 142 to 511
  VARIANT 166..511: note = Derived polymorphism lacks residues 166 to 511
  VARIANT 172: note = Ancestral polymorphism is S, Derived polymorphism is F
MEAIVLVQLVAAAALISSLIGGAAGEAVAQELRQGLSVAHDQSYSQFQPVLADPTGVFALGFLRVNSTMLDLAVVHLPSAFPLWRAIPDRPAPWSTAASLSFDGGLFLTDRAADKVLWSTAATSASAGDRAVLLNTSNLQIQSTGGSSSPDVVWQSFDYPSETIVQSQNFTSAATLHSFDRRFAMRLGSNYFGLYIEPPPSSGGVAAAMYFKHTAMEAKAQIVAGGGPTYARVEPDGFLAMYQREGPPADVLSFDTFNRGVRALRRMTLEPNGNLRAYYWNGARWALDYTAINDNDRCELPTTCGAYSVCAEPSGSCECLANATDGSGCAAAVPASVASSLCGTTGGEVGGLYWAVRRQGVEPVNKELLRSEQAASATDCEARCERNCSCWGAVYSNGTGVCYVMDYPAQLLVAGDDRKMGYFKIRSLEEEGTRGHGGGRASGVKAALLVVGVAVVVAAAAFGAYRVWDRRRRSAVDARRQIGAADDGLSPGPYKNLGSFSSVELTNSFRR

SEQ ID NO: 12435 - protein, 167 aa, Zea mays
  VARIANT 53: note = Ancestral polymorphism is K, Derived polymorphism is M
MECSGKEEQQMQIVCVRSASTGGGEEVGEWAEQSSRSALSLFKEKEEEIERKKVEVRDKVFSMLGRVEEETKRLAFIRQELELMADPTRREVDAIRKRIDKVNRQLKPLGKTCLKKEKEYKMCLEAYNEKNNEKATLVNRLLELVSESERLRMKKLEELNKTIESLY

SEQ ID NO: 12436 - protein, 803 aa, Zea mays
  VARIANT 178..803: note = Derived polymorphism lacks residues 178 to 803
MAFAVSGAVLGGAVRAPRLTGGGEGSLVFRHTGLFLTRGARVGCSGTHGAMRAAAAARKAVMVPEGENDGLASRADSAQFQSDELEVPDISEETTCGAGVADAQALNRVRVVPPPSDGQKIFQIDPMLQGYKYHLEYRYSLYRRIRSDIDEHEGGLEAFSRSYEKFGFNRSAEGITYREWAPGAFSAALVGDFNNWDPNADRMSKVRMDTPSGIKDSIPAWIKYSVQAPGEIPYDGIYYDPPEEVKYVFRHAQPKRPKSLRIYETHVGMSSPEPKINTYVNFRDEVLPRIKKLGYNAVQIMAIQEHSYYGSFGYHVTNFFAPSSRFGTPEELKSLIDRAHELGLLVLMDVVHSHASSNTLDGLNGFDGTDTHYFHSGPRGHHWMWDSRLFNYGNWEVLRFLLSNARWWLEEYKFDGFRFDGVTSMMYTHHGLQVTFTGNFNEYFGFATDVDAVVYLMLVNDLIHGLYPEAVTIGEDVSAEWIGSQLEALPTKLLFDSQFSCSVVQSNVSGMPTFALPVHDGGVGFDYRMHMAVADKWIDLLKQSDETWKMGDIVHTLTNRRWLEKCVTYAESHDQALVGDKTIAFWLMDKDMYDFMALDRPSTPTIDRGIALHKMIRLITMGLGGEGYLNFMGNEFGHPEWIDFPRGPQRLPSGKFIPGNNNSYDKCRRRFDLGDADYLRYHGMQEFDQAMQHLEQKYEFMTSDHQYISRKHEEDKVIVFEKGDLVFVFNFHCNNSYFDYRIGCRKPGVYKVVLDSDAGLFGGFSRIHHAAEHFTADCSHDNRPYSFSVYTPSRTCVVYAPVE

SEQ ID NO: 12437 - protein, 112 aa, Zea mays
  VARIANT 13: note = Ancestral polymorphism is M, Derived polymorphism is T
  VARIANT 65: note = Ancestral polymorphism is R, Derived polymorphism is S
MAAVETVVLKVAMSCEGCAGAVRRVLSKMEGVETFDIDLKEQKVTVKGNVKPEDVFQTVSKSGKRTSYWEGEATAPDAAAASGAEAAPGTAAEAPPAAAPAAPEITPAKADA

SEQ ID NO: 12438 - protein, 106 aa, Zea mays
  VARIANT 3: note = Ancestral polymorphism is E, Derived polymorphism is Q
MGEGRAKVQALLLAVLVLVMSCSAVPSASSANCIPRRLLAVSGSSYRRAPCNNDLIDRPTPSGSDDDDHREIIAGSRTSRWIPPPPRGGLERAAGIVRPTPPGSIN

SEQ ID NO: 12439 - protein, 521 aa, Zea mays
  VARIANT 283..521: note = Derived polymorphism lacks residues 283 to 521
MAAAAAISLSFHFRFRPPFPSPRTPTRHAPFSLFSPSLLAPCRLRVAPGRPSPSPWRPDVRARAGSTIGAPPALVRPGGAVETDRLPSDVRDRAMEAVDHFGGRVTIGDVASRAGLQLAQAERALQALAADTEGFLEVSEDGEVLYVFPKDYRAKLAGKSFRMRVEPLVDKAKQVGAYLVRVSFGTALIASIVLVYTTIIAILSSSSDEDGRGRRRRSYGSTIIIPTDMFWYLDADYYRRRRVENENGMNFIESVFSFVFGDGDPNDGLEEKRWKMIGQYISSNGGVVTAEELAPFLDVPPPSEESKDDESFVLPVLLRFQGHPEIDEQGNILYRFPSLQRTASSKSGRSREYVGTKWSAMFSGVEKYLEEKPWKFSKANATEKAMVAGLGGLNLFGVIILGNLLKQMTVTPGGLISFAAQLYPLLQIYAGSFFAIPLFRWFLLRKTNNGIKKRNKAREQRAQELVSPDSSLRRKLLSARDMAERKVITPEEIVYTTEKDLLEQDYEVKEWERRFKELESE

SEQ ID NO: 12440 - protein, 173 aa, Zea mays
  VARIANT 102: note = Ancestral polymorphism is G, Derived polymorphism is A
  VARIANT 107: note = Ancestral polymorphism is A, Derived polymorphism is T
  VARIANT 146: note = Ancestral polymorphism is S, Derived polymorphism is L
MAATACAYAYQGARPPQVLLPATFIDVDGAVQQSAPPPPPPLPRPSFLSHHLDICTEGLGSESSGDIDLTDDVDDNAAACVDVGQAPTCKRQHRDGGHEETGRARNARPAFPPPISLIGAGGKPWLYLRPLREDGRLVLREVRIPLRELLQARREDGRFKLQFAQPQPDDRCQ

SEQ ID NO: 12441 - protein, 300 aa, Zea mays
  VARIANT 147: note = Ancestral polymorphism is K, Derived polymorphism is E
  VARIANT 65: note = Ancestral polymorphism is R, Derived polymorphism is W
  VARIANT 59: note = Ancestral polymorphism is Q, Derived polymorphism is E
  VARIANT 40: note = Ancestral polymorphism is G, Derived polymorphism is C
  VARIANT 24: note = Ancestral polymorphism is E, Derived polymorphism is K
MAAAAGRKVAVAAVQFACTDVEAENVATAERLIREAHKKGAKIVLVQELFEGHYFCQAQRLDFFRRAKPYKGNPTIIRMQQLAKELEVVIPVSFFEEANNAHYNSVAIIDADGADLGLYRKSHIPDGPGYQEKFYFNPGDTGFKAFKTKYATIGVGICWDQWFPECARAMALLGAEILFYPTAIGSEPQDCNLDSREHWKRVMQGHAGANLVPLVASNRIGRETVDTEHGKSSITFYGNSFIAGPTGEIVKLANDKDEEVLVAEFDLDEIKSIRHGWGIFRDRRPELYKVLLTLDGEKQS

SEQ ID NO: 12442 - protein, 96 aa, Zea mays
  VARIANT 4: note = Ancestral polymorphism is R, Derived polymorphism is K
MATRRTVAASVTAQRPAWAAVARRMEGVSRYFSDKASGRLLSEEERAAENVYIQKMEREKLEKLRRKEDKAKAEAAKRAAAAARGDTKNGEEAHPS

SEQ ID NO: 12443 - protein, 292 aa, Zea mays
  VARIANT 137..292: note = Derived polymorphism lacks residues 137 to 292
  VARIANT 99: note = Ancestral polymorphism is P, Derived polymorphism is S
  VARIANT 82: note = Ancestral polymorphism is P, Derived polymorphism is A
  VARIANT 60..292: note = Derived polymorphism lacks residues 60 to 292
  VARIANT 46: note = Ancestral polymorphism is S, Derived polymorphism is L
  VARIANT 45: note = Ancestral polymorphism is A, Derived polymorphism is T
  VARIANT 34: note = Ancestral polymorphism is A, Derived polymorphism is T
  VARIANT 15..292: note = Derived polymorphism lacks residues 15 to 292
MAPSPLCSASPRPLRAPGQPPRDVRSPRTVVVAAGTRVSGAEARASLVLALASHALSASQRRFAELADEAAKYAFPSGRFEPRTLEEALMSVPDLETVPFRVLKREAEYEIREVESYFVAETTMPGRSGFDFNGSSQSFNVLASYLFGKNTASEQMEMTTPVFTRKGESNGQSMDMTTPVITKKSAGTNKWKMSFVMPAKYGSNLPRPKDPSVIIKEVPSKIVAVAAFSGLVTDDDINQRESKLRESLRKDTTFRVKDDSVVEVAQYNPPFTLPFTRRNEIALEVERNDIAL

SEQ ID NO: 12444 - protein, 587 aa, Zea mays
  VARIANT 2: note = Ancestral polymorphism is G, Derived polymorphism is E
  VARIANT 168..587: note = Derived polymorphism lacks residues 168 to 587
MGTRPRGVVLAPWAVVLVLVLALRLAGASHVIHRSLEAEAAPSVPASIVSPLLRTGYHFQPPMNWINAPLYYKGWYHLFYQYNPKGAVWGNIVWAHSVSRDLINWVALEPAIYPSIPSDKYGCWSGSATILEDGTPAILYTGIDRADINYQVQVLALPKDASDPLLREWEKPEEYNPVATPAAGGINATQFRDPTTAWRHAGHWRMLVGSVRGARGMALVYRSRDFRKWTKAKHPLHSAALTGMWECPDFFPVSGPGLQAGLDTSAPGRKYVLKSSLDLTRYDYYTIGSYDGGKDRYYPDDPAGDYHHRLRYDYGNYYASKTFYDPVERRRVLLGWANESDSVTDDKAKGWAGIHAIPRKIWLDPTGKQLLQWPIHEVEKLRGKAVSVDAKLVKPGDHFEVTGIATYQADVEVSFELELEAGTSLLEKAEAFDPAYDDDAQKLCGVKGADARGGVGPFGLWVLASADLQERTAVFFRVFRDGHGKPKVLMCTDPTKSSLSPDLYKPTFAGFVDADISSGKITLRSLIDRSVVESFGAGGKTCILSRVYPSIAVGKDAHLYVFNNGEVDVTVSGLTAWEMKKPLMNGA

SEQ ID NO: 12445 - protein, 225 aa, Zea mays
  VARIANT 77: note = Ancestral polymorphism is H, Derived polymorphism is Y
MQITRRTFPMLAPPRLPLAGALLLLLAVALGAVPCESAALRLRGSVACLDCAEGHDLSGVVVAVKCAGDGDGSAGLHAAQTDGRGNFDVAVPAEASASGAPCAARVLGATEQLCAPWGLTVARVVPARGPGSASYPASYVLGSRLAFFTRCAAASGGSAVAATMADREHQGGNAPMEPALRPTPPAARTPAWTPPSRGGNRPPFSFGGLPPFFFFFPFIPIIGIP

SEQ ID NO: 12446 - protein, 109 aa, Zea mays
  VARIANT 53: note = Ancestral polymorphism is C, Derived polymorphism is S
MAAAGCFEAGEASSGSRATPRRRGRRRPLLLAKKPPWRLVLAFLILMLVVPSCCQATARARGMQPFRGRPLLEPGSANRFLGFFPRGPVPPSGPSRQHNSIGAQDQSHP

SEQ ID NO: 12447 - protein, 429 aa, Zea mays
  VARIANT 154: note = Ancestral polymorphism is T, Derived polymorphism is I
  VARIANT 170: note = Ancestral polymorphism is A, Derived polymorphism is S
  VARIANT 344: note = Ancestral polymorphism is M, Derived polymorphism is I
  VARIANT 401: note = Ancestral polymorphism is A, Derived polymorphism is T
MNTRLSAEYQGLEVKVPSLFRCPISLDVMRSPVSLCTGVTYERASIQRWLDSGNTTCPATMLSLPSTDLVPNLTLRRLIALWASTAAPSSPSSSSSPAVGPTPAAAAAELLRRVADPAADPCPPLRKLAAFLSDDDVDEFDKNALARAGGAAETVASVLRRAGREPAEAAVRVLAAIAASDCIEEESKRRVAAALAADAPSTAAALARVLRSATSLEARVDAARLVESLLRNAAPGARATVADSEELLGELIRLVGPADDKGGLDRQAVAAGLSCLAAIAATRRARAEMVRLGAVPAAVRILEADAGSPSQALRVLEAAVGCAEGRAAVCESAGSAVPVVVSKMMKGGMAGAEAAVSVLWAVCHRYRDRRAVAAAAACESGLTKLLLLMQSGCSPAVRQMTSELLKIFRVNGKSCVAGYDSKTSHIMPF

SEQ ID NO: 12448 - protein, 226 aa, Zea mays
  VARIANT 141: note = Ancestral polymorphism is C, Derived polymorphism is S
MQEGYVYSRRALLLTPLHSYGENAAASQVVAGQEAPAGDGVRSSSSSSFDANVVMILAVLLCALICALGLNSIVRCALRCSSRTSPGGAQRQPGAGAGAGEPVARLAQAGARRKALRAMPTLVYSAGLLPLQAAGGGGPVCAICLAELEPGERVRVLPKCNHGFHVRCVDRWLLARSTCPTCRQPLFGAPHKGSGCADDAGAGAEPPVRAFLVPLRPEGFMTPYDF

SEQ ID NO: 12449 - protein, 168 aa, Zea mays
  VARIANT 154: note = Ancestral polymorphism is S, Derived polymorphism is N
  VARIANT 45: note = Ancestral polymorphism is G, Derived polymorphism is R
  VARIANT 19: note = Ancestral polymorphism is E, Derived polymorphism is K
MLLVVATWVLLMFTDGLNEKHLQELLWYVRFGLWWIILGVASSIGLGSGLHTFIMYLAPHVALFTIKAVQCGRVDLKSAPYDTILLERRPSWLEKDCLQFGPPIYHETIPFSKILQEVYLEDILWSIGTALGELPPYFLSRTGSVHTALRTKYNIIYLITAVFSCLST

SEQ ID NO: 12450 - protein, 240 aa, Zea mays
  VARIANT 223: note = Ancestral polymorphism is Q, Derived polymorphism is L
MLGASWPVSSLGKAQQVTPSLEFLSFPLLLCFGHNPLQEVAILLIFDFDGVRILRLQNESRSDAEKIFNEFNARKPEEKNVFKGVTKNHLFMGIIGITIVFQCCLDKNVRSAGPAYFANVAIKINAKFGGRNLEFANPKESLPGVTIEPTIIFGADVTHPAALDDTAPSIASVVASQDWPKVANYNGIVRAQGHRKELINGLEDIVKELLLAFEERSKRRPKQLIFQLHPYIHAIVFMFQ

SEQ ID NO: 12451 - protein, 78 aa, Zea mays
  VARIANT 20: note = Ancestral polymorphism is A, Derived polymorphism is V
  VARIANT 44: note = Ancestral polymorphism is T, Derived polymorphism is A
  VARIANT 47: note = Ancestral polymorphism is A, Derived polymorphism is V
  VARIANT 55..78: note = Derived polymorphism lacks residues 55 to 78
  VARIANT 60: note = Ancestral polymorphism is G, Derived polymorphism is E
  VARIANT 69: note = Ancestral polymorphism is S, Derived polymorphism is L
MYTTTQIKEDVVDGMTSFMAACLVSIKKTKDLLPDQLQKALRKAISVEKKKSKIWKAWDETKVIYNVASWGRHCCWAT

SEQ ID NO: 12452 - protein, 436 aa, Zea mays
  VARIANT 260: note = Ancestral polymorphism is D, Derived polymorphism is Y
  VARIANT 382: note = Ancestral polymorphism is L, Derived polymorphism is R
MAMELASSYSAAEIPHYFLCPISLEVMRDPVTLATGITYDRASIERWLFTDGHATCPVTRRALAPAEMDATPNHTLRRLIQAWCAAHQVERFPTPRQPLDSCRVAALLDQGRHGGAAAALREIKAVIAESERNRRCVEATPGAVDFLASLVAKDSSADRSPSKRASSQQDADDGDSLGEEVLDSPTFMSSPAEDALGVLYSLKPSERSLAQIMEREGNFLDTLASVLRRPSYRTRAYGILLLKAMTEVMTPAQFMMVSADLVQEVVLVVSDRVSSKAVRAALHVLCRLCPWGRNRVKAVQAGAVAALVELLLDEGGSRVTELAVVAIDHLCGCAEGRSDLVAHPAGLAVLSKKVMRVSAAATESAVRALHAVARHSPTPSVRQEMLAVGVVAKLLLVLQTNAGERAGLRVKEMLKTHARVWKDSPCLQTHRGSYPC

SEQ ID NO: 12453 - protein, 792 aa, Zea mays
  VARIANT 669..792: note = Derived polymorphism lacks residues 669 to 792
  VARIANT 572..792: note = Derived polymorphism lacks residues 572 to 792
MEARASPRPSVSIGGGGGFGAGRGDDSAFSFLSKGWREVRDSATADLRLMRARADSLRTLADRELEHILASASTALTSAPPPPLAAGAPIAELEFVRTRIQPKISELRRRYVSQERELGRRVLEGWAPRGAGKPARARVDLSGITAIRNAIVSEVDGGERWRRVVWNGEAEEGKEWEVLRMIRDGIKEFERRSQTKEIFEGLRSTGELVEKFKSSLKSFNMESQGSKEIQPLDLPEILANLVRQSEPFLDQLGVRRDQCDKLVEALCRKQNHSLSENTSLPVNDKSSDELDLRIASVLQSSGYHADDGFWSEPTKSEVSDDKRHVAIVTTASLPWMTGTAVNPLFRAAYLAKGTRQDVTLVVPWLCKSDQELVYPNSMTFSSPEEQETYIRSWLEERLGFESNFKISFYPGKFSKERRSIIPAGDTSQFIPSREADIAILEEPEHLNWYHHGKRWTDKFNHVVGVVHTNYLEYIKREKNGALQAFLVKHINNWVTRAYCDKVLRLSAATQDLPKSIVCNVHGVNPKFLKIGEEITANRGSGEPPFSKGAYFLGKMVWAKGYRELIDLMAKHKSDLEGFKLDVYGSGEDSQEVQSTARRLDLSLNFFKGRDHADNSLHGYKVFINPSISDVLCTATAEALAMGKFVICAEHPSNEFFMSFPNCLTYKTSEEFVARVKEAMDREPQPLTPEQRYNLSWEAATERFMEYSDLDKVLNNEAAQPGQGRKRKNKRTSQPNLSDIMDGGLALAHRCLTGNEVLRLATGAIPGTRDYDKQHCVDMGLLPPQVQHPVYGW

SEQ ID NO: 12454 - protein, 188 aa, Zea mays
  VARIANT 36: note = Ancestral polymorphism is Q, Derived polymorphism is K
  VARIANT 38: note = Ancestral polymorphism is R, Derived polymorphism is L
  VARIANT 141: note = Ancestral polymorphism is K, Derived polymorphism is N
  VARIANT 145: note = Ancestral polymorphism is G, Derived polymorphism is S
MASCLLALVLIVAFVSLVVYLALRPSKPSFYLQDLQLRRPISLGDPSLTASAQVTLASRNPNDRVGIFYKRLDVFVTYRDEAVTVPVSLPPQYQGHRDFTVWSPVLSAESVPVAAYVADAMKQDVAAGFVALQVKVDGRVKWKVGSWVSGSYHLFVSCPAVLSAGYPGVNNTVTSLKFAQPTGCSVEV

SEQ ID NO: 12455 - protein, 601 aa, Zea mays
  VARIANT 255: note = Ancestral polymorphism is G, Derived polymorphism is S
MQGLAPPTSVSIHRHLPAGSRARASNSVRFSPRAVRSVPHECLQAPFHADLPAPSKKPTAIAVPRHAAAPRKSGGGGGKKQLNLFQRAAAAALDAFEEGFVANVLERPRGLPSTADPAVQIAGNFAPVGERLPVHRLPVSGRIPPFISGVYARNGANPCFDPVAGHHLFDGDGMVHALRIRDGVAESYACRFTETARLTQERAVGRPVFPKAIGELHGHSGIARLALFYARAACGLVDPSAGTGVANAGLVYFNGRLLAMSEDDLPYHVRVADDGDLETVGRYDFDGQLGCPMIAHPKLDPATGELHALSYEVVRRPYLKYFYFRPDGTKSDDVEIPLAQPTMIHDFAITENLVVVPDHQVVFKLQEMLRGGSPVVLDREKTSRFGVLPKRAADASEMAWVDVPDCFCFHLWNAWEDEATGEVVVIGSCMTPADSIFNESDVRLESVLTEIRLDARTGRSTRRAVLPPSRQVNLEVGMVNRNLLGRRTRYAYLAVAEPWPKVSGFAKVDLATGELARFEYGEGRFGGEPCFVPMDPAAAHPRGEDDGHVLAFVHDERAGTSELLVVNAADMRLEATVRLPSRVPFGFHGTFITGAELEAQA

SEQ ID NO: 12456 - protein, 180 aa, Zea mays
  VARIANT 138: note = Ancestral polymorphism is G, Derived polymorphism is A
MSPWWKPLLLATAALAALLAADATVDTTCKAAAATDDRVDYGFCVSELSKHRDSPGADAWGLAKVAANLGVNNAGGAVRDAEALLAGQPGAGADGAKARAALGQCRRLYFDMELALAGAYDEIDAREYAAGKEMAVEGIALARRCDAVFAEAGMPSLLARRAEYAQQITVLCIAITDLIE

SEQ ID NO: 12457 - protein, 179 aa, Zea mays
  VARIANT 23: note = Ancestral polymorphism is G, Derived polymorphism is S
  VARIANT 19: note = Ancestral polymorphism is V, Derived polymorphism is L
MRPSTAGALAAAALVATLLLSVGATPETTCAAAAARDRRVDYGFCVSRLSHHHDSPDADTWGLAKVAADVGVATAGDAVYDIKALLAKPPPDAQARAALEQCQRLYDAAEMAFAEAYDGINRRDYAAGKGKAAEAAALARRCDDAFARAAVRPPPQVARWGEESSKIAVVCTAITDLIG

SEQ ID NO: 12458 - protein, 116 aa, Zea mays
  VARIANT 25: note = Ancestral polymorphism is C, Derived polymorphism is R
  VARIANT 27: note = Ancestral polymorphism is P, Derived polymorphism is T
MGLRRKRGEIHQINLWRSTSVLLARGPGKPFTYRGLCQKQQCGWYGGNELDIVHLDGSELDIVHPFSKLNETTGYKPHNPSGLSSAAARSKSRLTLAHPALVCIGEFWSIVTTGDW

SEQ ID NO: 12459 - protein, 130 aa, Zea mays
  VARIANT 50..130: note = Derived polymorphism lacks residues 50 to 130
MNSNVCILVRSLMNLFLGFLSYNIMVSKPVVLVFLLVVLIITSQFEWKQQLVNELESTARNQKHVSSREELVKDQIIFTQEKMIQRLNNFVRNLQQQLVQCRGNNRTVNRSGTSLTSYISEIQMPQMMDD

SEQ ID NO: 12460 - protein, 669 aa, Zea mays
  VARIANT 138..669: note = Derived polymorphism lacks residues 138 to 669
MSDFDEQDDIFLETSDDTRSSAYFSARCSTSEQLSASWGPEDELWTSELLSVNERRHRFLVRMGFAKPIPTGITFSQWQGEILADRAFRDLEDRINSICSSYRPSFSHGASAPDSTRNSVVLELDEIEHHELTGILDEVGTDRTMNTNQSDGFPSFPQLVHLFLQKGSGRSPARGMEIEFSEKQNDPKSFCGRFKRKEEEDIICMHDTRMKSLKSGTLFATKVDQQNKKWMDFSALYMCQEIHAHGGSISVMKFSTSGRYLASVGEDCVVRIWRIHEVESSPDLYIRETPVKSMDRNMGLKMKVGKGRGRALAIIPRKVFNIAETPLHEFHGHTSDILDMTWSKSNFLLTSSKDKTVRMWKVGCDDCLAVFKHRDYVTCIQFNPVDEGYFVSGSIDGKVRVWDVSERRVVDWADAKDIITAVGYQPDGQGLIVGIAAGRCRFYNHAGENVELEKVLKVTKKKSAGRQITSLQFSCGDPARILIASAGSKIRVSDGGAKINRKFEGRRGSKVLVPPSLTSDGQYLVSAGADSNVYIWDLDRPARGKSRTRGPRRVRSCEHFFSEGVTSVATWPGLAHQQEDLQSPEKGAAPTLCRDRELCSFGTWFSADGARGAATWPEEKLLPSLRYVNCAGMDDCRAKVSAAWNKVVVTGGSDGVIRCFHNYGLPVKL

SEQ ID NO: 12461 - protein, 192 aa, Zea mays
  VARIANT 29: note = Ancestral polymorphism is M, Derived polymorphism is T
MQAGPSDPQRFLFILVGNKIDLDGGSKRMVPEKKAREWCASKGNIPYFKTSAKEVHNVDTAFLCIARLALEHEHDQDMRSFNTLDTWHDEFLNQAGPSDPQRFPFILVGNKIDLDDGSKQMIRNTLQSLCLSRRKAREWCASKGDIPYFETSAKEDHNVDTAFLCMARLALEHEHDQDMLPNPGHSQIDLQF

SEQ ID NO: 12462 - protein, 206 aa, Zea mays
  VARIANT 195..206: note = Derived polymorphism lacks residues 195 to 206
  VARIANT 151: note = Ancestral polymorphism is K, Derived polymorphism is N
  VARIANT 143: note = Ancestral polymorphism is P, Derived polymorphism is L
  VARIANT 141: note = Ancestral polymorphism is P, Derived polymorphism is L
  VARIANT 137: note = Ancestral polymorphism is G, Derived polymorphism is C
  VARIANT 131: note = Ancestral polymorphism is S, Derived polymorphism is N
  VARIANT 130: note = Ancestral polymorphism is S, Derived polymorphism is N
  VARIANT 125: note = Ancestral polymorphism is K, Derived polymorphism is R
  VARIANT 107: note = Ancestral polymorphism is A, Derived polymorphism is T
  VARIANT 102: note = Ancestral polymorphism is R, Derived polymorphism is C
  VARIANT 90: note = Ancestral polymorphism is P, Derived polymorphism is L
  VARIANT 84: note = Ancestral polymorphism is S, Derived polymorphism is L
  VARIANT 79: note = Ancestral polymorphism is S, Derived polymorphism is F
  VARIANT 62: note = Ancestral polymorphism is A, Derived polymorphism is V
  VARIANT 25: note = Ancestral polymorphism is G, Derived polymorphism is E
  VARIANT 16: note = Ancestral polymorphism is G, Derived polymorphism is D
  VARIANT 1: note = Ancestral polymorphism is M, Derived polymorphism is I
MASTATTKRCTNLACGVPPSMVGIGGRVGRCRLQLLGASHSRPSPPSYPLRPSLPQSSVAVAVSNSCNIVDLHRRGMYSDVETLWTAPELARRFTIYLVGPRVLYCADEAVDLLRSGDNHHVEFKSMKGSSLLYWECCLYLVPDSRHAIFNDTTLKLKEKNILSRVVLYVIAMVDYDQDGADPCEKLTTTMEGIQTIALYSSSIGR

SEQ ID NO: 12463 - protein, 408 aa, Zea mays
  VARIANT 197: note = Ancestral polymorphism is V, Derived polymorphism is E
MAWKEVDRRRHPRIEVKTEQQHLGGHRLSRGRGPSEDRGRRTWHSRGGRYGGRPFHGAFRAPQDFAESSEGGGSRVREEAEKKRAAVDGPAADDQGNKRKEKLCCELCEMDHTPQVCPTFNGPKPHALLCGFAGGDSGFFQIPTSGAKGMAPKKDNATTFITAMEGNITTDLVKAELARLIPVNWTWSVQQHADGFEVPFPCNVELQRMIAMKYVHTAGGEGIMVIQELDQKIEPVQYLQKVWVNVYGVPYEIRSFLPLWVVGTIIGATQKVDLRYTRKMGVVRILVGVIDVDSIPESSDIVVGEGLYEIYFKVDKVCKDGVWMGYKQEVTKDKGDDDEQDEEFDGLDEYIHKTDAAFQDTEMEDKSTNNNGNPKTTMMAVCNINTTMRNMIPKIVRLCIMTMKLLQS

SEQ ID NO: 12464 - protein, 508 aa, Zea mays
  VARIANT 59..508: note = Derived polymorphism lacks residues 59 to 508
  VARIANT 100..508: note = Derived polymorphism lacks residues 100 to 508
MSDTELSQSTVVFGLRMWVLVGIGVGAAFVLLLVLISVLCLLAFRRRRRRRQRPANPAQQLPTTAPPKNPTNAKAPKDIQEVPSHAAAAAPAKTPLALAQVLQLPTPPVSEQLVTGKEHHVTHPEQQQHPSHRSDGPSPHGNGESRGGAAERAPPAVPEVSHLGWGHWYTLKELETATGMFADGNVIGEGGYGIVYRGVLENGTQVAVKNLLNNRGQAEKEFKVEVEAIGRVRHKNLVRLLGYCAEGNQRMLVYEYVDNGNLEQWLHGDVGPRSPLAWDDRMKIILGTAKGLMYLHEGLEPKVVHRDVKSSNILLDKQWNAKLSDFGLAKLLGSERSYVTTRVMGTFGYVAPEYAGTGMLNETSDIYSFGILIMEIISGRVPVDYNRPPGEVNLVDWLKTMVSTRNSDGVVDPKIPKKPSSRALKKALLVALRCVDPDALKRPKISHVIHMLEVDDFPYRDDRRGTRAPGQARLPETPAGGSGRPETDSSGNGGSTQAEPFRWRNPEA

SEQ ID NO: 12465 - protein, 328 aa, Zea mays
  VARIANT 195: note = Ancestral polymorphism is A, Derived polymorphism is S
  VARIANT 169: note = Ancestral polymorphism is D, Derived polymorphism is Y
MAAASSPTFPPPATDVAAPGVPDLSIPYDLATRGQWQALFSHLSHPAHTPHPHHRLLLSALSALCLAKLRRFPDAAALLASLHPDPACPPPPFLIRLLHALLPLFLPDRPLALDRLYTLLSSVRARPNAGHPEWRRRDALVASVLAADHLAHREFDVALALLADIAGRYPGDPVLLSRLAYAHLQIGNLGAASAAFRHVESVAAASEDPTRHANLLARNRALECIVGKDYAAAVREYERCIEADPADAVALNNKALCLMYSRDLGDAIKVLEGALERVPTAALNETVVVNLCSMYELAFVNHGEVKRSLAEWIARVAPDDFDTSCTRM

SEQ ID NO: 12466 - protein, 559 aa, Zea mays
  VARIANT 253: note = Ancestral polymorphism is E, Derived polymorphism is G
  VARIANT 40..559: note = Derived polymorphism lacks residues 40 to 559
  VARIANT 17..559: note = Derived polymorphism lacks residues 17 to 559
MELAVGGGMRRSASHTSLSESDDFELTRLLSKPRINVERQRSFDDRSLSDVSHSGGYGRGGFDGMYSPGGGLRSLVGTPASSGLHSFEPHPIVGDAWEALRRSLVLFRGQPLGTVAAVDHASEEVLNYDQVFVRDFVPSALAFLMNGEPDIVKNFLLKTLLLQGWEKKVDRFKLGEGAMPASFKVMHDAKKGVETLHADFGESAIGRVAPVDSGFWWIILLRAYTKTTGDLTLAETPECQKGMRLILSLCLSEGFDTFPTLLCADGCCMIDRRMGVYGYPIEIQALFFMALRCALQMLKHDNEGKEFVEKIATRLHALSYHMRSYFWLDFQQLNDIYRYKTEEYSHTAVNKFNVIPDSIPDWLFDFMPCQGGFFIGNVSPARMDFRWFALGNMIAILSSLATPEQSVAIMDLIEERWEELIGEMPLKICYPAIENHEWRIVTGCDPKNTRWSYHNGGSWPVLLWLLTAACIKTGRPQIARRAIDLAERRLLKDGWPEYYDGKLGRYVGKQARKFQTWSIAGYLVAKMMLEDPSHLGMISLEEDRAMLKPVLKRSASWTN

SEQ ID NO: 12467 - protein, 446 aa, Zea mays
  VARIANT 122: note = Ancestral polymorphism is S, Derived polymorphism is F
  VARIANT 95: note = Ancestral polymorphism is G, Derived polymorphism is V
MEHLRWRPTVNERDFIECALQSDLRVDGRHSFDFRKLKITFGREDGSSEVQLGETHVMGYVTVQLVQPYRDRPNEGTLAIFTEFSPMADPSFEPGRPGELAIELGRVIDRGLRESRAVDMESLCVVAGKHVWSVRVDLHILDNGGNLIDAANIAALAALSTFRRPECTVGGDDGQQVTVHDPEVRDPLPLTIHHMPIAVTFAYFGEGNIVVLDPTYKEEAVMGGRMTAIVNSNGDVCAIQKAGGEGVMSSVIMQCLRIASVKAADITSKIKKAVDSYTTEKALKKVKRLPTSVPQKINVTNVTMDGKGDGELEKQSVQMHSDVQQISKGDENQQSIKRNSPLTRDRIAKHKQTSTFIGGPSNWDPYSKGVTLRSLKISDLPDPPTMVKASSREDAQPMTESSNAEVNTSSAVAAGESESHEIGSPKSLKDAIKPKHKRKKKKSDRS

SEQ ID NO: 12468 - protein, 478 aa, Zea mays
  VARIANT 453..478: note = Derived polymorphism lacks residues 453 to 478
MAGGGAAYQSSSASPDWLNKGDNAWQMTSATLVGLQSMPGLVILYGSIVKKKWAINSAFMALYAFAAVWLCWVVWAYNMSFGDRLLPFWGKARPALGQRFLVAQSQLTATAVRYRDGSLEAEMLHPFYPAATMVYFQCVFASITVIILAGSLLGRMDIKAWMAFVPLWITFSYTVSAFSLWGGGFLFQWGVIDYSGGYVIHLSSGIAGLTAAYWVGPRSASDRERFPPNNILLVLAGAGLLWLGWTGFNGGDPYSANIDSSMAVLNTHICASTSLLMWTLLDVFFFGKPSVIGAVQGMITGLVCITPGAGLVQGWAAIVMGILSGSIPWYTMMVLHKKWSFMQRIDDTLGVFHTHAVAGLLGGATTGLFAEPVLCNLFLAIPDSRGAFYGGDGGSQFGKQIAGALFVIGWNIVITSIICVLIGLVLPLRIPDAQLLIGDDAVHGEEAYAIWAEGELNDVTRQDESRHGSVAVGVTQNV

SEQ ID NO: 12469 - protein, 386 aa, Zea mays
  VARIANT 161: note = Ancestral polymorphism is I, Derived polymorphism is S
  VARIANT 337: note = Ancestral polymorphism is K, Derived polymorphism is M
MGVPDPEKWFILGRVVVVRHYKKALDSSSLDLRLPLTRTPPRISRLAAVTRVQVERGQLSIVATSNSVLLLHELERPSEPNSPNIFFLALDPMLDERAFAAGRRVFEVAATRLLDRHPELPHFSGVRNVGFIELCRGGTCVFVVAELQATNRQANNSVPFITCCFSGDGNDTWDQMELVWPVLDDEAHPQWINHAVIAHDKKLWWVNLSRGLVAWDPVPVQHAEPRLEFVPLPVLDGFEDRQEPPEQIDRYRTVGVSAGQMRFVDIVRRRNDPLEDTLVVVWTLDLPQMRWRGYPRVTTLANIWNNASYVPMPRGVVPVVALLHPNEPDVVYFFLGKYVFSVDVNRSAVVHFAVMPNQQDGVPRPINQRDVLSWKQAPFLENVTLD

SEQ ID NO: 12470 - protein, 443 aa, Zea mays
  VARIANT 44: note = Ancestral polymorphism is R, Derived polymorphism is C
  VARIANT 49: note = Ancestral polymorphism is L, Derived polymorphism is Q
  VARIANT 74: note = Ancestral polymorphism is T, Derived polymorphism is I
  VARIANT 154..443: note = Derived polymorphism lacks residues 154 to 443
MATLSSSLCSSFASLRTASIGHPRVITSSTPSCLKPLLTKKKYRYDIALLLDKVLQMYSSALVQGAPNPRRIIIRAIDPTLAVVAYRRGQCDDELINVTNKNSLFKLQARYVVERMDGDLWDKVLQPENEYRRQLIDQVVSTALPESKSPEQVQNLLILTAKAQLREGLVSEAIESFIRVDDAAHFLDVIRAAKEANVYNDLVKYLLMVRQKAREPKVDGELIFAYAKIDMLSDIEEFILMPNVANLQNVGDRLYDEELYEAAKIIYAFISNWAKLAVTLVKLKLFQGAVEAARKANSAKTWKEVCFACVDAEEFRLAQICGLNIIIQVDDLEEVSEYYQNRGCFNELIALMESGLGLERAHMGIFTELGVLYARYRSEKLMEHIKLFSTRLNIPKLIRACDEQQHWKELTYLYIQYDEFDNAATTIMNHSPDAWDHMQFKDR

SEQ ID NO: 12471 - protein, 386 aa, Zea mays
  VARIANT 242: note = Ancestral polymorphism is Q, Derived polymorphism is L
MGVPDPEKWFILGRVVVVRHYKKALDSSSLDLRLPLTRTPPRISRLAAVTRDQVERGQLSIVATSNSVLLLHELERPSEPNSPNIFFLALDPMLDERAFAAGRRVFEVAATRLLDRHPELPHFSGVRNVGFIELCRGGTCVFVVAELQATNRQANNSVPFITCCLSGDGNDTWDQMELVWPVLDDEAHPQWINHAVIAHDKKLWWVNLSRGLVAWDPVPVQHAEPRLEFVPLPVLHGFEDRQEPPEQIDRYRTVGVSAGQMRFVDIVRRRNDPLEGTLVVVWTLDLPQMRWRDYPRVTTLVNIWNNASYVPMPRGVVPVVALLHPNEPYVVYFFLGKYVFSVDVNRSAVVHFAVMPNQQDGVPRPINQRDVLSWKQAPFLENAQQG

SEQ ID NO: 12472 - protein, 774 aa, Zea mays
  VARIANT 124..774: note = Derived polymorphism lacks residues 124 to 774
MAAAAPAAGKGKRKRHLSEDDVCLLQRYNPGTILTALQEVAQHAEGRIIDWRAVVAKSATGITSAREYQMLWRYLAYHHDLNESIEAGDLPLGDDSDLELELEPNPSETKEALSEASALAKDEREAPACVALPAIFQYLILPRSSIRKCLEHIHLFALISRSSREQASGHRINLDVPALNTQNEKIVRVPSKQLAQSHRVTNVTCPVSNPKQLSHIVPSPTHLDPNGASKKRKKAKAWSKEEDADLAAGVQKYGEGNWERWALKRPGGSTKPASTKHASVGSEERSATIKALHLAVGPMPVSSALRSGREQSIQHKSTAFAPKMPQVRSAVTPSLAPALALPVQPLRVAAEVQSPLRHGQQAPGQGAPPKLSNASNNTRKKQAALPNSTFSPSSIQAAAIAAGGRLATASTAANLLKAAQSKNAVHIRSLGATSLKSSASFDHGTQSGGSQHLESLNASAVNGVSGVSAVNQSGPPAGAETKKALGTTLAPVPCDSEENEDGSEFCAITLDDLFPEDAKQPETVDTKAKQPETTGPKAKQPENADPKAMHQETMDPKSKQPDTLKVGILDPKDKDMLEFDQYVASQGAHLNTDDLNKSKCTNSASQAQGLVGSQKNPLKLTPVDGKANPVTAAGRGKPVAAGVASTGKKATIPISHLAAGTPRGIVDTVNANAPIRRTLTRRAAALVPAGCQAPPPKHAIDAKGCQMTNSIATFVSSGVPASSQASTPAKDANKASPPSSSCQPKPDSVAVNGAIRAVKSVAKKGNLPAAAARQ

SEQ ID NO: 12473 - protein, 580 aa, Zea mays
  VARIANT 24: note = Ancestral polymorphism is N, Derived polymorphism is H
  VARIANT 135: note = Ancestral polymorphism is S, Derived polymorphism is Y
  VARIANT 225: note = Ancestral polymorphism is S, Derived polymorphism is I
  VARIANT 233: note = Ancestral polymorphism is H, Derived polymorphism is Y
MPAAVAAAAAAASAGAVLLCLLLNCRPQPALDAQRESERGEDEASPLLSGSGPGSDREEEEPWPDRAPVTCCEAAAVAARTARRTWELTVGRWGLHGLAFGIKRHMKRQGNLQHEYSGNDCLQLKGHQTYTEVSSLLEHLKLCMFFSKKSFSAFLKFGGYKQEDILIHKARARLMQPSFALVCDKRTKCLLLFIRGAISTKERLTAATSAEVPFHHIILSEGKISNVVLGYAHCGMLAGARWIAKLVIPHLHNKMQEFSGYHIKVIGHSMGAGIGAILTYILHEHYEFLSCSCLAFAPPACMTWELAESGKDFITSLVNRNDVVPAFSKVSSESLRSEVMVSSKLDDVQDHFHHGLFATISQRVAFIRSHMLSISHSTGKIADYGSSISEPLLKDTIPPTANGHGVDCSQQQQVVASEETVVVLVNNNDHFTSLKAADSGVTSQEGSDSNAASSDSPQRPPPPADEAPNQNGTGKDKQKEPVSAGCSSSRQLFPPGRIIHMVALPPQQPDPNSDDGTSSGEVVGIYETPRGLYGKIRLAPNMIKEHYMPSYIRTMESLLEQLQKDDDDGSVCTCTAPSDL

SEQ ID NO: 12474 - protein, 420 aa, Zea mays
  VARIANT 334..420: note = Derived polymorphism lacks residues 334 to 420
  VARIANT 6: note = Ancestral polymorphism is R, Derived polymorphism is L
MAMALRRLLLPLLLLVLLGLRPQSCVASGGGGGEPAEFEIPRDGSVLELDESNFEAAVRAAEFLFVDFYAPWCGHCKRLAPQLDEAAAVLAGLSTPVLVAKVNADKYKKLGSKYGVDGFPTLMFFDHGVPSEYTGSRKADVLVENLKKLVAPDVSVLESDSSINGFVQAAGINFPLFIGFGMDESLIVEYGAKYKKKAWFSTAKDFSEDVMVVYDFDKVPALVSVNPKYNEQSVFYGPFEGTFLEDFIRQSLLPATVPINRETVKLLKDDGRKVVLTILEDESDESSLQLIKVLRSAANANHDLVFGYVGVKQWEEFTETFDVKVSQLPKIVVWDTKEEYEVVEGSESFIEGDYGSQVSRFLEGYREGRTTKKKVGRGSPTLLGLNAVYILVLLVAVLVVLMYFSAQGEEDHQPRRAHED

SEQ ID NO: 12475 - protein, 97 aa, Zea mays
  VARIANT 73: note = Ancestral polymorphism is L, Derived polymorphism is V
MATALGLGARSGLRLLSAGAEAASATSSRAFHSTGTRRMGAHAHDEPYYVHAKHMYNLHRMKHQQLKVCLAVLAAVGTGIGVPVYAVVFQQKKTASA

SEQ ID NO: 12476 - protein, 143 aa, Zea mays
  VARIANT 19..143: note = Derived polymorphism lacks residues 19 to 143
MNRSSPPPPRSSGGSSAPQDSLTYGDNDLNYIDWPGIDNFEDVDTLFRRSDFTYDQQQLENTDGLSWLPSSNVVYSSNVALQQGFDSSYSNYDILDDLSAFQCAEDKSLPSVGPSSDLCDNQLNDTYLFSEQKNVNAYGEQAS

SEQ ID NO: 12477 - protein, 287 aa, Zea mays
  VARIANT 247: note = Ancestral polymorphism is G, Derived polymorphism is R
MARKKVTLQWIANDSTRRATFKKRRKGLMKKASELATLCDVDACVVVYGDGESQPEVWPDDVAKAAQVLARFKAMPELDQCKKMMDMEGFLNQRIDKLREQLRKARRENHERETALLLHDAIAGRRPGLAGLSVEEIAGLGWMVENRLNGVKDAIERLQAATAGKGGQDVVLPDPATATTNLQLQLPQVSLLPLVPYSVDAPAEHGHAGVVHEAAAQPQAPSWLMEVAKAGGDLGALVYSGFGGGRGSFGGAGGTSVGVVADMLPHLGNLGAGFGWADPGLSPFPPI

SEQ ID NO: 12478 - protein, 654 aa, Zea mays
  VARIANT 29..654: note = Derived polymorphism lacks residues 29 to 654
  VARIANT 13..654: note = Derived polymorphism lacks residues 13 to 654
MGGVCSAGIAGDKSPTELSFRAMGFVVEQDFKAFSAAGKNRTAPVEEAVDPNQVSDQSFRFSDKGSPPSTSGKVHRSVSKEAKTGKPRRSASGKAGPSKVSDIGTVLGRKSTSGLGKAVEVLDNLSSSMSSLSPGGGFVAGPTTKGNKISILAFEVANTIVKGMSLMQSLSKESLNYLQDMVLLSEGVQRLVSSNMGYLMRIAAADKRFANRQELRIFSQEVIRFGNRCKDPQWHNLDRYFSKLESEITPQPQLKETAKADMQQLMALVRHTGDLYHELHALDRFEQDYRRKLEEEKRSVTSERGDTVQIIRQELKSQRKHVHNLKKKSLWSKPLDSVMEKLVDIVHFLHVEIQDTFGPCVGESSESQESRQTLGSAGLSLHYANIISQIDNIVSRSSVPPQSTRDALYQSLPPNVKSALRTRLITPTESQEVPITRTRSSMEKTLQWIVPVANNTARAHHGFGWVGEWANTGNDPAQKQAGQPGALKIETLYHADKEKADACVLDLVVWLHILISYSRPANRSPSRSPVRSPTHAAPRVVVAAAATSGRPAGLTREEREMLQDAYTRRRSPGAGKSKSQELAAARGNRVALSRNDRLSKSGPSSREHGGRVFPLATGRSAAASSPVAVGFDIDRIKALEDVVDRVDAQKQTRL

SEQ ID NO: 12479 - protein, 635 aa, Zea mays
  VARIANT 379..635: note = Derived polymorphism lacks residues 379 to 635
MASAAGAAFAAITLLILVPLTAASDSDHKYQAAEPVTLWVNKVGPYNNPQETYNYYSLPFCHASENHVHKWGGLGEVLGGNELIDSQIDIKFGKNVDKATICSLDLDLVKAKQLSDAIENSYWFEFFIDDLPLWGFVGEADRNNDNKYFLFTHKNIVIRYNGNQIIHVNLTQESPKLIDVNKALDMTYSVKWEPTNITFAHRFDVYLDYPFFEHQIHWFSIFNSFMMVIFLTGLVSMILMRTLRNDYAKYARDDDDIETLERDVNEESGWKLVHGDVFRPPCNLVLLSALVGIGTQLAALILLVILLAIIGMLYIGNVMFEDMHQEKFDSCSLCVCEELLSQHSLFAMLLLHSSLDMSVVHYTHVMEVWAYLSCKIELYTYSSIRCSVVLNPFGGGAGKNWIKAMAMTASLFPFMCFGIGLVLNTIAIFYGSLAAIPFGTMVVVFILWAFISFPLALLGTVVGRNWSGAPNNPCRVKTIPRPIPEKKWYLTPSVIALMGGLLPFGSIFIEMYFVFTSFWNYKVYYVYGFMLLVFLILIIVTICVTIVGTYFLLNAENYHWQWTSFFSAASTAVYVYLYSIYYYHMKTKMSGFFQTSFYFGYTLMFCLGLGTLCGAVGYLGSTLFVRRIYRNIKCD

SEQ ID NO: 12480 - protein, 112 aa, Zea mays
  VARIANT 21: note = Ancestral polymorphism is V, Derived polymorphism is L
  VARIANT 2: note = Ancestral polymorphism is A, Derived polymorphism is V
MASGGLAAASEVAVVFLIRPVLAIAFVFTLILLSWYVAWRTVLVHVPLVQEIAGLRPKKPSKPKPANRGRFAKFYQNQAEAAQRSKLYLRTTTQAFFSFCSSGCFSADSCGN

SEQ ID NO: 12481 - protein, 419 aa, Zea mays
  VARIANT 311: note = Ancestral polymorphism is L, Derived polymorphism is I
  VARIANT 298: note = Ancestral polymorphism is E, Derived polymorphism is K
  VARIANT 248: note = Ancestral polymorphism is R, Derived polymorphism is W
MRLPLLPRSPPLAAAAAAAAMPPRRRRVVKATPLKPSSPQLSSTPPPTPSVEVPKTEPPDHHDPTPSARRRLPLAAGAVEAQEEWHPLPLSTADLSLPLTLPTGQTFLWRRTSLSPLRFTGAVGSHLVSLSHLPDSDDGRLAFLLHNDGGCPASSLPAARAALLDYLNAAVSLADLWRQFAAADERFADVSARLGGGGARVLRQDPVECVFQFLCSSNNNIARIEKMVWTLAGYGERLGEVGGFVFHRFPTIERLARVSEQELREAGFGYRAKYIVGTAKELQAKPSGGQKWLASLREKELSDVIEALCTLPGVGPKVAACIALFSLDQNHAIPVDTHVWKVATQYLLPELAGKSLTPKLSVVVADAFVTRFGSYAGWAQNVLFIGQLPTQKVVVAQVTSDNGTTKPTKRKRRVQPEPC

SEQ ID NO: 12482 - protein, 175 aa, Zea mays
  VARIANT 42: note = Ancestral polymorphism is S, Derived polymorphism is P
  VARIANT 44: note = Ancestral polymorphism is G, Derived polymorphism is D
MYPAKPAASSSQPAAEMAQPVVGIPISSPGAVAVGPVVGKWSSGLCACSDDCGLCCLTCWCPCITFGRIAEIVDRGATSCGVAGTIYTLLACFTGCHWIYSCTYRSRMRAQLGLPEACCCDCCVHFCCEPCALSQQYRELKARGFDPDLGWDVNAQKAAAAAAMYPPPAEGMMIR

SEQ ID NO: 12483 - protein, 185 aa, Zea mays
  VARIANT 81: note = Ancestral polymorphism is E, Derived polymorphism is V
MWGKGKKRFGGGGSGEPAAKRQAARDDGPSESAEDGTVVAEISKNKKVSVRSWKGRVFVDLREFYFKDGKTLPTRKDRRREIQSKHDVTLSVASRTEHLTASCRRPMQWWWGDEGRDAALNDAAGESHCAATLPEVHTPSILALIDFAMYLDHYVNLKRISLQLDQWKILKDNIKAINEAIEENT

SEQ ID NO: 12484 - protein, 226 aa, Zea mays
  VARIANT 55: note = Ancestral polymorphism is P, Derived polymorphism is S
  VARIANT 97: note = Ancestral polymorphism is H, Derived polymorphism is R
  VARIANT 102: note = Ancestral polymorphism is A, Derived polymorphism is V
  VARIANT 125: note = Ancestral polymorphism is A, Derived polymorphism is V
  VARIANT 136: note = Ancestral polymorphism is A, Derived polymorphism is V
  VARIANT 158..226: note = Derived polymorphism lacks residues 158 to 226
  VARIANT 172: note = Ancestral polymorphism is T, Derived polymorphism is P
  VARIANT 186: note = Ancestral polymorphism is P, Derived polymorphism is S
  VARIANT 205: note = Ancestral polymorphism is S, Derived polymorphism is L
MEGGVVLLNCSVSPFGNRVRIALKLKGVVYEEKAENLAAKSPLLLSSNPVHAKVPVLIVGGKPVCESLVILEFIDDAFSSTAGELRLLPADPYARAHARFWASYVDTKLNDCAMRVWRQPKGAAAAVEAAAKDTVAALKTLEAELGGKPYFGGDALGYIDVALVPFAPWFLTYERFGGFGVAAECPALAAWAERCVRENQCVAESLPEAEHVFQFVCGMRKAFGLD

SEQ ID NO: 12485 - protein, 659 aa, Zea mays
  VARIANT 605..659: note = Derived polymorphism lacks residues 605 to 659
  VARIANT 562..659: note = Derived polymorphism lacks residues 562 to 659
  VARIANT 543: note = Ancestral polymorphism is T, Derived polymorphism is M
  VARIANT 509: note = Ancestral polymorphism is G, Derived polymorphism is E
  VARIANT 501: note = Ancestral polymorphism is S, Derived polymorphism is Y
  VARIANT 492: note = Ancestral polymorphism is P, Derived polymorphism is L
  VARIANT 406..659: note = Derived polymorphism lacks residues 406 to 659
  VARIANT 344..659: note = Derived polymorphism lacks residues 344 to 659
  VARIANT 187: note = Ancestral polymorphism is R, Derived polymorphism is C
  VARIANT 109: note = Ancestral polymorphism is A, Derived polymorphism is T
MVRLEEELRHLMVRHAVPIDLTSLFFSLRRLSLESMDDLDTCPDFDAVTPHSLDATPAGPETARGASLGSNPFEDQVFDPILSFGGAVAVCPRSPEKVPWVLDMYEALAEVIPEMKDLCIGRCSRDGVISDVQAILDRLGDAMWGSGTLGENDPFWKASSEADILPGGQFARVYHYFAASEIYNAIRVFIACYVWMTGFGNFSYYYIKKDFSIARFAQMMWRLNFFVAFCCIVLDNDLMLYYICPMHTLFTLMVYGSLGLFNKCNEVPSIMAIKIACCFLSVILIWEIPGVFELLWGPFTFLLDMDLYYPDHPLRLSTPPLSQPSDCLASLPLRSFVSIASGRQLLNIPSYVARSRLGTPAQALLVAIDPSNDAAWVPCAASAGCARASSFDPTRSSTYRPALLGQDALALHDDVDVVAAYTFGCLRVVTGGSVPPQGLVGFGCGPLSFPSQNKDVYGFVFSYCLPSYKSSNFSSTLRLGPAGQPKRIKMTPLLSNPHRPSLYYVNMVGIHVGGRPMLVPASALAFDPASGRGTIVDAGTMFTRLSAPVYAAVRDVFRSRVRAPVTGPLGGFDTCYNVTISVPTVTFSFDGRVSVTLPEENVVIRSSSDGIACLAMAAGPSDGVDAVLNVLASMQQQNHRVLFDVANGRVGFSRELCTT

SEQ ID NO: 12486 - protein, 729 aa, Zea mays
  VARIANT 6: note = Ancestral polymorphism is P, Derived polymorphism is L
  VARIANT 394..729: note = Derived polymorphism lacks residues 394 to 729
  VARIANT 470..729: note = Derived polymorphism lacks residues 470 to 729
MPFWWPRRRSRPSSKRKDGPVPASASASCSPRYSVVVPPTAYASASASPSAQWERAWTRSLVSLAPRGAADRAAAAAVTLCGGGGSGPGGATAGLGRALPLPRPVYKSAPVSSGSSSDSDEVVDNTNFRCADPFVYPGARTVPPDAHKRTAEEKHLLSCSAPPPREHQKFFEVPVTNARKVHLQSYEAATSGTTLRGRMFHKNTRARTRSLSPGPRGHDFASSFASPRDVGVSSRSVVKRMDDLNSRSQPFFASSLSQPLPRPPAHIASCLIPSSPIASAQSQSQWKKGKALGSGTFGQVYVGFNSESGKFCAIKEVKVILDDSKSKERLRQLNQEVDMLRQLTHQNIVQYYGSELTDEALSIYLEYVSGGSIDKLLKYYGPFKEPVIRNYTRQILSGLAYLHGRKTVHRDVKGANVLVGPNGEVKLADFGMAKHITSLAEIHSLRGSPYWMAPEVIMNKNGYSFEVDIWSLGCTIIEMGTGRHPWHQYEHVHAMFKIVNTKDMPEIPERLSKEGKDFLSLCLKRDPAQRPSATQLLRHPFVQDNQEISGAKCNTTLRNGLSSPAEACHKKVAYMLSNKEPSLKRSVAPLRDIGGIRARGFTGSSSACVSPHKTSRHSNLHLLTILLSGSSHHTQYLDFCHHPSCSRHIDVRANMSLPVSPCSSPLRQLKQWNWSCVASPSHLAFSSGSVAHNTVSDMQNQMRGSDPVPDPWRDISHRRQSPYDSPKRF

SEQ ID NO: 12487 - protein, 245 aa, Zea mays
  VARIANT 181..245: note = Derived polymorphism lacks residues 181 to 245
  VARIANT 29: note = Ancestral polymorphism is R, Derived polymorphism is C
MAASMAAAFTRYLSSPFPLPHPPDLGAGRRVEARANADGLVEAASALPPTVTVPTAAPSTMPAPDLGAGRRVEARAHAGGLAQAASALPPTVKGPMAAPSAMPAPNLRDRVVRDAPAVRRGAVDREAGDGGRGPLRREGSQGRRGGVGHGRGAFNLLQFRDGMARAATHPNALLSFSLGPRSCIGQDFTMLEAKATLALILRRFAFRVAPEYVHAPANFLTLQPSKGSPSCSSSWNQPSLSQSSG

SEQ ID NO: 12488 - protein, 460 aa, Zea mays
  VARIANT 323: note = Ancestral polymorphism is G, Derived polymorphism is V
MLPYFDPEYENFNQRINPPRVCIDNTTCSDCTLVKVDSMNKNGILLEVLQVLSDLDLHIFKAYITSDGGWFMDVFHVVDKQGQKITDDKTIKYIEKALGPESNLLGAKGSNSAGRSVGLHSIGDHTAIELKGPDRRGLLSEIFAVLADLQCNVLAAEVWTHRMRVACVVYVNDVATGQAIDDPDRVARVEDRLRHVLRGYGGGGGAGDDDDGSGAHANFAAASSTPHHVDRRLHQLMHADVDAVHGDGAHAAAGGEGDRPAVTVEHCEEKSYSVVNVKCKDRSKLLFDIVCTLTDMEYVVFHAAVSSEANYGIQELYIRRKDGKTLLKDEAEKVIRCLEAAISRRVSEGFTLEVCGRDRVGLLSDVTRVLREHGLTVSRADVTTAGGQATNVFYVRNPSGQPVDMKTVEGLRGQFGQTAMLNVKSVGVPAAVAKAAEPSSGSMVRSSFFSFGSLFAKLRA

SEQ ID NO: 12489 - protein, 102 aa, Zea mays
  VARIANT 4: note = Ancestral polymorphism is P, Derived polymorphism is S
  VARIANT 65..102: note = Derived polymorphism lacks residues 65 to 102
MLPPREELARALLEATTTPCAPPPREEHARALLEATTMPRAPPRKDTATRLGKVEGGKEEEREAYMRLAVTVLAGLARLPELAADEGVVSTMPLVAEVVTKS

SEQ ID NO: 12490 - protein, 230 aa, Zea mays
  VARIANT 5..230: note = Derived polymorphism lacks residues 5 to 230
  VARIANT 12: note = Ancestral polymorphism is A, Derived polymorphism is V
  VARIANT 77: note = Ancestral polymorphism is K, Derived polymorphism is E
  VARIANT 83: note = Ancestral polymorphism is R, Derived polymorphism is C
  VARIANT 96: note = Ancestral polymorphism is K, Derived polymorphism is N
  VARIANT 113..230: note = Derived polymorphism lacks residues 113 to 230
  VARIANT 156: note = Ancestral polymorphism is S, Derived polymorphism is F
MHPQQPGPRISALIVPSHTIAQWASTVDTSRFLIPGWVSFGSRSIVQQQHGNYVIARRSIQFISTTKNTAGHGRRPKKKVYHREPGLDRAMDLQKKPALLLCLCDLILAQKTGSLLVRDLEKEVGFVQKWNFLSLIERHPNIFHVSGGSASQEPISVTLTEKARKISSEEAEARELMEPILVRNLRKLLMMSMDCQIPLDKIELIQSELGLPNNFKRNLIPRYPDFFFNP

SEQ ID NO: 12491 - protein, 288 aa, Zea mays
  VARIANT 30: note = Ancestral polymorphism is G, Derived polymorphism is D
  VARIANT 79: note = Ancestral polymorphism is D, Derived polymorphism is N
MVFGQVVIGPPGSGKTTYCNGMSQFLSLLGRKVAVVNLDPANDALPYECAINIEDLIKLSDVMSEHSLGPNGGLVYCMDYLEKNIDWLEEKLKPFIEDHYLLFDFPGQVELFFLHSNARSVINKLIKKMDLRLTAVHLIDAHLCCDPGKYVSALLLSLSTMLHLELPHINVLSKIDLIENYGNLAFNLDFYTDVQDLSYLQYHLEQDPRSAKYRKLTKELCDVIDDFGLVNFSTLDIQDKESVGNLVKLIDKSNGYIFSSIDSSAVEFSKIAAAPLDWDYYRYPILVL

SEQ ID NO: 12492 - protein, 61 aa, Zea mays
  VARIANT 18: note = Ancestral polymorphism is R, Derived polymorphism is H
  VARIANT 17: note = Ancestral polymorphism is G, Derived polymorphism is V
  VARIANT 12: note = Ancestral polymorphism is P, Derived polymorphism is L
MRRVLPPDYLTPIKVDGRIAVCEGASEGVGLGHPIEYICLDLEAPNVCKYCGLRYVQVHHH

SEQ ID NO: 12493 - protein, 692 aa, Zea mays
  VARIANT 83..692: note = Derived polymorphism lacks residues 83 to 692
MASCAALVTGCILVACPPCVNRVRRKIQGSMFLQSQHNRVRPHFLGSHISQWFGCAPVGGHLTVAHAQGRSCLFRFAPKMTIQGLLLVLQGYPIMAETNDASPSSKLHTRLRLWEFPDCYVFEPIDGLADLYLSVSRTSGTMNLVQDLPSRGSTTKHKVQTVYGVIGVLKLAVGSYFVVITDRDCVGSYFGHAIFKVTGLKILPCNNAHNTTSTDQKKMETKFSELLDSAERTIGLHFSYDINLTLSAQRLHDLGDEYRALPLWRQAEPRFLWNGYLLEPLIENKLNQYLLPVIQGSFQNIQAEVGSEMVNVTLIARRCTRRIGTRMWRRGADAEGYAANFVESEQIMQSKGFTASYVQVRGSMPFLWEQIVDLTYKPSFDIVRQEEAPRVLERHFHDLQKKYGAVLAVDLVNTGGGEGRLRERYAKSIEPILSEDLRYVHFDFHRICGHIHFERLSQLYDQIKDYLQKHKYFLINDKGEKIEEQTGTTRTNCIDCLDRTNVTQSMIGRKILESQLQRIGVLGAGDTISKHPTFDTNYKILWANHGDAISIQYSGTPALKGDFVRYGKRTTQGILNDLRNALGRYYLNNFVDGTKQDAMDLLQGHYMTSVSRDMAVPSKAGLLQSYASFRLAFALVMGALMFMLMSLRQARNDVRHLLLSLMWAGLCIGITHFVRANGRTFTNQPRFHKSRH

SEQ ID NO: 12494 - protein, 214 aa, Zea mays
  VARIANT 1: note = Ancestral polymorphism is M, Derived polymorphism is I
  VARIANT 22..214: note = Derived polymorphism lacks residues 22 to 214
  VARIANT 79: note = Ancestral polymorphism is A, Derived polymorphism is G
  VARIANT 87: note = Ancestral polymorphism is R, Derived polymorphism is K
  VARIANT 91: note = Ancestral polymorphism is A, Derived polymorphism is D
MVMEEVVTDASRAEVDTSRPFQSVREAVEAFSERRQAGGNGSSASSSSVELGAPDPAADSPSSVMLECLKKLEEELAEAKDEMVELRQRQAQMEVAVSSLSVQFSKGLAVYSRLSKGKEVAVVVGEEDSARVRSDRWDESRAEEWVASLEYLPSLSEALAIKMVEDDLGHDSKAKKKKKSKNKAAGASRTKKHKSGISLQLVGGMLCTKKAKSR

SEQ ID NO: 12495 - protein, 231 aa, Zea mays
  VARIANT 13: note = Ancestral polymorphism is G, Derived polymorphism is D
MACPAQSMLSASGCIFLRSKPQAASQVRGGIIGGGRSSRPFLLTCNASSSPSPSSPAPAQEDPDCNEEECAPEKEVGSLSAEWLAEERTQVVGTFPPKKKGWTGLVEKDTAGQTNIYSVEPMVYVAESAISSGTAGTSAEGAENTAAIAAGLVLITVAAASSILIQVNKSQVPQVPEAAYSGPPLSYYVTKFQPAVAAPAQTLEAPAPDEAQDGAAATVEAPEVPAPQLSS

SEQ ID NO: 12496 - protein, 826 aa, Zea mays
  VARIANT 38: note = Ancestral polymorphism is F, Derived polymorphism is V
MTLLAPAKRSTKFPTRTPWTMPFSTTWQGFVHQALDHFLDAHRRQGRCVGGGALLGIIKICGSVPDRVLGKQLHALCVRCGHDHGDIRVGTSLVDMYMNWHSVLDGRKVFEGMLKRNVVTWTSLLTGYIQAGVLLDVMSLFFRMRAEGVWPNPFTFSSVLSMVASQGMVDLGQHVHAQSIKFGCCSTVFVCNSLMNMYAKCGLVEEARVVFCRMETRDMVSWNTLMAGLVLNGRDLEALQLFHDSRSSITMLTESTYSTVINLCANLKHLGLARQLHSSVLKHGFHSYGNVMTALMDAYNKAGQLDKALDVFLLMSGSQNVVSWTAMIDGCIQNGDIPLAAALFSRMREDGVAPNDLTYSTILTVSEASFPPQIHAQVIKTNYECTPTVGTALMVSYSKLCSTEEALSIFKMIDQKDVVSWSAMLTCYAQAGDCNGATNAFIKMTMHGLKPNEFTISSAIDACASPAAGVDLGRQFHAISIKHRCHDALCVSSALVSMYARKGSIENAQCVFERQTDRDLLSWNSMLSGYAQHGYSQKALDVFRQMEVEGIDMDGLTFLSVIMGCAHAGLVEEGQQYFDLMVRDYGITPTMDHYACMVDLYSRAGKLDETMSLIEGMPFPAGPTIWRALLGACRVHKNVELGKLAAEKLLSLEPLDSATYVLLSNIYSAAGKWKEKDEVRKLMDTKKVRKEAGCSWIQIKNKVHFFIASDKSHPLSEQIYAKLRAMTAKLKQEGYCPDTSFVPHDVAEDQKEAMLAMHSERLALAFGLIATPPAAPLHIFKNLRVSGDGHTVMKMVSEIEDREIVMRDCCRFHHFKSGVCSCGDFW

SEQ ID NO: 12497 - protein, 349 aa, Zea mays
  VARIANT 203: note = Ancestral polymorphism is D, Derived polymorphism is Y
MEPDSDQPKAAARGGHRKHLAMLERLSKRSSSSVGAPPSDSSDASPVEAFLSRFADAKLAAESALSACRSSSPEDDAAASLAAAAAAIDDIDRLIAEASHALPPYELRAALATAADLRAAHSVAASELRPKKSFSFRNKSRNPRNPPQDRVTASPPQPPPPEQPKPSLDAILPGFGFRGRNGATFVKDLRVSNDKDGDFTLADLVSCEVYLKGKCRALYIHKLRDCRVFVGAVLGSVLIEDVDGCIFVMAAHQIRIHEARVTDFYLRVRSRPIIEDCSGVRFAPYVLNYEGIGEDLKDSGLEEETGNWANVDDFKWLKAVQSPNWRLVPEEERLQTVNISELHKQEDDS

SEQ ID NO: 12498 - protein, 329 aa, Zea mays
  VARIANT 272..329: note = Derived polymorphism lacks residues 272 to 329
  VARIANT 28: note = Ancestral polymorphism is G, Derived polymorphism is R
MGGSQYDDEWVLPSADITLVLVGKLGYGKSATGNSILGREAFVSEYSHSGVTNTCQLGSTTLMDGRTINVIDTPGLFDMSIASDDAGKEIVKCMNMAKDGIHAVLMVFSGTSRFSREDASTIETIKVFFGEKIVDHMVLVFTYGDLVGESKLKNMLNDAPEYLQNVVELCQNRVVVFDNRTKDRRLQAQQLDKLLYVVDSVCANNGGKPFTDQMFTRIKEVHDREKEVHTLGYSDEQISELKEEIHRTRDEQLAQITSMVEEKLNRTVEKLQQQLMEEQNARLEAEKVAHEAMRKSEAQIQELKERLEKARLENEEFRRMAQSSKCAIL

SEQ ID NO: 12499 - protein, 224 aa, Zea mays
  VARIANT 183: note = Ancestral polymorphism is S, Derived polymorphism is L
  VARIANT 176: note = Ancestral polymorphism is A, Derived polymorphism is T
  VARIANT 175: note = Ancestral polymorphism is W, Derived polymorphism is S
  VARIANT 173: note = Ancestral polymorphism is S, Derived polymorphism is L
  VARIANT 153: note = Ancestral polymorphism is I, Derived polymorphism is N
  VARIANT 133: note = Ancestral polymorphism is T, Derived polymorphism is I
  VARIANT 115..224: note = Derived polymorphism lacks residues 115 to 224
MTAPKPGGGAAAAARAAAAGPRTVLITGVSRGLGRALALELARRGHSVVGCGRSAEHLRSLEEEITSPSRHFFTVADVRSDSSVAELAKTVVEKKQVPDIIVNNAGTINKNNKTWNVPAEDFDMVVDTNIKGTANVLRHFVPLMIEKRHGIIINLSSGWGRSAAAEVAPYCASKWAIEGLTRSLAKELPPGLAAIALSPGVVNTDMLNSCFGSSAALYQTTETW

SEQ ID NO: 12500 - protein, 625 aa, Zea mays
  VARIANT 93..625: note = Derived polymorphism lacks residues 93 to 625
  VARIANT 183..625: note = Derived polymorphism lacks residues 183 to 625
MFKKPVDVKTIQRLSGADKKKLRRTAKGRFPQASDADLDAILPPKAEITVAKYPNHVLVYGIEGEFPMIFNTDARGHELFPTVEYAHKRKGAENKQKPLLPVIEYSHHYFDFLLSNQLLGIGNELGMVSLLQILQFMRFGSIPPEGFPSFEAGQPWAVKVPGNPAAIAVGSTTMSSTEALKAGLRGKALKILHYYRDMLWQVDSADGCYVPNEGFFDDIVVEDPNPVSTSQAPDSAEEPEVTNDGSVSAEDAGVDISDNHGTNPGIQIEAVEEITDVVNELKLPEDKTTEQAPVEMEHHNLRTEEIDSLLDKCLLQALYTSIKEKDLPMPGSTLWANHILPNRPPGVTIDIKKSSHKKLSKWLQSKSSSGLISAKEDKYKKEVVLLAINHKHPDYMAFRPEKRVQELVEHEKDVAESSVTKQLEVAEIYKPSSHVKPIFVAVEADMEKYYSAPEASDIVFRYVEKEKLVKPTDRAKVILDVTLCDALYKGAIKKGSAYPTEIHKKDLGSAFLNRMQVHHKVSRGTQEVIRKGAIRTIQIMTERRQGNKKMTRLSGLECFLMDPDSLASELQKKFACSTTTAELPGKKGQYEVLVQGGVIDDLAKHLVDHYDVPKRYIEVYDKTKR

SEQ ID NO: 12501 - protein, 703 aa, Zea mays
  VARIANT 300: note = Ancestral polymorphism is S, Derived polymorphism is R
  VARIANT 126..703: note = Derived polymorphism lacks residues 126 to 703
  VARIANT 121: note = Ancestral polymorphism is R, Derived polymorphism is H
MAEAGVARGSGSAGDALFRELWHACAGPLVTVPRQGELVYYFPQGHMEQLEASTDQQLDQHLPLFNLPHKILCKVVNVELRAETDSDEVYAQIMLQPQTEVSRFTYIISCGSQSSHCIIVRFFVCSQSEPTSPDPEPPEPERCNIHSFCKTLTASDTSTHGGFSVLRRHAEECLPQLDMTQNPPWQELVAKDLHGNEWHFRHIFRGQPRRHLLTTGWSVFVSSKRLVAGDAFIFLRGENGELRVGVRRLMRQLNNMPSSVISSHSMHLGVLATASHAISTGTLFSVFYKPRTSRSEFVVSVNKYLEAKNHKMSVGMRFKMRFEGDESPERRFSGTIIGMGCMPANSTSPWANSEWRSLKVQWDEPSAILRPDRVSPWEVEPLDRTNPQPPQPPLRNKRARPPASPSIAPELAPVFGFWKSPAEPAQAFSFSGLQRTQELYHSSPSSMFSSSLNVGFNPKYEGPTPNTNHLYWTMRETRTESYSASINKAPTEKKQESTTSGCRLFGIEIGSSAVSPVVTVASVGHDPPPPALSVDAESDQLSQPSHANKATDAPAASSDRSPNETESRQARSCTKVIMQGVAVGRAVDLTRLDGYDDLRRKLEEMFDIPGELSASLKKWKVIYTDDEDDMMLVGDDPWSEFCRMVKRIYIYSYEEAKSLTPKAKLPAIGGDTGVKPDPSKLPPESDVPQSDSDNSAPVAADKD

SEQ ID NO: 12502 - protein, 291 aa, Zea mays
  VARIANT 175: note = Ancestral polymorphism is D, Derived polymorphism is Y
  VARIANT 145: note = Ancestral polymorphism is G, Derived polymorphism is D
  VARIANT 35: note = Ancestral polymorphism is R, Derived polymorphism is S
  VARIANT 31: note = Ancestral polymorphism is L, Derived polymorphism is V
MRPPAPKVPSAASSSSHSQREPRPENPLLLLPSSRFTKLSLGCPLLDRLLCGGLPAASVTEIAGESASGKTQLCLQLALLAPLSPLSASSLFLHSDLPFPLHRLRRLAPKSRPDILDHVLVAAAHSPTDLLSLLARAQRLLANPGRSPHRLPIRLILLDSIASLFRGDFDASPADLRRRSALFFQISAKLKELAYRHQCVVVVTNQVVDVVEGDAGNTVAWSSGRRLSPALGIAWANCVNTRLFLTREVEGNGTSGSARRWMKVAFAPHLPEQSCEFVIRRDGVFGVEPER

SEQ ID NO: 12503 - protein, 402 aa, Zea mays
  VARIANT 14: note = Ancestral polymorphism is G, Derived polymorphism is D
  VARIANT 160..402: note = Derived polymorphism lacks residues 160 to 402
MAEAEAHGIVIVGGGICGLATALALHRKGIPSLVLEKSRSLRADGAGIGVHANGWRALEQLGVAAELRETAQLITVYHDVWQQGDKTSREKVPVRMELRCLNRKDLIEALAKDIPAGAIRFGCRVAAVAADPGGGHGAVLTMADGTAMKAKVLIGCEGTYSAVARYLGLSPVRTIPRPVLRGFTWYPHGHSFDTEFLRLRVGGFFIGRLTITDNLVHFFVTMPKQPTADVIKDLKRVRDHALKDLQDVECPGEIIEIVRGSDPESLNLVTEFWYRPPWEVVLGSFQRGAVTVAGDAMHAMGPFIGQGGSAGLEDAVVLARSLARAAVDDSDNAREKKVVGEAIGEYVRERRPRLALLSLESFVMGALLVRSPSPVTKLVCVAVLILLGSKSLRHANYDCGRL

SEQ ID NO: 12504 - protein, 328 aa, Zea mays
  VARIANT 282: note = Ancestral polymorphism is A, Derived polymorphism is S
MEEEGHGIVIVGGGICGLATALALHRKEFRCLRRKDLIETMAKNIPAGSIRFGCHVVAIQQDPGTHGPILTTVDGGTIRAKVLIGCDGGSSAVARYLGLSPPKAIPRTVLRGFTAYPHGHPFGAEFLRIRGGGEFVVGRLPVTRNLVHFFVTMPNPPTGIMLATKDVSATTTKDFMLEKLRDCCAPEIVQMVQDSDPESLNVVNSIRYRSPWQVALAAFHRGAVTVAGDAMHAMGPFIGQGGSAALEDAVVLARSMSRANAAGGGHGAAVREYVRERRPRVALLSLESFVAGTLLRARSLVGKLACVAVLALLGTRSLRHADFDCGRL

SEQ ID NO: 12505 - protein, 425 aa, Zea mays
  VARIANT 85: note = Ancestral polymorphism is N, Derived polymorphism is I
  VARIANT 25: note = Ancestral polymorphism is V, Derived polymorphism is I
  VARIANT 21: note = Ancestral polymorphism is G, Derived polymorphism is C
MYAASSHPGTSSSSSMEESHGIVIVGGGICGLATALALHRKGIASLVLEKSEALRVDGGSIGVHVNGWRVLEQLGVAAELRETANLVTAFHDVWQDEKKSTLTPVRKELRWLKRKDLLETMAKDIPAGAIRLGCHVTAIHPSDPGVVLTTTPAGGGGGGVIRAKVLIGCDGSNSVVAKYLGMSPSKPTPPRTYLRGFTTYRHGHPFGDRFLRLRGRRFFVGRSPMTDTRVSFFVACHVPSAATSSSSRVVDARDTRHAVLQKLRDQRCPAEVVEMVRDADPDSLNVVTRVWYRPPWQVALAAFRKGAVTVAGDAMHAMGSYIGQGGSAALEDALVLARSLARARAAAAGGRDDGDDEPFLLGAATAIREYVRERRLRVARLSLEAFVMGELLRAKSMATKLACMAILALLGTKALGHTNYDCGRL

SEQ ID NO: 12506 - protein, 82 aa, Zea mays
  VARIANT 30: note = Ancestral polymorphism is K, Derived polymorphism is M
MHPHLTLHRHPMCAEIIEEFQKCHLDHPVKKFFGECTDLKIKLDRCFRQEKALKRKANFEESKRFKEQLKAYKREIAEKSEE

SEQ ID NO: 12507 - protein, 705 aa, Zea mays
  VARIANT 350: note = Ancestral polymorphism is G, Derived polymorphism is D
MGGLCSKEGVVEAPPPAPRHPVSQLQKASSQSLKQLITLTAKEEENAVAARTESNAKVNGGIGIGAPAPAKGSVEKTAPPVVVITSLSKSYSTAGAPTHHRCVTVDVGGSNTPAAADCGEQVISSVPQGFSGEHVIAGWPSWLTSVAGEIVEGWLPRRADTFERLDKIGQGTYSNVYKARDLQSGKIVALKRVRFVNMDPDSVRFMAREIHILRRLDHPNVIRLEGIVTSRLSHSLYLVFEYMEHDLAGLAALSGQRFTEPQVKCLMRQILEGLSHCHARSVLHRDIKGSNLLIDDNGLLRIADFGLATFFDPGKRQPMTSRVVTLWYRPPELLLGATEYGVAVDLWSTGCILAELLAGKPIMPGQTEIEQLHKIFKLCGSPSEDYWAKAKLPDVTLFKPQRPYRRKIAETFKDFPPSALALLDTLLAIEPSARGTVASALDSEFFRTKPLACDPASLPKYPPCKEYDAKLRGQEVSRQNAAGLGGKGSVSVKPGRDDAKGAAPAQDAIADYQRRHRQARANQKSTSHHYSSQEDSVPGFRIEPPPPGMAVAAAARGPATLQAGGFGSTWYRSDPRAVPRASSSVRAAASHLTSQRSYAQSRGTDLHPSSSAASASNANPRYNRLDVAEPASGVGRPGSSSHQKDFGMRDASAGFGGRNKRMHYSGPLVPPGGNMDDMLKEHERQIQQAVRKARVEKEKTNRHHY

SEQ ID NO: 12508 - protein, 121 aa, Zea mays
  VARIANT 41: note = Ancestral polymorphism is E, Derived polymorphism is K
  VARIANT 47: note = Ancestral polymorphism is L, Derived polymorphism is F
  VARIANT 48: note = Ancestral polymorphism is T, Derived polymorphism is I
  VARIANT 63: note = Ancestral polymorphism is S, Derived polymorphism is R
  VARIANT 95: note = Ancestral polymorphism is D, Derived polymorphism is Y
  VARIANT 96: note = Ancestral polymorphism is R, Derived polymorphism is L
  VARIANT 101: note = Ancestral polymorphism is L, Derived polymorphism is R
  VARIANT 105: note = Ancestral polymorphism is V, Derived polymorphism is A
MTNRTTTLNLKTMAAQHSWDLFGMKNLVTTMIPQLDSIMMELLVFTLTATLEFGIHMINRLNSMSLVNGRIRVLLLCHLRHFLWSGLCVSIGLEDLEAMRLFFHVQDEVHEAWIGSGYLSR

SEQ ID NO: 12509 - protein, 193 aa, Zea mays
  VARIANT 181: note = Ancestral polymorphism is Q, Derived polymorphism is L
MENHHHHLQQQQQPAATASSPQYRGVRRRKWGKWVSEIRQPGTKVRVWLGSFDSAEAAAVAHDVAALCLRGPRDAQLNFPGSAGWLPRPASTGPADIRAAAAEAAERVRREPELVGAAAAARGPGTSSRLDLAVGDEFDDDLASPRLWTEMAEAMLLDPPKWGRMAATNQNVISKLILRVQTSEMADMAKQAN

SEQ ID NO: 12510 - protein, 326 aa, Zea mays
  VARIANT 49: note = Ancestral polymorphism is T, Derived polymorphism is I
MSMEDDASKISDWEVLSATSSRGGGDDDEVLTVSGGGGDVVLLDHFVLTPDPAASCPGDGEGSWSDDRGAWQGLELLDGFDPIPEASFDLAVGVRSQQLLISDVDDAREEGSIVQATVARGATRSAEGNQDDVVEVEIEQESSSVISRGALCPVLQVAADHGVEETLDSEAVTPTGGSLQSQVSESSLVQLDDGGIGAGEKRSCLEDAVSSDEIHGEQEEQEQGSNANAAIGCDEPDGEAKDDALPLAHTPAALLGLVVLGRKMYRMKHKARGLPQIKIAFDDKRASQFADRAARLNEAFLVARRVPMLRTSSGGATLPWSMVQDR

SEQ ID NO: 12511 - protein, 106 aa, Zea mays
  VARIANT 87: note = Ancestral polymorphism is D, Derived polymorphism is V
  VARIANT 86: note = Ancestral polymorphism is A, Derived polymorphism is D
  VARIANT 64: note = Ancestral polymorphism is A, Derived polymorphism is V
MAKNPKDAAPEEEMPAAAEEQAAPAATVKVLFFARARDLTGVADSAVEVPPGSTAGECLARVLAQFPKLEEIRGSVVLALNEEYAADSAAVADGDELAVIPPISGG

SEQ ID NO: 12512 - protein, 278 aa, Zea mays
  VARIANT 201: note = Ancestral polymorphism is T, Derived polymorphism is K
  VARIANT 200: note = Ancestral polymorphism is F, Derived polymorphism is S
  VARIANT 194: note = Ancestral polymorphism is Q, Derived polymorphism is H
  VARIANT 169: note = Ancestral polymorphism is P, Derived polymorphism is S
  VARIANT 144: note = Ancestral polymorphism is C, Derived polymorphism is G
  VARIANT 143: note = Ancestral polymorphism is G, Derived polymorphism is D
  VARIANT 137: note = Ancestral polymorphism is V, Derived polymorphism is A
  VARIANT 134: note = Ancestral polymorphism is G, Derived polymorphism is C
  VARIANT 96: note = Ancestral polymorphism is L, Derived polymorphism is P
  VARIANT 79: note = Ancestral polymorphism is A, Derived polymorphism is T
  VARIANT 77: note = Ancestral polymorphism is A, Derived polymorphism is T
  VARIANT 69: note = Ancestral polymorphism is N, Derived polymorphism is S
  VARIANT 60: note = Ancestral polymorphism is K, Derived polymorphism is N
  VARIANT 39: note = Ancestral polymorphism is K, Derived polymorphism is N
  VARIANT 20: note = Ancestral polymorphism is S, Derived polymorphism is A
MAEAEATVGRLMLYSYWRSSCSHRARIALNLKGVDYEYKAVNLLKGEQSDPEFVKLNPMKFVPALVDGSSVIGDSYAITLASIEILSLLSQYCLSLESLVPLCYVVFGGQVPRASSSTSRPSKESFESPGVPHGNVAVMQHTGCYSTGRFSTGHNQTQIASIVASGIQPLHNLTVLRFIDQKVGAGESVLWTQQQIERGFTAIENLIQLKGCAGKYATGDEVQLADVFLAPQIYAAIERTKIDMSNYPTLARLHSEYMSHPAFEAALPGKQPDAPSSS

SEQ ID NO: 12513 - protein, 856 aa, Zea mays
  VARIANT 95..856: note = Derived polymorphism lacks residues 95 to 856
  VARIANT 118..856: note = Derived polymorphism lacks residues 118 to 856
  VARIANT 121..856: note = Derived polymorphism lacks residues 121 to 856
  VARIANT 132..856: note = Derived polymorphism lacks residues 132 to 856
  VARIANT 192..856: note = Derived polymorphism lacks residues 192 to 856
MASAMVVFGGGKDRPSPGGGGAPQVDAGKYVRYTPEQVEALERVYGECPKPSSLRRQQLIRECPILSNIEPKQIKVWFQNRRCREKQRKEASRLQTVNRKLTAMNKLLMEENDRLQKQVSRLVYENGYMRQQLHNPSAATTDTSCESVVTSGQHHQQQNPAAPRPQRDANNPAGLLAIAEETLAEFLSKATGTAVDWVQMVGMKPGPDSIGIIAVSHNCSGVAARACGLVSLEPTKVAEILKDRPSWYRDCRCVDILHVIPTGNGGTIELIYMQTYAPTTLAAPRDFWTLRYTSGLEDGSLVICERSLTQSTGGPAGPNTPNFVRAEVLPSGYLIRPCEGGGSMIHIVDHVDLDAWSVPEVLRPLYESPKILAQKTTIAALRHIRQIAHESSGEMPYGGGRQPAVLRTFSQRLSRGFNDAVNGFPDDGWSLMSSDGAEDVTIAINSSPNKLIGPHVNSSQLFTAIGGGILCAKASMLLQNVPPALLVRFLREHRSEWADPGVDAYSAAALRASPYAVPGLRASGFTGSQVILPLAHTLEHEEFLEVIRLEGHSLCHDEVVLSRDMYLLQLCSGVDENAAGACAQLVFAPIDESFADDAPLLPSGFRVIPLDAKTDPPSGTRTLDLASTLEVGSGGTTRTSSDASSTCNTRSVLTIAFQFSYENHLRESVAAMARQYVRTVVASVQRVAMAIAPSRLGGQLEMKQTPGSPEAHTLARWIGRSYRFHTGAELLRTDTQCTDASLKALWQHSDSIMCCSLKAAPVFTFANQAGLDMLETTLIALQDISLEKILDDDGRKALCTEYPKLMQQGFAYLPGGVCVSSMGRPVSYEQAVAWKVLSDDDTPHCLAFMFVNWSFV

SEQ ID NO: 12514 - protein, 1046 aa, Zea mays
  VARIANT 152..1046: note = Derived polymorphism lacks residues 152 to 1046
MDAVAFPLSPAPFLDDDLDFGDFTFVSAPQPQPPTAAFATFDDDWGDFVASGLGSDAGTSAPTTVPAAAPSSSPWEKPRGPLPLSLFGADADDDGQEEEEGSAGPPPMATAPQCALSVPSNGSRPADLKDLIAGLYGSQPPHTADAVPQGAQKGSTISDENNKATAMGGDIQTFSYSSMPLWLYLMATATSSAPLLPKPALRAASSSSLHTPNPRSKIQRATPEQQDQHVDTKWRRQPRAPPRRGEGAKRRLRSLVQRGEIDEALVLFDSMASGGGRNCPPVVPCNILIKRLCSDGRVSDAERVFAALGPSATVVTYNTMVNGYCRAGRIEDARRLINGMPFPPDTFTFNPLIRALCVRGRIPDALAVFDDMLHRGCSPSVVTYSILLDATCKESGYRQAMALLDEMRAKGCEPDIVTYNVLINAMCNEGDVDEALNILSNLPSHGCKPDAVTYTPVLKSLCGSERWKEVEELLAEMTSNNCAPDEVTFNTIVTSLCQQGLVDRAIEVVDHMSEHGCVADIVTYSSILDGLCDVGRVDDAVELLSRLKSYGCKPDTIAYTTVLKGLCSTEQWERAEELMAEMLCSDCPPDEVTFNTVVASLCQKGLVDRAIRVVEQMSENGCSPDIVTYNCIIDGLCNESCIDDAMELLSDLQSCGCKPDIVTFNTLLKGLCGVDRWEDAEQLMANMMRSNCPPDELTFNTVITSLCQKGLLTQAIETLKIMAENGCVPNSSTYSIVVDALLKAGKAQAALELLSGMTNGTPDLITYNTVISNLTKAGKMEEALDLLRVMVSNGLCPDTTTYRSLAYGVCREDGTDRAVRMLRRVQDTGLSPDTTFYNDVLLGFCRDRRTDLAIDCFAHMVSSGCMPDESTYVILLEALAYGGLLDEAKRLLASLCSLGRSNSRGIFGRRAGCAARSRVCGVARSVPCSAVSAWRARGRLRSVRASRRVARLEQGWVLAGRVGQVRPWRVERDARDADGASGALRSRVGRQGAVAGLGAARLRLLRAGGERETRGGERVPSGRERFGEGEAVAAATKEQGRRRYSA

SEQ ID NO: 12515 - protein, 125 aa, Zea mays
  VARIANT 93: note = Ancestral polymorphism is M, Derived polymorphism is L
MKYLPPAPDNGIGVNVRIGEVNLLEGSSLAAPDNEELAAGMGRLQDSNAVLTHFNEYSERCFVEVSGDFASKTRLLKSMKADLDHIFTKLREMKARLAATYPDAFPNGAMSKTMDQRPDLESPLD

SEQ ID NO: 12516 - protein, 267 aa, Zea mays
  VARIANT 211: note = Ancestral polymorphism is T, Derived polymorphism is M
  VARIANT 129: note = Ancestral polymorphism is R, Derived polymorphism is C
  VARIANT 97..267: note = Derived polymorphism lacks residues 97 to 267
MKKKTMATHVEVAVFPHVPNNPMYASNTSPRTPAGAVVLAAPLSYGDDATDDVDVVATNTKQQPPQYDYDADIDATLRTMEKETIERPSPDYLSDRQAGEMLMMDRADLVEKMHRFCTSYDLAPGALHRAVSFVDRFLSAKKINRDERQIRLLGAAAVFAVAKYEDRNTMQKINVDGVAMYAGCTRSEAVDQERELLATIGFCLSAPTAYTFVDHFMRHSQEEGTATVRSLAHHLANMALQDYRCVAFLPSVVAASAILLARMVLNC

SEQ ID NO: 12517 - protein, 266 aa, Zea mays
  VARIANT 193: note = Ancestral polymorphism is R, Derived polymorphism is C
  VARIANT 129: note = Ancestral polymorphism is R, Derived polymorphism is C
MKKKTMATHVEVAVFPHVPNNPMYASNTSPRTPAGAVVLAAPLSYGDDATDDVDVVATNTKQQPPQYDYDADIDATLRTMEKETIERPSPDYLSDRQAGEMLMMDRADLVEKMHRFCISYDLAPGALHRAVSFVDRFLSAKKINRDERQIRLLGAAAVFAVAKYEDRNTMQKINVDGVMYAGCTRSEAVDQERELLATIGFCLSAPTAYTFVDHFMRHSQEEGTATVRSLAHHLANMALQDYRCVAFLPSVVAASAILLARMVLNC

SEQ ID NO: 12518 - protein, 325 aa, Zea mays
  VARIANT 278..325: note = Derived polymorphism lacks residues 278 to 325
  VARIANT 257: note = Ancestral polymorphism is S, Derived polymorphism is L
  VARIANT 204: note = Ancestral polymorphism is R, Derived polymorphism is G
  VARIANT 79..325: note = Derived polymorphism lacks residues 79 to 325
  VARIANT 36..325: note = Derived polymorphism lacks residues 36 to 325
MKKKKTMATHVEVAVFPHVPNNPMYASNTSPRTPAGAVVLAAPLSYGDDATDDVDAVATNTKQQPPQYDYDADIDATLRTMEKETIERPSPDYLSNRQAGEMLMMDRADLVEKMHRFCTSYDLAPGALHRAVSFVDRFLSAKKISRDERQIRLLGAAAVFAVAKYEDRNTMQKINVDGVAMYAGCTRSEAVDQERELLATIGFRLSGPTAYTFVDHFMRHSQEEGTATVRSLAHHLANMALQDYRCVAFLPSVVAALAILLARMVLNCWTETPVAAAGYTLEELSGCIEAICDMHEHQRVWPGCAQMMRHWEISAQFSYLLPPLT

SEQ ID NO: 12519 - protein, 248 aa, Zea mays
  VARIANT 152: note = Ancestral polymorphism is Y, Derived polymorphism is C
  VARIANT 162: note = Ancestral polymorphism is S, Derived polymorphism is F
  VARIANT 203: note = Ancestral polymorphism is A, Derived polymorphism is T
  VARIANT 240: note = Ancestral polymorphism is G, Derived polymorphism is R
MNPSSSSTSSSGGYHSRAAAFASPQPRGGGGGGGRDGSDRIDALGRLLTRVLRHMAAELRIDMRTDGYVRVRDLLKLNLQTFAKAPLKSHTVDEIREAVRQDNKQRFSLLEEDGELLIRANQGHTVTTVTSESLLKPILSPDEVSVCVHGTYRKNLDSILQFGLKRMARLHIHFSSGLPSDGEVTSGVRQNVNILIHLDVSKALKGGMKLYISDNKVILTEGFDGVVPVKYFERVETWPGRAPIPFQR

SEQ ID NO: 12520 - protein, 176 aa, Zea mays
  VARIANT 11: note = Ancestral polymorphism is A, Derived polymorphism is V
  VARIANT 48..176: note = Derived polymorphism lacks residues 48 to 176
MALSRKAWIAAGIGARLLMIAALAVSVPLTVHNHTKRDYGSDDFYKLQSYSYAVAVAVIAMAAGVLQIPVSVYLLCMSKRVTPSALILDISLCADVVVTVLLASGVGAGFGATNDALRYVHHVRWDDAGVKDDLVDYYNKATVPVVFLLLGTVLSMAATVVSARLRARATDDHTDF

SEQ ID NO: 12521 - protein, 431 aa, Zea mays
  VARIANT 49: note = Ancestral polymorphism is P, Derived polymorphism is S
MPKAGSGVADEEDFRAEVDERLINEEYKIWKKNTPFLYDLVITHALEWPSLTVQWLPERTEPPGKDHWVQKMILGTHTSDNEPNYLMLAQVQLPHEDTEADVRHYDDEHSDNGLFGAATGEVQIVQQINHDGEVNRARYMPQNSFIIATKTVSAEVYVFDYSKHPSKPPLDGACNPDLRLKGHNSEGYGLSWSIFNEGHLLSGSEDAQICLWDIKANSRNKSLDALQIFKHHDGVVEDVAWHLRHGYLFGSVGDDHHLLIWDLRSPSPARPVQSVVAHQGEVNCLAFNPFNEWVVATGSTDKTVKLFDLRKIHTSLHTFDCHKEEVFQVGWSPKNEPILASCCLGRRLMVWDLSRIDQEQTPQDAQDGPPELLFIHGGHTSKISDFSWNPCEDWVIASVAEDNILQIWQMADNIYLDEADLPISDELENSY

SEQ ID NO: 12522 - protein, 145 aa, Zea mays
  VARIANT 129: note = Ancestral polymorphism is S, Derived polymorphism is L
  VARIANT 111: note = Ancestral polymorphism is V, Derived polymorphism is F
  VARIANT 109: note = Ancestral polymorphism is E, Derived polymorphism is D
  VARIANT 85: note = Ancestral polymorphism is K, Derived polymorphism is N
  VARIANT 83: note = Ancestral polymorphism is A, Derived polymorphism is T
  VARIANT 13: note = Ancestral polymorphism is G, Derived polymorphism is E
  VARIANT 2: note = Ancestral polymorphism is M, Derived polymorphism is L
MMRGVGGPLLTIGDLLSDLAVDDPLVGVGDASVPSSPSAAQQAGKANPSDLSRLFEEHYDDLMKALQEKDPSWPSLMLKLCAALKTADRLMSCADTNAEQLLEKVKALEGVLDRSGHAVAEIVEALQRSGLANDGHGSPSKSASK

SEQ ID NO: 12523 - protein, 218 aa, Zea mays
  VARIANT 10: note = Ancestral polymorphism is R, Derived polymorphism is G
MIVSSFLPLRSSVFVLPSSAASRSRPATATLLPFPRITLSRRRRLAAAATESSSSSSEEGEGEAAGGSTNGSLPGLPPVEEEEELCPVDCVTEFKTDEEFQRHLNRSRATGALVVVDFYRPSCGSCKYIEKAFTRLCKGSGDDGAPVVFLKHNVIDEYDEQSEVADRLRIKIVPLFHFYVDGVLVESFPTRDKERIIAVIRKYTSVEPEPEPEEEQQE

SEQ ID NO: 12524 - protein, 488 aa, Zea mays
  VARIANT 3: note = Ancestral polymorphism is R, Derived polymorphism is K
MARPHVVVVPYPCSGNINPALQIARLLHRHGVYVTFVNTEHNHRRVQATEGAGAVRGGEGFRFEAIPDGLSEAERGKQDYGRSLAVSTSTRCAAPLRDLIARLNGTPGVPPVTCVLPTMLMSFALGVARELGIPTMSFWTASAASLMTHMRLRELQERGYVPLKDESFLTNGYLETTVIDWIPGVPPIRLGDFSSFLRTTDPDDFGLRFNESEANSCAKAGALILNTFDGLEADVLAALRAEYPRVYTVGPLGLLLRQDDDRDSSASASGSTESTGLSLWKQDAECLAWLDAQERGSVVYVNFGSHTVVTPEQLNEFAWGLAASGHRFLWSMRDNLVRGGGGAGLDAMPSTFKAETAGRCHVTAWCPQEQVLRHPAVGCFLTHSGWNSTCESLAAGVPMVCWPGFSDQYTNCKYSCEVWGVGVRLEATVEREQVAMHVRNVMASEEMRKSAAKWKEEAEAAGGPGGSSRENLLSMVRALSSAPNSPDA

SEQ ID NO: 12525 - protein, 347 aa, Zea mays
  VARIANT 205: note = Ancestral polymorphism is E, Derived polymorphism is K
MYAAAVLAAVSAVSVVAAQSPEPRDNQTVADVMSISIFMAVFFPVFVVLLAFACLHLFRAPDDDDPQAPDAASAPEWPRGGGSRKGGLDAAAIAALPLVFFREVRQHRIVDGREDALECSVCLLEFDDDDALRLLPTCPHAFHPECIGLWLERHATCPLCRASVLDDAPPAPAAQLELHTAPPLTPDSSPVHAAIVLIGGAGASEVGEEEDRTTIQRLARNRRAAGRQALPRSNSTGHSASDGGMERFALRLPEHVRLELLMSHRLRHVTSAVASVRVMEGSAHDTSTVGGSVRSTMARLMSLFTPGAGWKGDGDDKSGKAEATAASSLRRRENSSRGAVGEEKRSV

SEQ ID NO: 12526 - protein, 569 aa, Zea mays
  VARIANT 374: note = Ancestral polymorphism is A, Derived polymorphism is V
  VARIANT 252..569: note = Derived polymorphism lacks residues 252 to 569
  VARIANT 236..569: note = Derived polymorphism lacks residues 236 to 569
MPSIAPPSSSVAALTRQPVQFFKGCSVSKETKGPVRSFFTANSKSTKVKSAGLKVASSFKNDGGYPAGGVSWKDDTLLPKSTTIRGQDHSVADPVLPMDSMITPEILSANVERVIDMFADDDTDTELDLDSPTEGFTSIAEAIEDIQQGKLVIVVDDESRENEGDLIMAASLVTPEAMAFIVRHGTGIVCVSMKEDDLERLSLPLMVTTKENEEKLCTAFTVTVMMTLQQLCSIELNSKDAKEGTTTGVSAKDRAKTVMTLASPDSKPEDLNRPGHIFPLKYREGGVLKRAGHTEASVDLAMLAGLPPVAVLCEIVDDADGSMARLPKLRVFAEKENLKIISIADLIRYRRKRDRLIERASVARLPLKWGNVHAYCYKSVIDGIEHIAMVKGDIGDGQDILVRVHSECLTGDIFGSARCDCGDQLAMAMEMIEKAGRGVLVYLRGHEGRGIGLGHKLRAYNLQDDGRDTVEANEELGLPVDSREYGIGAQILRDLGVRSMKLMTNNPAKYSGLKGYGLSIAGRVPLITPITSENRRYLETKRTKMGHVYGLANAQANLANGSQSTEENH

SEQ ID NO: 12527 - protein, 170 aa, Zea mays
  VARIANT 12: note = Ancestral polymorphism is G, Derived polymorphism is S
  VARIANT 18: note = Ancestral polymorphism is P, Derived polymorphism is L
  VARIANT 22: note = Ancestral polymorphism is E, Derived polymorphism is K
  VARIANT 33: note = Ancestral polymorphism is A, Derived polymorphism is V
  VARIANT 50: note = Ancestral polymorphism is R, Derived polymorphism is P
MGSPGSANGRRGEYVRIPEEVEVASKGEGDAAAAIKAAVAAECPRVLRCRAIRWWAKVAVLGIFLAGAEAAVVVFLGPLVIKKDVVVQRAYLALFPTETHKEKCFANSLSFDIRQCLTVMKGISNSKFVELKFLLPIHCRWLEKASSAQETEMLLIVAPFCAAARVNPGF

SEQ ID NO: 12528 - protein, 89 aa, Zea mays
  VARIANT 4: note = Ancestral polymorphism is S, Derived polymorphism is I
  VARIANT 49: note = Ancestral polymorphism is R, Derived polymorphism is C
MSSSLYLVFEYMEHDLAGLAATPSLKFSEPQVKCYMQQLLCGLDHCHNRGVLHRDIKGANLLLDNNGILKIADFGLATFFNIIPNKNNI

SEQ ID NO: 12529 - protein, 325 aa, Zea mays
  VARIANT 126: note = Ancestral polymorphism is E, Derived polymorphism is K
  VARIANT 173..325: note = Derived polymorphism lacks residues 173 to 325
  VARIANT 239: note = Ancestral polymorphism is G, Derived polymorphism is V
  VARIANT 287..325: note = Derived polymorphism lacks residues 287 to 325
  VARIANT 296: note = Ancestral polymorphism is P, Derived polymorphism is L
  VARIANT 298: note = Ancestral polymorphism is G, Derived polymorphism is S
  VARIANT 299..325: note = Derived polymorphism lacks residues 299 to 325
  VARIANT 310: note = Ancestral polymorphism is T, Derived polymorphism is M
MPGFTVAQALEASTGGDTVTLPPFDISAPPPYHRRFVEAPRPCLLHQRFGEAMPPSVAPPLSSSPPPASSPSTVSTSVRGLATKVEVVEIDLTEEDTSSLAHAPRRRPWTGREERRSIHPVVGCNENLGLLEPGVFVANLRLRYGFRQLDREEGVLALLELKVRVEADPHGIQDWDPADAAGLAYGALTLTFVIIDEWDVNSICRRFTLHTRIYLGSKGCSLYTRRPAPGQKNVVTAQGREDPNQSTSIVVQGGKVATAADLAPLVANISSYLGRPWKRYSRAVFAQTKMEALVHPRGWLEWNATFALDTLYYAEYMNRVCCKPI

SEQ ID NO: 12530 - protein, 283 aa, Zea mays
  VARIANT 3..283: note = Derived polymorphism lacks residues 3 to 283
  VARIANT 29: note = Ancestral polymorphism is R, Derived polymorphism is C
  VARIANT 37..283: note = Derived polymorphism lacks residues 37 to 283
  VARIANT 129..283: note = Derived polymorphism lacks residues 129 to 283
  VARIANT 253..283: note = Derived polymorphism lacks residues 253 to 283
  VARIANT 256: note = Ancestral polymorphism is F, Derived polymorphism is S
MVQKRRIYDITNVLEGIGLIEKKLKNNIRWKGVDDSRPGEFSDDMSILQMGRVREKLDIDFVISTGDNFYKNGLKGVRDQAFKESFMDIYIAQSLQKPWYSELVDFFFVDTTPFQLEYWTHPGKHRYDWRGVAPRGKYIANLLKDMDVAMKRSTARWKIVVGHHTMRSVSEHGDTEELLELLLPVLKDNGVDFYINGHDHCLEHISSRDSPLQYLTSRGGSKAWRGVFHPNKDKLRFFYDGQGFMSLQLNQDQTHFIFYDVFGNILYRWSSRHPQSSTYLDEE

SEQ ID NO: 12531 - protein, 381 aa, Zea mays
  VARIANT 54: note = Ancestral polymorphism is Q, Derived polymorphism is P
MRERVRLLEREAAAAKQREMKVLESLVQQTKEMERAKVAFEESRLEVAALRRQQHDEGAAAQAQAQQWSVMDLMFGGVDEEINGLRTKLRAAAQAEERGRKAADELAAALAAVTMEAKQLKAWLADAQAELEAAGAESDRLRGLLQGAEAELWSATERADALASDWKEAAAGWRAREKALLARARAAEKDDDNAALRRALERAAEEARASAEALEAARADCAGLREAGAEREQALEALRRDNDGLRDSEAAARERADELQARLAAAKEREVPLPLVERWKREDAQGKLGATAFLDSGRLGPGPGRKDRMFASLSNLAELKSAAALDDYGYEFDHLNLGQYGDGTERKVNKRRSILRKFGDLFRRSRSLYKPNLAPVLHNHY

SEQ ID NO: 12532 - protein, 310 aa, Zea mays
  VARIANT 102: note = Ancestral polymorphism is D, Derived polymorphism is V
MRLIDFPSFIRTTDPDDAVLALVLRSMECHRTVPSAVIFHTLEEMESQVMSALSAILPPAYAIGPLPLLLSGAGGGGDPAIHVSGSSTSLSKENRACLEWIDGKRHNSVLFASFGSLAKLAHEQLVELAWGLANSGYEFLWVIRSDQQGLVDGGAVLPPEFLAETEGRGCVTSWCPQEAVLRHDAVGAFLTHCGWNSMLQSVCAGVPMLCWPVAADQQTNSRLACTEWRVGVELGENASREEVETAIRQVMGGERGEELRRSAMEWKEKAALAARPGGSSWANLEKVANEVLAPLIAAHRKECDDAMELS

SEQ ID NO: 12533 - protein, 265 aa, Zea mays
  VARIANT 102: note = Ancestral polymorphism is C, Derived polymorphism is Y
MEGCRGRHQSHPPHAIDGARGKTAHLLPTPNLLPFQLKQHRRLVAVWLLVKAPADKGKMEHTTAAVSSVRWVCRSRCKATARSSWEAMVTANFGLWLANTCCRAPDYGSQGEVMLTFAENGSSKVGVRFDKQIPGAIDLGGSCELDHGLLCSVDSLCLDGPGWEDRAKHSFDVVFEFASEESQQVPVILFVKDVEKICGNNYTYHGLKNKLESFPAGVLLLGPRFRQMLGKISQTMGLLGSSSHTAKQQYLTLHFSLIEGVLQRN

SEQ ID NO: 12534 - protein, 126 aa, Zea mays
  VARIANT 4: note = Ancestral polymorphism is S, Derived polymorphism is N
  VARIANT 14: note = Ancestral polymorphism is G, Derived polymorphism is E
  VARIANT 72: note = Ancestral polymorphism is G, Derived polymorphism is C
MVNNIISLGTTCSEVAFLVSGSKISNLVISCPILSPEDFFDVLSSRVWSFQVTDFISLNSLLAQGVHPSSVGASLQGEVLMILICYLALATCVPCFYLQADMTHDCYLADVRNIDHVCSQYCSCYI

SEQ ID NO: 12535 - protein, 707 aa, Zea mays
  VARIANT 168..707: note = Derived polymorphism lacks residues 168 to 707
  VARIANT 257: note = Ancestral polymorphism is P, Derived polymorphism is L
  VARIANT 274: note = Ancestral polymorphism is R, Derived polymorphism is W
  VARIANT 297: note = Ancestral polymorphism is R, Derived polymorphism is C
  VARIANT 322: note = Ancestral polymorphism is S, Derived polymorphism is L
  VARIANT 383: note = Ancestral polymorphism is R, Derived polymorphism is C
MSASQSSMSGAGEPGARAVVWFRRDLRVEDNPALAAAARAAGEVVPAYVWAPEEDGAYYPGRVSRWWLSQSLKHLDASLRRLGAARLVTRRSNDAVAALLDLVRCTGATHLFFNHLYDPLSLVRDYRVKEQLAAEGIDVQSFNADLLYEPWEVLDEDRRPFTMFAPFWNRCLCMPDPAAPLLPPKRINSGDLSRCPWDELVFEDESERGSNALLARAWSPGWQNADKALTAFLNGPLMDYSVNRKKADSASTSLLSPYLHFGELSVRKVFHQVRMKQLMWSNDGNHAGEESCTLFLRSIGLREYSRYLTFNHPCSHEKPLLSHLRFFPWVVNEVYFKVWRQGRTGYPLVDAGMRELWATGWVHDRIRVVVSSFFVKVLQLPWRWGMKYFWDTLLDADLESDALGWQYISGSLPDGRELDRIDNPQFEGYKFDPHGEYVRRWLPELARLPTEWIHHPWDAPESVLQAAGVELGSNYPRPIVELDAANSRLQDALSEMWELEAASRAAMENGMEEGLGDSTDEPPIDFPQELRMEVDRQPVQPAIHAPGVTGRRREDQMVPSMTSSFIRAETELTADFGHTSEDSRPEVPSNIHHLQARPEREETVDGGTGNAVRVHGNHHQQNLQNNMHRVLGIAPSISEASSSWTGRDGGVVPVWSPPAASGHSDSYAADEADISSRGYLDRHPQSHTMMNWSQLSQSLTTGWEVDN

SEQ ID NO: 12536 - protein, 404 aa, Zea mays
  VARIANT 201: note = Ancestral polymorphism is S, Derived polymorphism is I
  VARIANT 113: note = Ancestral polymorphism is V, Derived polymorphism is D
MQSSAMAFFPSVATAKLELNSLYRKYVDMFGVSSNNSTVGSHTIHKMSHLPVLLVDRTFFSTGTAIQSIAISYGALIRRWLLGGTSVAQHAMISRAAMNSLPCCAFLPFFASVGALMTKLCGCTMIPDRFSGWQSVLGQSANLRGEPVLVVDNNELGNDQTLSSFLGRKRDYVGLGLALQCICYPACLKVAEFPQKNLSFSRQWMRSGHDTSAIWRAMARNEQYLAFVVVLAALQLFLRLARVNVTILFLPMLSQAVSSRSSPAVIGNVLLVLVTSCGVLGSALSVKQFGREVTFAIGAIVMVICQVAIPLIMEVQIGVGGGTRMPVGYTAATFALTCVVSCGLSWSWGSFFWTLPGRKVHSAGHVLAVALNLGVCFAQMRYFLLMLCRLKNATLAYYALWIWS

SEQ ID NO: 12537 - protein, 429 aa, Zea mays
  VARIANT 49: note = Ancestral polymorphism is R, Derived polymorphism is S
MEHDVAHGAGGAVPAGEEAFEVAHQLLAQEEFSDSESIQISDLKRRMWRDQMLLNRLECRADVFSAAGGAGPSSSRPLGPPTAGAHGEDEEEEEEVEAPEVRCRRKAMLRAQDGVLRHMLKMMEACNARGFVYGVINEAGEPMLGSSDSLRGWWKDNVSFDRAGPMALVTAPTGESPPGPASCLHRLQDIQDSTLGSVLSALIQHCVPPQRSFPLERGLAPPWWPTGKEAWWGSQGEVQAHQGAPPYRKPHDLKKAWKISLLSSVIKHMSPRFDQMRKLVWQSKRLQQRMSAKETETWSKILRQEETLSRRLKSSLRITPLDGDDDDDMDRDGLEDVVRGVQDKRKRELISSSSGGRAELVADENPIDELLKRHYNLVPDQHGIVVAPENDAGELDLLYGVVDDVPPDVLFDLIASCSGADDAFRLILD

SEQ ID NO: 12538 - protein, 268 aa, Zea mays
  VARIANT 14..268: note = Derived polymorphism lacks residues 14 to 268
  VARIANT 102: note = Ancestral polymorphism is G, Derived polymorphism is E
  VARIANT 111: note = Ancestral polymorphism is S, Derived polymorphism is R
  VARIANT 113: note = Ancestral polymorphism is P, Derived polymorphism is S
  VARIANT 160: note = Ancestral polymorphism is A, Derived polymorphism is T
  VARIANT 188: note = Ancestral polymorphism is P, Derived polymorphism is L
  VARIANT 209..268: note = Derived polymorphism lacks residues 209 to 268
MLLLSPSSLPRGSQCSSTPSSATMTANKLELNIFSWNSSIGDPFIFETQRHNGIRELCPTNGEHKLIRARALIPLHEPNSVAINHQWLHMGHAFSLSKLETGQELLDMVDSLPIVAIKSLKVSDFQGAHIIVAHMGLTTAGSIGAMTAATLDDSVLCVQAIADAAFGVKLISLFSITELEDDKRKVRPAKRSCGCPTILSRHMRVKYLQRFPHNSLPGSYGTLHCYATDMLAVGHVHHALKTTHYVVLIYIEGIEPDAALEALVDRFR

SEQ ID NO: 12539 - protein, 363 aa, Zea mays
  VARIANT 24: note = Ancestral polymorphism is P, Derived polymorphism is L
  VARIANT 26: note = Ancestral polymorphism is V, Derived polymorphism is D
  VARIANT 33: note = Ancestral polymorphism is G, Derived polymorphism is D
  VARIANT 140: note = Ancestral polymorphism is P, Derived polymorphism is S
  VARIANT 335: note = Ancestral polymorphism is L, Derived polymorphism is R
MVAKMLPRSWISACVLVLLLSLHPRVHAFYLPGTFMHTYSPGEVISAKVNSLTSIETELPFSYYSLPYCKPLDGVKKSAENLGEILMGDQIDNSPYRFQVNVNESVFLCTTDPLTKEQAELLKRRARDLYQVNMVLDNLPVMQFTEQNSVIIQWTGFPVGYNPIGSNEDYITNHLKFRVLVHQYQAQGDVVVTSEDGVAMVESDRKSGFQIVGFEVVPCSVRRDPESMSKLKMYDKVDSVNCPLELEKSQAIRENERITFTYEVEYVKSNIKWSSRWDAYLKMDGAKRHQQGSSMAPRDPPDPRWGTMAPTGDDALAPFLVPAPLPRPGAIVDVLRDALDNLHACVYRKASQQLSTALGTTES

SEQ ID NO: 12540 - protein, 183 aa, Zea mays
  VARIANT 49: note = Ancestral polymorphism is R, Derived polymorphism is C
  VARIANT 104..183: note = Derived polymorphism lacks residues 104 to 183
MCSRAFACVCCASVLHLHVVELPVSQIQSLEESAELLRERCLKFHKGCRKYAEGLGEAYDGDIAFASSLETFGGGHNDPISVAFGGLVMTKFTIALREIGTYKEVLRSQVECLLNDRLLNFVDIDLHDVNDAHKRFDKASLSYDQEVLEATRQQLERELSLRISIASMTSLSATFCTNSTNGS

SEQ ID NO: 12541 - protein, 409 aa, Zea mays
  VARIANT 188: note = Ancestral polymorphism is Y, Derived polymorphism is H
  VARIANT 340: note = Ancestral polymorphism is W, Derived polymorphism is S
MARAAAPPPLHRLPGLALLCLAVAVCFSGGENAAAAAWTRKIVGVHELRVGDFSVKVTNWGATLMSVILPDSKGNLGDVVLGYDTVAEYVVRSIVSAQHIRCVPETESLKLCRTETVQNGTAYFGGLIGRVANRVAGARFTLDGKAYRLYRNDGNNSLHGGHRGFSKVVWTVKEHVGGGDSPYITLYYHSFDGEQGFPGDLDVYVTYRLSRPYVLSVRMNATARSRATPVNLAHHAYWNLGGHGSGPVLGETVQLFASRYTPVDAALVPTGALAPVAGTPYDFRAPAPVGARLADLRPRRGTGGVAGYDTNYAVDGAASPSLRPVARVWDGATGRAMELWADQPGVQFYTSNGLAGVRGKGGSVYRRYAALCLETQGFPDAVNHPSFPSQIVRPGKVYSHDMLFKFSFA

SEQ ID NO: 12542 - protein, 606 aa, Zea mays
  VARIANT 35: note = Ancestral polymorphism is I, Derived polymorphism is N
MDQYEVLEQIGKGAFGSALLVRHKLERKKYVLKKIRLARQTDRTRRSAHQEMQLIANVRNPFIVEHKDSWVDKGCYVCIVIGYCEGGDMAEAIKRANDTHFSEEKLCQWLVQLLMALDYLHAHHILHRDVKCSNIFLTRDQNIRLGDFGLAKILTADDLAFSIVGTPSYMCPELLADIPYGTKSDIWSLGCCMYEMAALKPAFRAFDMQNLINKITKSIVSPLPTRYSGAFRRLVRSMLRRSPEHRPSAAELLKHPHLQPYVLQLHLKSHLSRSIVPVHQSPSEKRMTFAAEPVCRSKGRRNSLGSERMIAAFSKPSPDRSSVSSIRSVKDDYTATQSVRELSVDESMVEVASKPVASRTSDVMRTPKATPWKMMTTLRNRLEAPQASYDRTSHTEQFSRTPVDKRNSRVARRASLPLPVFETPKQRSSMSVLERLESPDVSVNSPRIDRIAEFPLASCEDPLFSTVKPPTPASASASATPPFVDRSITKDKCTAQTLRSAAHDGGNGRSEDGGGLSSGRTTTTAASSGGTSGSLQPKGRFDTTSYQQRAEALEGLLEFSAQLLQQERYEELGVLLRPFGPDEMVSPRETAIWLTKSFKEAMATGL

SEQ ID NO: 12543 - protein, 78 aa, Zea mays
  VARIANT 5: note = Ancestral polymorphism is I, Derived polymorphism is L
MGRKIVAALALALLVLGAAEAQVLPTPCCRIDCCDGKRECCGPGSGSGPGMAVTVNAVTRPAAVAFASNAKPKVGAEN

SEQ ID NO: 12544 - protein, 262 aa, Zea mays
  VARIANT 44..262: note = Derived polymorphism lacks residues 44 to 262
MGDHVAVDVGELVASRVGEAAGLVSGAKEETEALIGMVECRICQEEDLRKNLESPCACNGSLKYAHRECVQRWCNEKGDTICEICHELYKPGYTAPTQVHHDETTIEISGGDWTISGNRLDLHDPRILAMAAAQHRLLEDDYDEYTATNNNAAAFCRSIFLIVSFLMALLLLRHTLTITNSDDEDDASAIFSLFLLRAAGFLLPCYIMAWAISIMQRQRQRQEEAMLLPTEVAIILHRNGRTMQFAVAPPETPISPHPELNQ

SEQ ID NO: 12545 - protein, 489 aa, Zea mays
  VARIANT 35: note = Ancestral polymorphism is L, Derived polymorphism is I
MSAATLPPGQEPHAVCVPFPAQGHITPMLKLAKILHARGFRVTFVNTEYNHRRLVRARGAAAVAGLTGFRFATIPDGLPESDADATQDPATISYATKHNCPPHLRNLLAGLDGVTCVVADNLMSFSLDAAREAGVPCALFWTASACGYMGYRNFRLLIDRGIIPLKDEEQLTNGFMDTPVDWAPGMSKHMRLKDFPTFLRTTDPNDVLMTFQLQEVERSEYASAVIVNSFDELERPALDAMRATIPAVYTIGPLASVTEQVVPRGPLNAVSCSLWQEDQSCLAWLDARKPQPWSVVYVNFGSVTVMSGQELAEFAWGLASSGHDFLWVVRPDVVKGDTSSAAALPPGFLEATKGRGLVASWCDQEAVLRHEAVGLFLTHSGWNSTQESLSSGVPMLSWPFFAEQQTNCRYKCVEWGVAMEVGDDVRREAVEATIREAMGGDKGKEMARRAAEWKEVAAGAAARSIANLDTLINDVLLSPARLGGSLKTT

SEQ ID NO: 12546 - protein, 219 aa, Zea mays
  VARIANT 91: note = Ancestral polymorphism is P, Derived polymorphism is S
MATLARHLILCSSSPSQRRRRPLPPDATAGTQQQQQQQAPPPQPSTTRRLAVAASAALAATAALSARRPAPPPPAMAAEAAVPPAPPTPASPGTVPRWGTRSYVRERFFEPELTAEEAAARIRQTAEGMRTLRPMLETMSWKYVLFYVRLKSKYLGLDLTTAMAGVPAGRRADYVRVANELVDNMTEFDRFVRTPKVYESYLFYEKTLKSLDDVAEFLV

SEQ ID NO: 12547 - protein, 121 aa, Zea mays
  VARIANT 76..121: note = Derived polymorphism lacks residues 76 to 121
MAPRSRLLDLERHDVLSFYGGGAYHQSASASAWPPTATGSFSGPIDFLVAALLLHLVVPFPHAAAAVCGALYVAYCFLLDRSAQVSSWPSAAAAMPSAEPSRPTTPGKVAAMQVAAGLRLP

SEQ ID NO: 12548 - protein, 111 aa, Zea mays
  VARIANT 68: note = Ancestral polymorphism is R, Derived polymorphism is C
MAPRSRLLDLERHDVLFFYGDGAYHQSESVVVLVVVVAALLLLLVAPFPHAAAVCGALYVAYCLLLDRAAKASSSSSSCPSTDTAAPPAADASRPTTRGTVAGYMIVQKQN

SEQ ID NO: 12549 - protein, 376 aa, Zea mays
  VARIANT 78: note = Ancestral polymorphism is D, Derived polymorphism is Y
  VARIANT 81: note = Ancestral polymorphism is W, Derived polymorphism is C
MEHDVDYHHHHHQQQQEEEEEAMELPPGFRFHPTDEELITHYLARKAADPRFAPRAVGEADLNKCEPWDLPSRATMGDKEWYFFCVKDRKYPTGLKANRATESGYWKATGKDREIFRGKALVGMKKTLVFYTGRAPRGGKTGWVMHEYRLQGKHAAAATSSSLVVPSSVRAGASSKQDEWVLCRVFKKSIEPPSVPGSKRSSSVACMGTEGTGVGVGPSSMSTEDDFAACAALPPLMDVSGGGANMSLSAAAAAAAASIELTPPAAPAPHVTCFSNAPLEGQFLNPPFLLPSAAAAADHIALAASASPFLASMMMQQQAQYAGDAGVVHGDGLLQGAGGWYGKLAGERERLSGGGVPAEISSTRHCMDHEASFWGF

SEQ ID NO: 12550 - protein, 344 aa, Zea mays
  VARIANT 305: note = Ancestral polymorphism is C, Derived polymorphism is R
  VARIANT 301: note = Ancestral polymorphism is G, Derived polymorphism is S
  VARIANT 293: note = Ancestral polymorphism is Y, Derived polymorphism is H
  VARIANT 290: note = Ancestral polymorphism is G, Derived polymorphism is A
  VARIANT 281: note = Ancestral polymorphism is T, Derived polymorphism is I
  VARIANT 239: note = Ancestral polymorphism is C, Derived polymorphism is R
  VARIANT 235: note = Ancestral polymorphism is D, Derived polymorphism is V
  VARIANT 233: note = Ancestral polymorphism is K, Derived polymorphism is E
  VARIANT 204: note = Ancestral polymorphism is M, Derived polymorphism is T
  VARIANT 202: note = Ancestral polymorphism is M, Derived polymorphism is K
  VARIANT 123: note = Ancestral polymorphism is D, Derived polymorphism is A
  VARIANT 117: note = Ancestral polymorphism is G, Derived polymorphism is V
  VARIANT 36: note = Ancestral polymorphism is D, Derived polymorphism is N
  VARIANT 31..344: note = Derived polymorphism lacks residues 31 to 344
  VARIANT 23..344: note = Derived polymorphism lacks residues 23 to 344
MGAHIDRSLNDGRGPPVFKICGQIHHRIGSLLPMTDQPPKFLQLYVYDTSHEVNNQIRSLSSDDAPDSPIQPQIVHELLQMLDTHNPFAKKFRIAKERIIEHADEEFIIRIIGAKEGDHVQYDMPTTDDLAMLVIGDFSLETFKRDIIIETRNYELKRISSLHPAYMALQYPLLFPYGERGFQIGVMYSGLQNRQANSRVRMTMQDYYCYQFHYKPGQPNPFLSYGILSNQAKVDARACIDENRLTYILNNQDKLRMENLQGISDAVSRGCINGEEMGKTIVLPASHIGGRRYMIQNYHDSIAICRVHGPPDFFVTFTCNAKWPEIIESLYHCGQKNSDAPDIA

SEQ ID NO: 12551 - protein, 144 aa, Zea mays
  VARIANT 120: note = Ancestral polymorphism is A, Derived polymorphism is V
  VARIANT 115: note = Ancestral polymorphism is R, Derived polymorphism is M
  VARIANT 109: note = Ancestral polymorphism is R, Derived polymorphism is C
  VARIANT 95: note = Ancestral polymorphism is S, Derived polymorphism is F
  VARIANT 89: note = Ancestral polymorphism is L, Derived polymorphism is R
  VARIANT 84: note = Ancestral polymorphism is T, Derived polymorphism is I
  VARIANT 79: note = Ancestral polymorphism is R, Derived polymorphism is H
  VARIANT 73: note = Ancestral polymorphism is R, Derived polymorphism is M
  VARIANT 69: note = Ancestral polymorphism is L, Derived polymorphism is S
  VARIANT 5: note = Ancestral polymorphism is R, Derived polymorphism is C
MGVVRRLLLRYQWRLTAMEDLSIEAKEAAVRIPHPPCGGLPPSTHPPHPLSSPSIASSSYYRKYKEDMLMVSMMEGPRRTEKPTGVIFRKVCFYSWIKTHLASRVVVHRVLKADRKLWLAAVMHGEDRGIAPNKPLISKDHERT

SEQ ID NO: 12552 - protein, 155 aa, Zea mays
  VARIANT 137: note = Ancestral polymorphism is D, Derived polymorphism is N
  VARIANT 133: note = Ancestral polymorphism is L, Derived polymorphism is F
  VARIANT 124: note = Ancestral polymorphism is V, Derived polymorphism is D
  VARIANT 122: note = Ancestral polymorphism is V, Derived polymorphism is I
  VARIANT 110: note = Ancestral polymorphism is E, Derived polymorphism is K
  VARIANT 103: note = Ancestral polymorphism is L, Derived polymorphism is P
  VARIANT 100: note = Ancestral polymorphism is E, Derived polymorphism is K
  VARIANT 99: note = Ancestral polymorphism is T, Derived polymorphism is I
  VARIANT 96..155: note = Derived polymorphism lacks residues 96 to 155
  VARIANT 74: note = Ancestral polymorphism is A, Derived polymorphism is T
  VARIANT 73: note = Ancestral polymorphism is P, Derived polymorphism is Q
  VARIANT 54: note = Ancestral polymorphism is S, Derived polymorphism is L
  VARIANT 51: note = Ancestral polymorphism is R, Derived polymorphism is I
  VARIANT 23..155: note = Derived polymorphism lacks residues 23 to 155
  VARIANT 20: note = Ancestral polymorphism is R, Derived polymorphism is H
  VARIANT 12: note = Ancestral polymorphism is S, Derived polymorphism is L
  VARIANT 5..155: note = Derived polymorphism lacks residues 5 to 155
MLQTRQTPNSILVAGSDNQRSQWTKDVVEYLQHILDEFCSKEGAFVHPSFREQSSPGPIAGTNQIKMKTEASPAAGDIEEPLVHFKWWYMVRLIQWHLTEELLVPSVLIEWLSNQLQERDSVDVLELLLPIMLGLVDTISLSQTYVCMFVRIFLL

SEQ ID NO: 12553 - protein, 336 aa, Zea mays
  VARIANT 16: note = Ancestral polymorphism is G, Derived polymorphism is D
  VARIANT 164..336: note = Derived polymorphism lacks residues 164 to 336
  VARIANT 197..336: note = Derived polymorphism lacks residues 197 to 336
MIDAGAEHTVAVTEDDDLYGWGWGRYGNLDHPPDKQKQGVKITLDVVVLKHPSVENSIRGMQLLCCEVVEKTDAVVYRGKMCFNAFDEEADLDVLDHPVLNLFYYLLVEILPSSLVLYILRRIPTKLRLSQYHPIWSPSSAQLLLSLSLDNKFPSLCGFLLPLWSLTDMDSTNVYAYISIISLIVCIPPALIFEGPQLRQHGFSDAIAKVGLTKGASSSAAQRLTVDTGLPVLPGLDDILDVPEGLDGQGNDISSWFTDGLDDSLQDIDLSGALEIPDDDLTQLGFMLGGLTDSFDLGMNMLLGGYKEDDGGSSKSHGKSGNRKKHLKNSKKRKRH

SEQ ID NO: 12554 - protein, 225 aa, Zea mays
  VARIANT 190: note = Ancestral polymorphism is R, Derived polymorphism is I
  VARIANT 176: note = Ancestral polymorphism is R, Derived polymorphism is C
  VARIANT 102..225: note = Derived polymorphism lacks residues 102 to 225
  VARIANT 32..225: note = Ancestral polymorphism lacks residues 32 to 225
  VARIANT 17: note = Ancestral polymorphism is P, Derived polymorphism is L
MATNPSNGAGADVPAAPAAVRLSVAAQAAAIQPSSPRFFFSSLAGTNPASPHRRIAIAVDLSDVVSPRPRDGGCAGSPSPRPPWSSVRPLPGAETRSVSPRRRSLDPVLSSAWRCLLPSFTSATNPRYRSTTNVLRYDVAPEVRWLSEDKYKNLKVVVEIDEVVDAEKAAEKELQRRHKALGLLRIVADRVILSSSHVVASRHKLPTSCDSDLLCLTSSRNAQLH

SEQ ID NO: 12555 - protein, 77 aa, Zea mays
  VARIANT 21..77: note = Derived polymorphism lacks residues 21 to 77
  VARIANT 41: note = Ancestral polymorphism is T, Derived polymorphism is I
  VARIANT 54..77: note = Derived polymorphism lacks residues 54 to 77
MKKGLRSRIFLGCDNKPLSRQEIMDVVNNSGKFDTKFGGFTGTDGPLGKRMENSKTRVEIGWEPKYPSFTEFLGISS

SEQ ID NO: 12556 - protein, 469 aa, Zea mays
  VARIANT 1: note = Ancestral polymorphism is M, Derived polymorphism is R
MGDPRARTSAVAAGELRPPEPALDPLEFLSRSWSASGRALAPTPPPPPAAFAASPIAEDAACELDDGGVVAAASGSSFSFASAATSQLIMERILAQSQEVAPLTSGRLSHSSGPLNGGGSLSDSPPVSPEIDDAKYCRAASTPKAQAYRAGNKTVGRWLKDRREKRKEETRAHNAQVHAAVSVAAVAAAVAAVAAATATASASGGKDERAARTDMAVASAATLVAAQCVEAAEAMGAEREHLEAAVGSAVSVRTPGDIVTVTAAAATALRGAATLKARALKEVWNIAAVIPVEKGPGPVGGGGGGHHHQHHQKHGAPKQQLHRKMDSDGSSVSDLSLEEENSFLGICSQELLARGTELLKRTRKGALHWKVVSVYINRMGLVMLKTKSRHVAGTITKKKKSVVVEVCRDVPAWPGRHLLEDGGHRRYFGLRTAERRVVEFECRSQREYEMWTKGVARLLSVAAERKRLA

SEQ ID NO: 12557 - protein, 236 aa, Zea mays
  VARIANT 80: note = Ancestral polymorphism is P, Derived polymorphism is S
  VARIANT 88: note = Ancestral polymorphism is G, Derived polymorphism is D
  VARIANT 90: note = Ancestral polymorphism is Q, Derived polymorphism is L
  VARIANT 106: note = Ancestral polymorphism is M, Derived polymorphism is I
  VARIANT 116: note = Ancestral polymorphism is A, Derived polymorphism is V
  VARIANT 145: note = Ancestral polymorphism is G, Derived polymorphism is R
MKCRSDAPGGGDGHRDRAPAPVATGVGGSPPGERSKKQRTEEPSSSSSVVGECSSSSSQALPPPLPEQLLQDAGVGEQPPPGPEPAGGEQARVPDLGEDLVFEVLMRAEARTLAAAACVSRGWRLLARDERLWEAACVREWACTGFSEQMLRSVVLPLGGFRRLHEMYIRPVQRRAAGAPRGQQRRQLPVRMGRDQVQVSLSLLSTSFFLKMPNAPPPPPKDKDKDGDKNGGGQCG

SEQ ID NO: 12558 - protein, 225 aa, Zea mays
  VARIANT 103..225: note = Derived polymorphism lacks residues 103 to 225
  VARIANT 71: note = Ancestral polymorphism is I, Derived polymorphism is N
  VARIANT 44: note = Ancestral polymorphism is R, Derived polymorphism is C
  VARIANT 33..225: note = Derived polymorphism lacks residues 33 to 225
MARQPWSNNGHRNSPSNSLDGGVPGPMPLVPFQEELAVGCEEIRRIAADNTLVLEDILGLRQELAVIEDEIHILAKQTIPRLRVDNEMEYRDIIQGGMKLEEQMHALKLIKEEVLVLSSEKMELEALCKELSVKVQSLYRELEQIENKQIPATREGLHDIQAEISRARMAYEHEKRAKVELLEESQAIESDFINIKMEAQRLRTELEKRRSGVFKHHAFGSYYKR

SEQ ID NO: 12559 - protein, 136 aa, Zea mays
  VARIANT 34: note = Ancestral polymorphism is R, Derived polymorphism is C
  VARIANT 77: note = Ancestral polymorphism is A, Derived polymorphism is V
  VARIANT 96: note = Ancestral polymorphism is H, Derived polymorphism is R
  VARIANT 131: note = Ancestral polymorphism is I, Derived polymorphism is S
MDTSITFHKMGATNDSPSGIKRIVVNMSSTSSQRGYPAQRWCAANERNVDLFKNLVHEYDYTYWSCSVARLGYSGTVVISRVQPISVQYGLGIPEHDQEGRLITLEFDDFYLVNAYVPNSGRGLRRLIKAILPSCC

SEQ ID NO: 12560 - protein, 52 aa, Zea mays
  VARIANT 3: note = Ancestral polymorphism is D, Derived polymorphism is E
  VARIANT 4: note = Ancestral polymorphism is T, Derived polymorphism is I
  VARIANT 11: note = Ancestral polymorphism is D, Derived polymorphism is Y
MRDTCSLEHTDNIGLFVLPAVVYDVSSESLNNFGESSDVFLQFLKNIQRPDF

SEQ ID NO: 12561 - protein, 265 aa, Zea mays
  VARIANT 196: note = Ancestral polymorphism is A, Derived polymorphism is V
  VARIANT 173: note = Ancestral polymorphism is R, Derived polymorphism is L
MQVPCPQWSVPTGPPPPPSPPLESKQGAQCDPVLRGRPIGPGRHACPLPQVRRPAAVRDAPRRKRASAMDPVSEELERRSRYLNSLIRRTKLSATPAPPPQPEPEPEHEVAPQNPEPEPETAVGKREEAKADPVVVEEEKREAKVAGDGKGKEIKGKDDGGPKEDNSRKVSVRVRAADMPLPLQRRAVRLAYEAIVAMPRLDSKRLALALKKEFDTAYGPAWHCIVGTSFGSYVTHSLGGFLYFSVDKAYILLFRTAVEPLAHPR

SEQ ID NO: 12562 - protein, 334 aa, Zea mays
  VARIANT 40: note = Ancestral polymorphism is A, Derived polymorphism is E
  VARIANT 54: note = Ancestral polymorphism is S, Derived polymorphism is L
MRIAVVAPVAAAYPCSSSLAAPASATSRAHVAAAGMSYRASSFVGGGLAAVVASVAARPRRAGSGRGDALGCKCLFGLGVPELAVIAGVAALVFGPKQLPEIGRSLGKTVKSFQEAAKEFESELKKEPGEGGDQPPPATPTATGLCRVTLQFWDDLAIVASEHVKKGDRIFVSGRLVSDTVDEGPEKRHVYYKLAVQQLNFIESQPVRLYEPEASQDALGGRRADYFNSISNSTEDKNRDNMSSSRSTEELWQVFFANPLDWWDNRTNKKNPRYPDFKHKQTGEALWVDGRNNPNWVISQLAVLDSRMSSLQDNERKPVSYMYADEFMTLDGNR

SEQ ID NO: 12563 - protein, 596 aa, Zea mays
  VARIANT 441..596: note = Derived polymorphism lacks residues 441 to 596
  VARIANT 42: note = Ancestral polymorphism is G, Derived polymorphism is D
MVSGAGHGGYGGGDDGQAVDFRGNPADKSRTGGWLGAGLILGTELAERVCVMGISMNLVTYLVGELHLSNSKSATVVTNFMGTLNLLALVGGFLADAKLGRYLTIAISATIAATGVSLLTVDTTVPSMRPPACLDARGPRAHECVPARGGQLALLYAALYTVAAGAGGLKANVSGFGSDQFDGRDPREERAMVFFFNRFYFCVSLGSLFAVTVLVYVQDNVGRGWGYGVSAVAMALAVAVLVAGTPRYRYRRPQGSPLTAVGRVLAAAWRKRRLPLPADAAELHGFAAAKVAHTDRLRWLDKAAIVEAEPAGKQRASAAAASTVTEVEEVKMVAKLLPIWSTCILFWTVYSQMTTFSVEQATRMDRHLRPGSGAGGFAVPAGSFSVFLFLSILLFTSLNERLLVPLAARLTGRPQGLTSLQRVGAGLALSVAAMAVSALVERKRRDAANGPGHVAVSAFWLVPQYFLVGAGEAFAYVGQLEFFIREAPERMKSMSTGLFLVTLSMGFFLSSLLVFAVDAATAGTWIRNNLDRGRLDLFYWMLALLGVANFAVFVVFARRHQYKATSLPASVAPDGTGHKEMDDFVAVTEAVEGVDV

SEQ ID NO: 12564 - protein, 589 aa, Zea mays
  VARIANT 371: note = Ancestral polymorphism is D, Derived polymorphism is V
MRSAAAMMPLVEAAATGYGCWQAFLVAPVLYSAWASPFELAVERAVTFPLLVADLVADAFFFVDIAVSIVVAWLPLRGSSCATNLFYDDRKKAYVRNLRPWTLAMDVASTIPFQVIYLLGTSWGAAAAWLSPCRYLSLLRLWRLRRVSELFAKLEKDVRLNYYWTRLVKLVGVTLLAVHAAACVLLWMASHYSGPKERTWLSRGFETSSVWAGYTRAVYWSLTTLTTVGYGDLHPANPGEMAFAVFYMLFNLGLAAYIVGNMTNLAVSDSTALLALRDTLRGVSMFGAVNRLPEALTEQMAETVRLNFDMTEQLLQQQLLSEMPRAVRSGIAQHLFRDTVEGAYLFRGVSEGLVVDLVADVTPQFFPPKADIVQQNETPTDFYIIVSGSVDVLATAPDGTETVVSRACRRGMAGEIGVMLNIPQPFTVRCRRLTQAVRVSQGHLLRVVRPHTADADRVFCNFVRQHLGSPVWKVARKETPLFGEIADELEVGAATAASMSRRRSEMFDFDPEADRLRMSLRREAKRRVVIRHKSLNAAGKLVFLPGSMRELRRVAEAKLGEVVTTVLTVDGAEVEDIDVLRDGDHLFVC

SEQ ID NO: 12565 - protein, 104 aa, Zea mays
  VARIANT 78: note = Ancestral polymorphism is P, Derived polymorphism is L
MASLTMMASFAAVAVAAPSRRGTFAVVRSAKVDRCQEPATLAATEARPAADGRRAVMLAAAAAAVAAIGGAGAAMAGPKNGTPEAKKKYAAICVTMPTAKVCHN

SEQ ID NO: 12566 - protein, 327 aa, Zea mays
  VARIANT 75: note = Ancestral polymorphism is E, Derived polymorphism is D
  VARIANT 68: note = Ancestral polymorphism is G, Derived polymorphism is E
  VARIANT 47: note = Ancestral polymorphism is F, Derived polymorphism is S
  VARIANT 40: note = Ancestral polymorphism is V, Derived polymorphism is A
  VARIANT 29: note = Ancestral polymorphism is A, Derived polymorphism is T
  VARIANT 16..327: note = Derived polymorphism lacks residues 16 to 327
MGLGEAAGRLLAAVDWEREAYPAYDDFLALPAFVLFFPTVRFLLDRFVFKVRLPLPSFVFPSVVSVKGHQRANNDTEEARKKIRKFKESAWKCVYFLSGELLSLSVTYNEPWFTNTRYFWVGPGEQVWPDQKIKLKLKAVYMYAAGFYTYSIFALMFWETRRSDFGVSMSHHVATVVLIVLSYVFRFARVGSIVLAIHDASDVFLEVGKMSKYSHCDWLANVSFLFFVISWVLLRLTYFPFWILRSTSYEVLLTLDKKKHNFDGPIYYYVFNSLLFSLLVLHIYWWVLIYRMLVRQIKTRNVGDDVRSDYERTSIVPHEIHRSRAMG

SEQ ID NO: 12567 - protein, 369 aa, Zea mays
  VARIANT 22: note = Ancestral polymorphism is L, Derived polymorphism is R
MEEVEEANREAVESCRRVLALLSHPHDPAQVRSIALGTDEACTKFRKVVSLLSNGEVGTGEAGPSGTSASASHPRAKLVSRRQNPGFLTQKGFLDSNTPVVVLNSAAHPSPTSAQVHPRAGALDTEGVHPLGVGGPPKLVQPLSAHFQFGNVSSRYQQLPSHHHRHQQQEKLQAAEMFKRSNSGINLKFESASGTGTMSSARSFLSSLSMDGSVVASLDGKLPSSSSSFRLIGAPAMSDPANAAQQAPRRRCTGRGKDGTGKCALAGRCHCSKRSKKLRVKRSIKVPAVSNKIADIPPDEYSWRKYGQKPIKGSPHPRGYYKCSSVRGCPARKHVERCVDDSAMLIVTYEGEHNHTGMPAQSAAAAAQV

SEQ ID NO: 12568 - protein, 273 aa, Zea mays
  VARIANT 22: note = Ancestral polymorphism is M, Derived polymorphism is T
  VARIANT 49: note = Ancestral polymorphism is H, Derived polymorphism is Y
  VARIANT 125: note = Ancestral polymorphism is I, Derived polymorphism is F
MQEKVVLLLHGFLGTSEDWVPTMKALAPSARVIAIDLPGHGESQILQRHKNSEQPAVTVQLVADLLLKLIYHITNGEVVVVGYSMGARIALHMALNQDHKIRGAVTISGSPGLRDEASRRRRIAIDKSRAQFLMCCGLECFLQTWYSGKLWTSLREHPEFNSLVRTRSKHKNIKALAKVLADSSVGRQKSLWEDLKHLKRPLLVVAGEKDAKFKDISQKMRTEIMSHAECGSDGPKGKELCEVLIIPDSGHAVHVENPLPLVRAVRKFLLKLY

SEQ ID NO: 12569 - protein, 543 aa, Zea mays
  VARIANT 21..543: note = Derived polymorphism lacks residues 21 to 543
MDDELDGVMASSSDAVLRTTRESSMTMRSSCLTMYSVVQPPWTTSKRRLRRSLSYTAAHADTVMTRKMVEDKSSSQDTVQKSGHAVLGNVSYDKDVVEIKLADAIDSDNYVGNFVKDVCVDDGALLHRTASEEKPVDRRSSLDLSCQMIGADSDISYYGKEDHSRTSAHELKPEAVALAPLCNIGADSGREYDLEDRTGTGSIAGSPGEKKISLQELLLLESAEESRNTGAVNSESSEKHKCPLNEEEAAQTSKDGDPDAETVLANTFEHISDGISSKEKGSGCPATMARDQVDTATALDVREPQKLDRYNPSVDRRSREYTSVPECSIPGITDAASSTGSICSFHNATSSTATAGLGEGETLEPGADTLSAGSSDIGSSEKSHDNHSGSMFSKPIAGAYGNGKKQEKHGQMDEEHGIGTADDAAASTSSASTLAQDGSAPAVQETVPGSSSSSSRPAARAGDDPDLSGPSIMSGPVSMSGHIAYSGNVSLRSDSSTTSTQSFAFPVLQREWTSSPVRMAKAERRRSGGRHRVWRKGIICCKF

SEQ ID NO: 12570 - protein, 140 aa, Zea mays
  VARIANT 92..140: note = Derived polymorphism lacks residues 92 to 140
  VARIANT 68: note = Ancestral polymorphism is E, Derived polymorphism is K
MSSTTDWADRQRWHGGSGGLGGGLGKARGQTGRGDAARRQQMQACSSSAQSSQTLEALLKKLKKKVGEAKIVELRTHATFEEAVLPLQGTKQEELAAMAAARSPYNNHPQQWQYSYAAAPTSPLNSYHYHPSPVGGYGYS

SEQ ID NO: 12571 - protein, 190 aa, Zea mays
  VARIANT 66: note = Ancestral polymorphism is L, Derived polymorphism is Q
MRRLSCPDGPSDGDDQAVTAASEDDVAMGDAAPSHSPGTVGGDERAVVVYGDGSSSRRIDAPRLALRAGVDADWIRVMFREANSRTVRELLAGAALERRSEPDLALAVVPWVAVAPTTAEETAEASTAVEAADDGADGEGAAAMDVEQDEVQEGGRPWTGQDQAYDAAVGEELVYRWPQHCWASPMMWSC

SEQ ID NO: 12572 - protein, 111 aa, Zea mays
  VARIANT 25: note = Ancestral polymorphism is T, Derived polymorphism is I
  VARIANT 37: note = Ancestral polymorphism is V, Derived polymorphism is M
  VARIANT 38: note = Ancestral polymorphism is W, Derived polymorphism is R
  VARIANT 75: note = Ancestral polymorphism is P, Derived polymorphism is L
  VARIANT 81: note = Ancestral polymorphism is A, Derived polymorphism is G
MDDGHKHRRGSHGDIIFLTSPGEVTSYSSRLLGYNAVRRQVSSGMTWSKLPSPSRLMGNIVVPTLKAFSLRAYDPKEVTIAGGDQEAVVLSFWEHIGHDPSTPDSWTKKQW

SEQ ID NO: 12573 - protein, 112 aa, Zea mays
  VARIANT 62: note = Ancestral polymorphism is G, Derived polymorphism is D
  VARIANT 58: note = Ancestral polymorphism is R, Derived polymorphism is C
  VARIANT 39: note = Ancestral polymorphism is E, Derived polymorphism is K
  VARIANT 35: note = Ancestral polymorphism is E, Derived polymorphism is K
  VARIANT 17: note = Ancestral polymorphism is A, Derived polymorphism is V
  VARIANT 11: note = Ancestral polymorphism is M, Derived polymorphism is T
MAVVGAVALSTPTPTRAKKPDVTRYRKLGSGVILEDVVKGEGAEAREGDLVQFNYVCRRANGYFVHRCVVEFLDAIALLFGACTEDACYTTPDFESDRVQSKSLSLKTKLMA

SEQ ID NO: 12574 - protein, 161 aa, Zea mays
  VARIANT 136..161: note = Derived polymorphism lacks residues 136 to 161
MVIRMEEGGSEKGHAKAMKVAAATPGVESVTLSGKGKSLLRVVGDGVDCNHLTTRLRRKVGHADVVELRTIHSAYSGGSRTGGSLSRDAGYGNGETHYYGYAYPTTTTTATAAPDYYYHYGQQPSSQYYSYQPPPYAAPAAAVHYEYYPAAATDPNGCSIM

SEQ ID NO: 12575 - protein, 137 aa, Zea mays
  VARIANT 58: note = Ancestral polymorphism is A, Derived polymorphism is V
  VARIANT 52: note = Ancestral polymorphism is S, Derived polymorphism is P
  VARIANT 26: note = Ancestral polymorphism is A, Derived polymorphism is T
  VARIANT 20: note = Ancestral polymorphism is A, Derived polymorphism is T
MKQKIVIRVHMECDRCRSKALALVAAAAGVDSVALAGDARDQVVVVGDDVDSVKLTSALRRKVGPADIVQVAAEAKKVDAGSKPPAPVATLPEFVASSTWYCQQYPQPAAVVYGHPADGYAYYGCETRTDSIYCSIM

SEQ ID NO: 12576 - protein, 98 aa, Zea mays
  VARIANT 2: note = Ancestral polymorphism is R, Derived polymorphism is C
  VARIANT 3: note = Ancestral polymorphism is R, Derived polymorphism is Q
  VARIANT 42: note = Ancestral polymorphism is M, Derived polymorphism is I
  VARIANT 57..98: note = Derived polymorphism lacks residues 57 to 98
  VARIANT 71: note = Ancestral polymorphism is L, Derived polymorphism is P
MRRKSLRGQTHTIQSGRKRRMSIKESVVGRSGGGGGATSLTMMNLNPANLMGKSLSQGSRDEMTRMRRKRPKVGLGQVRWSGGRWGFNGCSSQQSVVN

SEQ ID NO: 12577 - protein, 88 aa, Zea mays
  VARIANT 20..88: note = Derived polymorphism lacks residues 20 to 88
  VARIANT 26..88: note = Derived polymorphism lacks residues 26 to 88
  VARIANT 33: note = Ancestral polymorphism is V, Derived polymorphism is I
  VARIANT 34: note = Ancestral polymorphism is R, Derived polymorphism is Q
  VARIANT 55: note = Ancestral polymorphism is D, Derived polymorphism is G
MTQKLSFLDIKNYTGIEDKELRQAPQSLACGKVRVLQKIPQGRDVEGKDEVVFNDDFSAPLYHIKLIYVLMGKCNSNEGDGRRNHEHH

SEQ ID NO: 12578 - protein, 238 aa, Zea mays
  VARIANT 16..238: note = Derived polymorphism lacks residues 16 to 238
  VARIANT 35..238: note = Derived polymorphism lacks residues 35 to 238
  VARIANT 63..238: note = Derived polymorphism lacks residues 63 to 238
  VARIANT 92..238: note = Derived polymorphism lacks residues 92 to 238
MSSKFSGSDQSSFVVQSTPSYVWVINECIKSIVEQLVIAVKTSQNSNEGSTKELKAIVLELQQELQAKDVQISTISSDLSCQLRAAESSAKQFSVVSNVEEKLTDELSRKDQEIEGLVQALDEEEKELEILENKSLQLEQMLQEKEFALKTSEVYRTKALAKLATTVDKFDELHSLSENILAEVENLQLQLQERDSEISFLRKEVTKSTNELLTTEESNKNYSSQLNGFMKWLERELL

SEQ ID NO: 12579 - protein, 123 aa, Zea mays
  VARIANT 95: note = Ancestral polymorphism is P, Derived polymorphism is R
MKQKIVIKVQMSCDKCRSKAMEVVAATLGVDSVAIDGEGRDKVVVVGDGVDSIKLTGALRKKVGPAHLLQVGEAKKDDKKPPPAVVPAYYPPPHPVNVVYDHPAGYPWYGYQAQHDTTSCSIM

SEQ ID NO: 12580 - protein, 657 aa, Zea mays
  VARIANT 230: note = Ancestral polymorphism is K, Derived polymorphism is I
MTHCSVWIPTVTPKPSIFLPDHKDQAPQKIIVLTESVKWSSAINTLLDIGSRCKSTYLFESGVRCGLHERSSSTPRTRISRSDPQARLSLRRQFLAGVLPASPFIPSSDFSCLWLELMDGQVETFVGDEEGGSPQVPYDGEQPTLYDSVAKQYSEELGDQYNEQPRAQYDEGSGNPYNDYEEQANLYSEETGNRYNEDPADSYQEEQENAFSGGINQQDNLQVNNVDDNKWPGWPGESVFRILVPAQKVGAIIGRKGEFIKKMCEETKARIKILDGPPGVPERAVSAFMEFVMISAKDEPDAPLSPAMDGLLRVHKRITDSSDGESSQPQRSAGNIGPTRLLVPSSQAGSLIGKQGATIKSIQDSSKSIVRIVENVPPVALNDDRVVEIQGEPLGVQEAVELISSHLRKFLVDRSVLPLFEAHASFLFHMKMHGMPREQPVPPPQHWGPPQTWIRPPNIPPGGPGFGGNPQFMHPRPQDSYYPSPDVPHMEKQPHYGISAYGREAPPSGASATGNQPPSHAGSQVAHDMHIPLAYADAVIGAAGASISYIRRHSGATVTIQESRGAPGEMTVEITGTAAQVQTAQQLIQNFMAEAAPPPPGPAPASNPPAPPVDPSYGSYPPPYGAAPSYGSSAAAGPPQYNGGNYGGPTYPPSYGY

SEQ ID NO: 12581 - protein, 122 aa, Zea mays
  VARIANT 43: note = Ancestral polymorphism is Q, Derived polymorphism is R
  VARIANT 26: note = Ancestral polymorphism is A, Derived polymorphism is E
  VARIANT 11: note = Ancestral polymorphism is P, Derived polymorphism is S
  VARIANT 8: note = Ancestral polymorphism is I, Derived polymorphism is S
MAKQKIVIKVPMASDKSRSKAMALVAAAGGVNSVAIAGDGKDQVVVVGEGVDSIKLTTILRKKMGDAQLVEVAEDKKKEEKKPDPVAEAAAAYYNQYYYHYPPPAAVVYDPYPRPGNTCSIM

SEQ ID NO: 12582 - protein, 483 aa, Zea mays
  VARIANT 397: note = Ancestral polymorphism is C, Derived polymorphism is R
  VARIANT 382..483: note = Derived polymorphism lacks residues 382 to 483
MSTARAPRNRFLCNHNRPSFSPPTRANSERHRLRLVTRDRWTAAARRPQLSSMIGSTKPLAAPLHPPCPSGRRLAPPSCAPDSSPALTPAVERPGQSQSDGAPPPPRPDVVASSLALRASPQLNRWSRSRALRSNRRPRLESALSSSSAASVTKTSRPEDAAVAVEDGEDDDVCVEKGCCLCCLGSIAAGIFWLKFYRLKVGCRLGSKRIGHLLPPWGLSTTPKTYNKLATQITLPPSYIAPEDTGKISGTIWTEEVVLHSTTAASRSGEAMQRKMAQPFEAKHQGNQLPVPLVPIIGKGVLEEEVMVSHTWGIAAAGSNTSCFTRTEADPVSFINMVTPPTIEVHRHSCIIHSVPSLPSATHGSMRRMTFFSLISPVLRLQLRRFEYMRDTMVKVRFDNLNSVQLVILSMYFRLPHELETARINELLGNIQAVVTPEMNQTTIIEEFDKGHQLEEVKTVNEQVVVPPVKNLSKQKSQQIQED

SEQ ID NO: 12583 - protein, 239 aa, Zea mays
  VARIANT 1: note = Ancestral polymorphism is M, Derived polymorphism is I
  VARIANT 23: note = Ancestral polymorphism is M, Derived polymorphism is L
  VARIANT 24: note = Ancestral polymorphism is T, Derived polymorphism is A
  VARIANT 31..239: note = Derived polymorphism lacks residues 31 to 239
  VARIANT 52: note = Ancestral polymorphism is N, Derived polymorphism is K
  VARIANT 55: note = Ancestral polymorphism is S, Derived polymorphism is L
  VARIANT 61: note = Ancestral polymorphism is N, Derived polymorphism is D
  VARIANT 66: note = Ancestral polymorphism is H, Derived polymorphism is Y
  VARIANT 73: note = Ancestral polymorphism is P, Derived polymorphism is L
  VARIANT 77: note = Ancestral polymorphism is F, Derived polymorphism is S
  VARIANT 80: note = Ancestral polymorphism is A, Derived polymorphism is V
  VARIANT 91: note = Ancestral polymorphism is G, Derived polymorphism is D
  VARIANT 92: note = Ancestral polymorphism is E, Derived polymorphism is V
  VARIANT 93: note = Ancestral polymorphism is Q, Derived polymorphism is H
  VARIANT 110..239: note = Derived polymorphism lacks residues 110 to 239
  VARIANT 117..239: note = Derived polymorphism lacks residues 117 to 239
  VARIANT 120: note = Ancestral polymorphism is H, Derived polymorphism is Y
  VARIANT 125: note = Ancestral polymorphism is H, Derived polymorphism is Q
  VARIANT 127: note = Ancestral polymorphism is I, Derived polymorphism is T
  VARIANT 132: note = Ancestral polymorphism is G, Derived polymorphism is S
  VARIANT 136..239: note = Derived polymorphism lacks residues 136 to 239
  VARIANT 138: note = Ancestral polymorphism is P, Derived polymorphism is S
  VARIANT 153: note = Ancestral polymorphism is V, Derived polymorphism is L
  VARIANT 165: note = Ancestral polymorphism is Y, Derived polymorphism is H
  VARIANT 170: note = Ancestral polymorphism is G, Derived polymorphism is R
  VARIANT 184: note = Ancestral polymorphism is Y, Derived polymorphism is H
  VARIANT 208: note = Ancestral polymorphism is W, Derived polymorphism is G
  VARIANT 228: note = Ancestral polymorphism is H, Derived polymorphism is R
MASNFWSRDKRSRISDILSEYDMTVMDYPQQYEGCPLLQLEMIHHFLKSCENWLSVEGQHNMLLMHSERGSWPVLAFMLARLLLYRKIYIGEQRTLEMVYKQARREFIQQFFPLNPQPSHLRYLHYITRQRGGSEWPPISRPFILDSIVLHVVPRFDADGGCRPYLIVHGQDSSPGNKSAKVLYEMPNAKKHLQRYGQKSNLLSPRFWLVFHEIFKIKNHAIKYLEDHRSSPDPNETLG

SEQ ID NO: 12584 - protein, 579 aa, Zea mays
  VARIANT 39: note = Ancestral polymorphism is R, Derived polymorphism is W
MALAIGGVHVDESSALGRNVFGVKRVVFPVAEMPVPARRLLRKRLRSELDAVRDLLSKAELYSCASGAAGKDDDRLFVPEAAVEDDGRRKASPCAGRKRESTKPDDRERLAGRLASMAAVLPDHVVAFLQDRRAGDADSRGGDGEIETDVQSMKDGALFQLKVLLDKFAPETTPKLVPRAPRVGSGISCLSQARHQEAGDRIPPVQEEGQGINVCGGVSRISIQDIAEEYGELVNGIRVQLLSPLQRKYVDLAEQGGYIDICGDASPVVFPAKTGDSSSPNLSSSSDSDATSSTDSDSSSSSPEAGEPVPAPEADPIQGKHNTHSQPPEPAPEAIQIAEPENQCPATVCAITKSPPAPTVLPKECGTLAQQPPGPPPLEQAPEAVQIAEPGELKEKCVAAGATMHPITGSAPPPAVLPNGNGTSSQPAPVAAQIAQPQVVQPEGVRRARTQTNDLIAMARQEGKRRAMAKARRELLELERAVLPDERIHPLDMELLGIAAFEHVVSTVRDARTAQPRVNYGVGLSVSPGRPSILQQLGLFLKADGGGEEEEGEEERPPPLAVASDGEDMDMEVEDGQIL

SEQ ID NO: 12585 - protein, 124 aa, Zea mays
  VARIANT 70: note = Ancestral polymorphism is A, Derived polymorphism is T
  VARIANT 68: note = Ancestral polymorphism is R, Derived polymorphism is H
  VARIANT 67: note = Ancestral polymorphism is G, Derived polymorphism is D
  VARIANT 62: note = Ancestral polymorphism is A, Derived polymorphism is V
  VARIANT 60: note = Ancestral polymorphism is V, Derived polymorphism is A
  VARIANT 56: note = Ancestral polymorphism is G, Derived polymorphism is S
  VARIANT 53: note = Ancestral polymorphism is D, Derived polymorphism is N
  VARIANT 51: note = Ancestral polymorphism is G, Derived polymorphism is D
  VARIANT 31: note = Ancestral polymorphism is R, Derived polymorphism is C
  VARIANT 29: note = Ancestral polymorphism is G, Derived polymorphism is S
  VARIANT 20..124: note = Derived polymorphism lacks residues 20 to 124
  VARIANT 17: note = Ancestral polymorphism is A, Derived polymorphism is V
  VARIANT 16: note = Ancestral polymorphism is G, Derived polymorphism is S
MFEDCNSVRALLESLGVSFQERDVSMDRSLRDQLWATAGEKVVPPRLFVRGRDLGGAGQVLALHEQGRLTLLLPCGEAGARSRCGTCAGVGFVCDHLGGCFSPTPTPSSSSSCSVAGGRRRCGP

SEQ ID NO: 12586 - protein, 1068 aa, Zea mays
  VARIANT 124..1068: note = Ancestral polymorphism lacks residues 124 to 1068
  VARIANT 861..1068: note = Derived polymorphism lacks residues 861 to 1068
MLEKIGLPPKPSMRGATWVVDASHCQGCSVQFSLFTRKHHCQRCGGLFCSSCTQQRMVLRGQGDSPVRICDPCKKLEEEARHELRYGHKNRATRATTKSASKPEDEILSEILGGGERIQSLDSLLPGRTTSSASTSRRTSSNLSTDAKGDESLSAEAHNYELNNTASIFTPEELRQHAVEEKKRYKTLKSEGKPEEALRAFKHGKELEKQAAALELELRRTRRMATKATNISSAVGTSMTAGSDEVETKRSSTGKKIKKEKNDLASELRDLGWSDADLRDETKAAPMSLEGELTQILREVAPKPLEGKRTGGIDKSQVNALKRQALLLKREGRLAEAKEELKKAKILEKQLEEQEILGEAENSDDDLAAIIRNMDDDKNDDIFIDDSKFPAFNFEQIMVASNDLATDGHFDVTDDDMNDPDMAAALKSFGWSEEDDKQLENLEPVSSNQEGLKEQVLSLKREAVANRRSGNVVEAMSLLKKAKLLEKDLKTEEPDSKVPSLERQKTTHAEDATYAGTNVRPIPTPKSKLAIQRELLALKKKALALRREGKVDESEEELRKGSVLEKQLEELENSSKPPVAKETRSFPSNPPYKVEPPNINLADEVYEPEVTDKDMQDPALLSVLKNMGWEDAGSDSVETTDKASFSAHVVHHKSSKTKGQLQKELLGIKRKALALRRGGKNTEAEEELEKAKVLEQQLAEMEESNNLSASQGVTTAGGDEILLVHASESGTPVVTLCGSPSKPQIETTNPNQGDVGEESRAGRSPALSQPAFTDPLGSEKGSHSPSVVHDRNEHQKTQGDDTLKDEILLHKRKAVAFKREGKMAEAREELKLAKQLEKHLEGAQQDTMDGVGDSITPAVEQNSLVQQPASSSNHTDDITSPPPAQASKRTQPQKAMSSRDRLKIQRESLAHKRNALKLRREGKTAEADAEFELAKELESQLEESDNQSSSSGGKSSEPNDTSVENLLDPQIMSALRSIGWSDMDLSMQSSSAQPLKPVQSSSSQPPQKVEAKSSVAATSKPQSERSQLEEQIKAEKLKALNLKREGKQAEALEALRSAKRLEKKLNSA

SEQ ID NO: 12587 - protein, 311 aa, Zea mays
  VARIANT 104: note = Ancestral polymorphism is S, Derived polymorphism is C
MQAAVGHRGANLGSPSLSRFRYGFRLPGRSRLFSVEGVAAASLRVGSLPQPRTHGSGGFAHLGAMGGEAPRLPHALRRMLIDHQKMACPNLLKAAVLSTMTLLSVPLEASAEMCQPPSSFANMPIFIVVALIGAAVGGLLARQRKAELKRLNNQLRQINAALRRQAQIESFAPGLTYAPVGRTNETDVIVDPRKQQLVTNLRNGKNYMRNQDLDKAIVEFRTALELAESIGDRFEEKKAARGLGASLQRLGKYREAMRQYSKVLELSKETGEDSGCTEAYGAIADCYTELGDLERAAKVYDKYISRLQPGE

SEQ ID NO: 12588 - protein, 96 aa, Zea mays
  VARIANT 19: note = Ancestral polymorphism is V, Derived polymorphism is A
  VARIANT 33: note = Ancestral polymorphism is K, Derived polymorphism is N
  VARIANT 81..96: note = Derived polymorphism lacks residues 81 to 96
MASKALLVLTLLLAATFLAASANEQAKAAKEEKKVEVQDWHGGGGYPGHGGGGGGGYPHCRWGCCNRGYHGGCRCCSHPDQIPEPMYRPELVEVHN

SEQ ID NO: 12589 - protein, 114 aa, Zea mays
  VARIANT 27: note = Ancestral polymorphism is D, Derived polymorphism is V
  VARIANT 43: note = Ancestral polymorphism is Q, Derived polymorphism is R
MASKRLLVLALLLAAVFLAVSGAANDDQAQPRKDGGENKADVQDYRGGGGGWRGGGGYPGRGYPGGGGYPGGGRGGYCRWGCCNRGYYGGCRCCSRADEVPEPMYRPEPTEVHN

SEQ ID NO: 12590 - protein, 683 aa, Zea mays
  VARIANT 544: note = Ancestral polymorphism is T, Derived polymorphism is N
MSTFIGVLVSDPGLQSQFTQVQLRTLQTKFASAKRPNAEHVTIKDLPPMMEKLRGIHEVLSEEEISGFLSETYPDMNQPIEFEPFLKPRKICQEYLNIQAKGSSKSGGKKKLKGSVSFLKASTTTLLHVINESEKTSYVNHINNFLKEDPFLKNFLPLDPASNELFNLVRDGVLLCKLINVAVPGTIDERAINTKKHLNPWERNENHTLCLNSAKAIGCTVVNIGTQDLIEARPHLVLGLLCQIIKIQLLADLNLKKTPQLAELVADDNGKEVEELVTLAPDKMLLKWMNFHLKKAGYKKTVTNFSTDVKDGEAYAYLLSTLAPELSSKTMIETSDPKERAQKVLETAEKLDCTRYVTSKDIVEGSANLNLAFVAQIFQNRNGLSTNTVAPVIEDTPDDVEASREERAFRLWINSLGIPTYVNNLFEDVRTGWVLLEVLDKISPGSVNWKHASKPPIIMPFRKVENCNQVIKIGKELNFSLVNVAGNDIVQGNKKLILAFLWQLMRTSILQLLRNLRSHSKEKEMTDADILIWANSKVKESGKNSHIESFKDKTIADGVFFLELLSAVQSRVVDWNMVKKGEDEEEKKLNATYIISVARKLGCTVFLLPEDIMEVNPKMILTLTASIMYWSLQNQGPYKSSGPQDALLEEEEGEEEEEEEEEEEEEEEDFEGGVEDGVSETTT

SEQ ID NO: 12591 - protein, 139 aa, Zea mays
  VARIANT 24: note = Ancestral polymorphism is P, Derived polymorphism is A
  VARIANT 49: note = Ancestral polymorphism is L, Derived polymorphism is V
  VARIANT 99: note = Ancestral polymorphism is R, Derived polymorphism is G
  VARIANT 103: note = Ancestral polymorphism is L, Derived polymorphism is F
  VARIANT 124: note = Ancestral polymorphism is G, Derived polymorphism is D
MPPSASMPATHTAVYVAAVPLRAPKGPAQLLMSAGYSLGMWDLQHFMVLLRPDPALAQALVFDFQPRDPEDVLAALAVLSRREIPGVVRRRTLRRVPDGRCWLVGHCCDAVGAATRFSERWTTGLVVGEHDCRDYTNDG

SEQ ID NO: 12592 - protein, 109 aa, Zea mays
  VARIANT 9: note = Ancestral polymorphism is L, Derived polymorphism is P
MWSLVRQGLRWGRGRRRRRTARVVDESALGADGGDIDGGGAAAAGGAVVAPTLGGALARALLALACAVRLDGEDVGAAEEAWAATGWRPRADEVSHLMVRESMRYAIYA

SEQ ID NO: 12593 - protein, 548 aa, Zea mays
  VARIANT 76: note = Ancestral polymorphism is P, Derived polymorphism is S
MEQYEVVEQIGRGAYGSAYLVLHKAERKRYVMKKIRLSKQNDKFQRTAYQEKKQVTTGACSCLPPQMSLMASLSNPYIVEYKDGWVDEGTSVCIVTSYCEGGDMAERIKKARGILFSEERVCRWFTQLLLALDYLHCNRVLHRDLKCSNILLTRDNNIRLADFGLAKLLMEDLASSVVGTPNYMCPEILADIPYGYKSDIWSLGCCMFEILAHRPAFKATDMAALVNKINRSSISPMPPIYSSALKQIVKSMLRKNPEHRPTAGELLRHPHLQPYLSESSNCSPIYLPVKPTKGNLVDKQSKKPSSGRKRAVKANGSNGTLETAAEHAVEARDSSTNFSDVSTIGTQEALILQMPVDPDAGSKEEQNVDVVPFQHAAENLMATTDRQVDATIRLKAIRTSNAKEAAPVTVADQKFNEAPIPNEELTIGVVQEQRKDVKPRSYQAGKPEMCDTTVTEESSPISTLKLAHTESAPAEWDHLNIVQQRADALESLLELCAKLLEQERLDELAGVLRPFGEGAVSSRETAIWLTKSLMTPPPKFGESPTKLL

SEQ ID NO: 12594 - protein, 227 aa, Zea mays
  VARIANT 12: note = Ancestral polymorphism is V, Derived polymorphism is G
  VARIANT 27: note = Ancestral polymorphism is G, Derived polymorphism is W
  VARIANT 38: note = Ancestral polymorphism is A, Derived polymorphism is V
  VARIANT 51..227: note = Derived polymorphism lacks residues 51 to 227
  VARIANT 54..227: note = Derived polymorphism lacks residues 54 to 227
  VARIANT 81..227: note = Derived polymorphism lacks residues 81 to 227
MHSSRNFKMLEVRTARRPALADISGGGFFMRTVESPGAVLVNGAVKRPARQFLSPSSNKENVPPVGAFRATPKRRTPLPDWYPRTPLRDITSIVKAIERRRSRLQNAAAQQQIQWTEDPSRSVDPITPVQAEQGGVPTTVDGQGVGSPATCLEDGKLKTSSYPSSDCSLQATPSKPNDPALADLVEKKLSSSIEQIEKMVRRNLKRTSKAAQPSKRTIQRRVLMSMR

SEQ ID NO: 12595 - protein, 528 aa, Zea mays
  VARIANT 256..528: note = Derived polymorphism lacks residues 256 to 528
  VARIANT 250..528: note = Derived polymorphism lacks residues 250 to 528
  VARIANT 213..528: note = Derived polymorphism lacks residues 213 to 528
MDKFLVPAPPHCGEEPAPPPRRHRWRRIIAELDGRIDSRFQHRDSRLLLDSFTEVGAFDHKYYIHGEERCRTYVDRIISASTINFHPVREGVSAIEFDRKGIYIASVTLSGCLTVHDFETLYCSKYGPPCSMPDESSNYVLHISNRIPLNAVRWNPGNQDEIACTSNQSDNVFLFDIGYVSSTPTEVLHKGKSKFPSLYSESCKSLTDITFTSDDKSRIFASGLDGAVYMWDRRSSKTHCLELVASPEAQFNTVKLTVDNRTVFGATKNGTIHVWDLRGGRASAAFQSHNEVQQLMSVKLSTLLGKIASLKEQSNIVSSPILSIDFNPSCSYQLAFHLDDGWYVSPNSPLRIIVHFRNFHLWSGVLNVNNLNVTHLHCPPPAWLEGTDLVLQKQLRKPTWLLTSSIYAVGSSSYDGIYLLDFHPDTSSACHVDYKEETRVSGENQPAGNKFVPLSQRVLSCAAHPLSHTIIAGTQVGFLLCSHRCSCYHKSTRVSEIQSLDDMPFPPRSIFNRASAESQWCLFISIVH

SEQ ID NO: 12596 - protein, 733 aa, Zea mays
  VARIANT 166: note = Ancestral polymorphism is D, Derived polymorphism is V
  VARIANT 167: note = Ancestral polymorphism is V, Derived polymorphism is A
  VARIANT 313..733: note = Derived polymorphism lacks residues 313 to 733
  VARIANT 444..733: note = Derived polymorphism lacks residues 444 to 733
  VARIANT 502..733: note = Derived polymorphism lacks residues 502 to 733
MSPPLHVSTLSCFLPSSFLPGSRLSKQPNLKAAKESRRSSGARAAHPKQAEQSKAGKQPWSSGGGARPCGRRPANAQRVNRTSTRAQQEGRGSHQPGKTAARRKQKPETEFYSVALWLTQKHLENHTQQNKHQHFILCLGIPIIIMWKRNPFGGKAHSGLDGRTIVVRSLKISVRNVIAQGGFSCVYLACDTVHPSKMYALKHIICNDSESLDLVMKEIQVMNLLKGHPNVVTLVAHDVVDMGRTKEALLVMEFCEKSLVSAMESRGSGYYEEKKVLLIFRDVCNAVFAMHGQSLPIAHSWSCGRANTVCKQLFLVLVCRIRDLKAENVLLGSDGAWKICDFGSTSTNHKCFNKPEEMGIEEDVIRKHTTPDYRAPEMWDLYRREVISEKVDIWVWFRVNELLSLELQKRLPDGPSPAVSLSSQDEGAHKRTPVMPRRNPPPPREQSNSFLPHGSSKAGDAPLGAFWATQHAQGAQAVVNRNPLFDGESIKAPLSSKQNQSWVDTSISIPGNRHDHSGQMSLTSKAQNNSLSNNGFRGLSDTEIQNSGKSRAQQPQPEPKCEKDPFNSFVADFDTHNLNIAVGKASELELEVSNLKEQLKKTTLEKAEMTAKHLLIRKEKIQGTVWELEQGMLASNSSSASSDAKTWQAFPDTKTQARPKVDHATNGSQNITKNTTSGASPDAWGFGTDNFRTPATALSATTQINRAAAQRSSSQRFNAGVAKVEQPSGWAGF

SEQ ID NO: 12597 - protein, 514 aa, Zea mays
  VARIANT 175: note = Ancestral polymorphism is V, Derived polymorphism is F
  VARIANT 166: note = Ancestral polymorphism is N, Derived polymorphism is I
  VARIANT 164: note = Ancestral polymorphism is G, Derived polymorphism is E
MAATFALLLLLILSSSVRAAPDAVVSRIAFGSCANQSEPQPIWNAVAGFDPQVFVWLGDNVYGDNKRPFRVFGRERTVGPWKNVPRFYPSTEEELRRRYQLARAQPGYARLRERAQVLGTWDDHDYGLNDAGKELSGKVIAQRLMLDFLDEPEDSKRYALRNTGVNLFSFLCCVVIDLLFVKSIHTKHIVILGFLPGCDQTFLFKRKQAGVYASYMFGPEGKRVKIPSSRFKYTQVLLGNSTVLQVILLDTRYHRDPLLSDGTILGDPQWQWLERELHGPQSEITIIGSSIQVVSNLSATTGPLFYVESWARFPRERERLFRLIDSSKRPGVLFISGDVHFGEITRFDCGAEYPSYDVTSSGLTQSVENSVPEVFQPLMRLLAILTPTTMRVLSPNCQYKSCTIGQPNFGAIEIDWNAVPPRIKLELRDVEGHSVHSVEFPISELQPSEAHAIKRQTHTFQRHCTLETELPWLTRYRLALMLFVIIAVFAVVVVMLAIACLSNFTKSSKKSKKE

SEQ ID NO: 12598 - protein, 264 aa, Zea mays
  VARIANT 73: note = Ancestral polymorphism is W, Derived polymorphism is C
MNRNIYIMDIRFTNQKIDLELPKTLEYPAKPNQTHVLQHKTLEELLAFDPYIFVKEHFQCTVTITGFPNNINWWFPSCAKCGKTTDVDSTGYRCSDCNWTGHKFKYKLGFLASDDTTTAEMLRFENVAKQIVGKPCETLLKNISASNAHTIPTDITVIISTKYTFAVTLTKYSFHTDKKVFQPLSILESHGRQKSLPKLLLDKEETTPSTPTKCSFIPYLEHSPSNNTKETSTFERSHVIKSLTFSNEENTRIQKIWYLLILNS

SEQ ID NO: 12599 - protein, 207 aa, Zea mays
  VARIANT 18: note = Ancestral polymorphism is P, Derived polymorphism is L
  VARIANT 37: note = Ancestral polymorphism is P, Derived polymorphism is L
  VARIANT 113..207: note = Derived polymorphism lacks residues 113 to 207
MADPGASVNIAARHHLTPQLAGQPPVTHAGWWGGARPYRHGRGHGIKGEGGASRRRTPTSPHIQHPTSSVKLSLIINTMATECALLFLQEVDFPLLLLLCSVWMTLCCLRTFQTIPCMPTHAECELQVTILGLMSMTVFLKIKMSHGQIEGDTKFFGALAFVIFSGKLDLCSVGRPFSYANYIRLIVNDLKNDLQDLFTLDLFNYTF

SEQ ID NO: 12600 - protein, 126 aa, Zea mays
  VARIANT 100: note = Ancestral polymorphism is E, Derived polymorphism is K
  VARIANT 89: note = Ancestral polymorphism is S, Derived polymorphism is N
  VARIANT 81: note = Ancestral polymorphism is D, Derived polymorphism is V
MTGRTGGSRLGSSADDSSLVGTRDPAMPAPARGLRLRRRRCWVAKSSAEKLGRHTANFSIDENVTCGIIINFEKSEITWHDLLLWKAYSITLQSHDVFTEYLDLLNILEEELSSVSDLTLQNGPLS

SEQ ID NO: 12601 - protein, 548 aa, Zea mays
  VARIANT 41..548: note = Derived polymorphism lacks residues 41 to 548
  VARIANT 173: note = Ancestral polymorphism is R, Derived polymorphism is C
  VARIANT 434..548: note = Derived polymorphism lacks residues 434 to 548
  VARIANT 473: note = Ancestral polymorphism is R, Derived polymorphism is C
MPATPQSRHAPSPANPATTQQQIHHRRARRAPRRGTLDPAQQEAANQSSSPPAPTPPAAASGVHYRTPSSSDLLLPVDAAKMRRYSALPNGGRQETLADRAHRYRGVVLVILAPLALVSLVLLLMPRSPAGTMGGARRSGPVGADRYVVIFDAGSSGSRVHIFRFDANLDLVRIGSEIELFVLATAGLRNLGAQKSEAILQAALVRNHSLMLLLGVGTDVIRFDLSPRDHRTKNRVLAVAVEAMSTQGNCETHDAAVPGKLDEDERVQVLTIVKKDEPVDDIVDRINPGTVAGYSEAKGAVGASAATYAVQPASSRSSSFHGVTSAYSREQILSMEKGILNRLEWDLTVPIVYMFFVHFLKVATLGNKVEKEMKDMAFFAELALMQYGYGLVTRLPSLVAASAIYAVRLTVKRAPSGPTPSSTTLLCTRCSEERPAKGSGSWSSPVGSVPAGGQPGADNGSTTIEIALKIAFRKFSLDHGIMASSENSTRNEINIKLKVLVLDGSYHGDTLGAMEAQAPSSYTSFSSVAMWFSVPIAVFFVPAFSLVA

SEQ ID NO: 12602 - protein, 20 aa, Zea mays
  VARIANT 17: note = Ancestral polymorphism is P, Derived polymorphism is L
MGLKAVLMEYNELAIKPRKG

SEQ ID NO: 12603 - protein, 159 aa, Zea mays
  VARIANT 153: note = Ancestral polymorphism is L, Derived polymorphism is P
  VARIANT 110: note = Ancestral polymorphism is T, Derived polymorphism is M
  VARIANT 67: note = Ancestral polymorphism is S, Derived polymorphism is P
  VARIANT 35: note = Ancestral polymorphism is R, Derived polymorphism is L
  VARIANT 34: note = Ancestral polymorphism is C, Derived polymorphism is Y
  VARIANT 32: note = Ancestral polymorphism is R, Derived polymorphism is C
  VARIANT 31: note = Ancestral polymorphism is R, Derived polymorphism is C
  VARIANT 29: note = Ancestral polymorphism is A, Derived polymorphism is T
  VARIANT 26: note = Ancestral polymorphism is A, Derived polymorphism is E
  VARIANT 25: note = Ancestral polymorphism is E, Derived polymorphism is G
  VARIANT 24: note = Ancestral polymorphism is R, Derived polymorphism is C
  VARIANT 19: note = Ancestral polymorphism is T, Derived polymorphism is M
  VARIANT 11: note = Ancestral polymorphism is R, Derived polymorphism is C
  VARIANT 7..159: note = Derived polymorphism lacks residues 7 to 159
  VARIANT 5: note = Ancestral polymorphism is V, Derived polymorphism is M
  VARIANT 2: note = Ancestral polymorphism is R, Derived polymorphism is C
MRADVLQEIKRRRRYESKTDEKKREAREARRRNCRSQECIHLWELLECSICDPRIGIRPGPPVVCTPFCDMVFKACSESYFSVDMKTQALSPCGLSDILCGKAHKWVSKMAQSYAVLLVSLFKFLSRALLELMTLSAMVGKQVWIPSLIHGLLQKIVQH

SEQ ID NO: 12604 - protein, 163 aa, Zea mays
  VARIANT 30: note = Ancestral polymorphism is S, Derived polymorphism is F
  VARIANT 19: note = Ancestral polymorphism is L, Derived polymorphism is Q
MQEPGVAEKEFSPANARYLMKRILCNRFTFSAAGGENPAPEDAAEEEALPPWLTEEDVGHFASEFERTGFTGPINYYRNMDRNWELAAPWADAKVRVPTRFIVGDGDLTYQHPGIQDYIHKGGFEADVPGLESVVVIPGAGHFVQQEKADKVSQHIYDFISKF

SEQ ID NO: 12605 - protein, 122 aa, Zea mays
  VARIANT 64: note = Ancestral polymorphism is K, Derived polymorphism is N
MDCCVDCNVFGEVIRCDVPGGMNISEVDLWKEEIGRLRLKERRKVALWDRRKVVPALHLGTGGKVKRMMHFLCVIGGHGSCAASPKPVGPGFVKDRDRVPVPICKIGGGFKGLKVGSRFLQY

SEQ ID NO: 12606 - protein, 96 aa, Zea mays
  VARIANT 9: note = Ancestral polymorphism is R, Derived polymorphism is Q
MLQFPALMRQWPSPALIPASTLLPVPATSQEDELLLSMAESDLEDKLNEIRKTNSHLVIIGKPTGDTKEEYDAEVEDDDADNVEESDGDDFDQETG

SEQ ID NO: 12607 - protein, 842 aa, Zea mays
  VARIANT 718..842: note = Derived polymorphism lacks residues 718 to 842
  VARIANT 296..842: note = Derived polymorphism lacks residues 296 to 842
MSDWSSPAAPTFFPFGPQAEGWDVTFKVKYGDTLKRFYGCANGSHFDMNLSALRARIDTAFKFGPDVDFVLTYTDEDGDIVMLDDDDDLRDAALRQRLNPLRITVQLKKNQPTEKKDTSAPVKSAAQDPLSQLMSAIEGLKPVQEDSLAHIKSAIGEAIKSIPEPIPDALAKLSHEILDAAPPPLAELMKPFAQLMAPNNNGNGPSDVHAEGSSSSSSAQVPAEAKNEPKVRPSLGLKTVLKEAAGPVPNAGASQVQQPLMYPSVEEMLFPCNSVDKSVCKGKIDAQSKGKSVTSSGIQPAPHSLRTHAPPPPHPCISEWSRAQRSQHRQLKFEDNAKATNDSRWRIPMYKMPYAPPPPAVPPPGYVPSPHFPYPGRLLSSGHPYGDLAGNMENSAPHSLHRWIQCDGCGAQPIVGPRYKSNVKEDYDLCDSCFQRMGNEMEYTKIDKPILPHRFLRDPHVYRKVHHPRVLMKSRREKLESRFILDVTVLDGTLMTPSTPFTKIWRMHNNGSVVWPRGTQLVWVGGDQFALQTSVPLEIPVDGFPVDKEIDVPVDFVAPTRPGRYISYWRLASPSGQKFGQRVWVHIQVEDPSFVNDNNRNAAINLNLPPESYSSNTTNLIDVNIEPADSALSAHAKRTKEFHFCSTDFPEPSKSVPFTLATTSLSAAAPTNQTGDVPMSSTPAAACLPSVNVPMHEVVTTHTPSPITPVLPTTIHFSAPVSAPAIAPELASGAVGVPPPVSAVVPELSELDVHNEEKLLRELEEMGFRQVDLNKEILRQNNYNLEQSVDDLCGVNEWDPLLAELEEMGFDDTEMNKELLAKNEGSIKRAVMELIAREKKDK

SEQ ID NO: 12608 - protein, 125 aa, Zea mays
  VARIANT 42: note = Ancestral polymorphism is G, Derived polymorphism is D
  VARIANT 49: note = Ancestral polymorphism is L, Derived polymorphism is Q
  VARIANT 59: note = Ancestral polymorphism is M, Derived polymorphism is I
  VARIANT 85..125: note = Derived polymorphism lacks residues 85 to 125
  VARIANT 90..125: note = Ancestral polymorphism lacks residues 90 to 125
MPAPDPARPNSEEAAIKRSRQIDNDKDESMSSPTPPLDVGAGALWVEVLQECLSSIIPIRISRPTVRECYLTMCPSCDLWFGLGWSTHMYLIDSTMNNAPPVPSPLLSSIRQIRPVPPDDGQGTP

SEQ ID NO: 12609 - protein, 528 aa, Zea mays
  VARIANT 74..528: note = Derived polymorphism lacks residues 74 to 528
MSRKRAFSEEIGGATALKSLPTPIGLFEDECVFCHSFRTSQFHGPMVCYLKGRVVSIDECDSSDAIYVHRKCLEWASGIWFKGDIVMDFKPEITRASKLRCARCGLKGAALGCYYGPCLTSFHVPCAVQTIGCRWDGDGYMLCPQHVSNALPCDKQGTDTKENYNASSLHQSQHTDKKGSFDDHNRENEQADQLNISNASLLPQTRSPYIEREQVFDSRRRRKNGQTDHLDISTPCVPHNQHSHPKEEISTDSSRDHHQQIDQLQTSRSSLPLGACQGEEMESDQPDASSCPADELVLLGLCLSVDEKDFVQKFACWTKATLAEEWAENVTHVIVGKGAGSSWCRSFEVLMAILLGKWVVRFEWVADCLQLTPGPEASYEVLLLAASSIDSLGANDGPKQSRIRATEGEPKLFSGLCFCLSDLMSPGNRGRTRGLIAAGGGRVLDKRDLRLLPKKDPDPDGRRSPSPVNPRPYFVYDVEAPGGGRFSARLLRREIDEAREQAAAGAQVIGHLSVFDAVAAYDAGILLV

SEQ ID NO: 12610 - protein, 399 aa, Zea mays
  VARIANT 190: note = Ancestral polymorphism is D, Derived polymorphism is G
MARSWLITCRGIAKKIRYTNPGANHHISELVAEARRECPNCSYIIDNSDVAMQWPGLPAGVKFDPSELELLEHLEQKVGLGDSRPHVLIDEFIPTIDNDEGICYSHPENLPGMKTDGSNAHFFHRVSKAYGCGQRKRRRTINCSDHTVSDEHVRWHKTGRSKAIYENGVIKGWKKIMVLYKISQRGRKPDRANWVMHQYHLGEEEDEKDGELVVSKIFCQLPNKSMEISETETAYEEPGAPASVIGPKTPKTVTPQPRHPKNSPCETEQSIFILQDQLLLDGEDEPTMPIVSLADDAMNPAWCAVAEEEQVVGEASRAQSNSDEPLLCREDPNSLNDEALLPWDYPILSQCRSEIFDRNLNGYGLPDLHNVDLGTPPDLQLADFQFGSQESLGSWLDRI

SEQ ID NO: 12611 - protein, 160 aa, Zea mays
  VARIANT 102: note = Ancestral polymorphism is V, Derived polymorphism is I
MKGAAGSRSREPGDVDVELLKAVAQAWYAQSGNPRPSLRASGTGADDDVAGAGARGRAGAAPRRPSRFKLEAMAAAAASDAARARESSWDFAQSLLDTYELVAVARRLESVLDVAGHDAAAAAPQEGGARGAGTRRRESARSLRNLLLRSTSRRFQEPSS

SEQ ID NO: 12612 - protein, 100 aa, Zea mays
  VARIANT 21: note = Ancestral polymorphism is M, Derived polymorphism is V
  VARIANT 23: note = Ancestral polymorphism is E, Derived polymorphism is K
  VARIANT 39: note = Ancestral polymorphism is Y, Derived polymorphism is D
  VARIANT 48: note = Ancestral polymorphism is V, Derived polymorphism is F
  VARIANT 78: note = Ancestral polymorphism is A, Derived polymorphism is V
MQLNASRIKVLQAQDDLVTDMLKSASKELLRISRDHLTYKKLLKTLIVQSLLRLKEPAVLLRCRKEDLQLVDLVLESARNEYANKARNQNNKNTLFVPIT

SEQ ID NO: 12613 - protein, 116 aa, Zea mays
  VARIANT 28: note = Ancestral polymorphism is A, Derived polymorphism is T
  VARIANT 26: note = Ancestral polymorphism is A, Derived polymorphism is D
  VARIANT 23: note = Ancestral polymorphism is P, Derived polymorphism is L
  VARIANT 2: note = Ancestral polymorphism is A, Derived polymorphism is S
MANASPQWLTLAHLPTSLPLPRPAMAIAFDSPTSSPAEIPALKYARFCCLDLVPLLSPRFCHHRHQLRAFPPLLPPRRGLLCVTPLELAILLPARLRGACETVPVAAETRHGDMEG

SEQ ID NO: 12614 - protein, 317 aa, Zea mays
  VARIANT 255: note = Ancestral polymorphism is R, Derived polymorphism is M
MPASSEAAGALGGGGDVEQDYEIRNDEGFVYKVPRGLYHEAAPSTTQSAAGTDPKAAGLRRRCRALLRLRAKRLRDLSRWEALASELFAPLSAPQPPAPPSQAPPASSHSVAASSSSSPTSVLDELLAQVDIQAELMKKVHQWCDEANAICDAGESAIVASMVALPLWGGNPADLVTALCSPDEKAHGNLDGQSGRQVASGLSSAAAEMIKNSAKKQTMGHDLPHNLTESRMMKRVTNLSGPNIVASQASNERKRKKASGRASTASRTPGSTTRRKAASTPTRDPAAFSSPGPLTRRRAAALNVSPLGEAHNSQQVL

SEQ ID NO: 12615 - protein, 358 aa, Zea mays
  VARIANT 133..358: note = Derived polymorphism lacks residues 133 to 358
  VARIANT 143: note = Ancestral polymorphism is K, Derived polymorphism is R
  VARIANT 177: note = Ancestral polymorphism is D, Derived polymorphism is G
MGIGWRGLNRMMERFKDNMEFTKLKPKMAGIDPDDVYSEVPYEKGFQFLWRIEREIGRPAFDEFLKKYIATFKFQSIDTETFLEFLKTNVPGIENKIDLHLWVEGTGIPPDAMEPDSATYKKICSLAAEFKSGKLPSEDEVAKWSGQEWELYIENLPADVEASQISSVLLHMTIVIDKILEKGTVEYLIVHTTILEYFTIADKTSASDAICQLIPLLTQGALIIDGDEPTNAPELPKKAKAKKKRSKEPLIVRIMQTREGLKLGISCLKYGSAKMIAKIVVVCNDAIIGHSEHQYVATGMPTKVALEFRDGNGGGLARDGGGATAVPQDSEGFCQPDMHHGMEVRLGLSKGPICPSFS

SEQ ID NO: 12616 - protein, 203 aa, Zea mays
  VARIANT 57: note = Ancestral polymorphism is S, Derived polymorphism is W
MARQQSVQALCVLAALLFAASLPSPAAAGVHLSSLPKALDVTTSAKPGQVLHAGVDSLTVTWSLNATEPAGADAGYKGVKVKLCYAPASQKDRGWRKSEDDISKDKACQFKVTEQAYAAAAPGSFQYAVARDVPSGSYYLRAFATDASGAEVAYGQTAPTAAFDVAGITGIHASLKIAAGVFSAFSVVALAFFFVIETRKKNK

SEQ ID NO: 12617 - protein, 445 aa, Zea mays
  VARIANT 167: note = Ancestral polymorphism is E, Derived polymorphism is G
  VARIANT 146: note = Ancestral polymorphism is K, Derived polymorphism is T
MECIAEMPRAPLDSRLRKRQRLGWDVGPAEMYKAVRPRHGWDVGPAEMYQLELCGQEVVNAISAAALGLSSGCVSSQVKQEQPHDGSPPLREDDRDGHYVFAVGDNLTSRYKINAKMGEGTFGQVLECWDKERKEMVAIKIIRGIKKYRDAAMIEIGMLEQLGKYDESRSSCVQIRNWFDYRNHICIVFERLGPSLYDFLRENSYRSFPIALVREIAKQLLECIAFMHELCLIHTDLKPENILLVSPEYIKVPDYKVSSRSPKEGSYYKRVPKSSAIKVIDFGSTTYDQQDQSYVVSTRHYRAPEVILGLGWSYPCDIWSVGCILVELCTGEAIFQTHENLEHLAMMERVLGPLPYHMFKRADRHSDKYIRKGRLNWPEGCTSRESMKAVMKLSRLQNLVMQNVDQAAGDFIDLLQGLLKYDPSSRLTAREALRHPFFTQGFWRR

SEQ ID NO: 12618 - protein, 96 aa, Zea mays
  VARIANT 80..96: note = Derived polymorphism lacks residues 80 to 96
  VARIANT 5: note = Ancestral polymorphism is G, Derived polymorphism is A
MAWRGAASRSIIAAVRARAASPSSTAASRLRSTAPLPAPSRRSVPAFAFATARPLAAMSGSPAAAVVKLTGHSATSVRACCELSQGTLFCRTCQDR

SEQ ID NO: 12619 - protein, 244 aa, Zea mays
  VARIANT 211: note = Ancestral polymorphism is L, Derived polymorphism is P
MAAPPLGLACRVAGAFTTPAVAHSGFLPRHLARGLLPSKRWSGVVRMGAVVGGGKEGEEDEELRQTKEQAAARRRWEALAWVKGSTWIPIFDVDASVDLGGLSKKVSNFVMDEIGRNFVQQVEEKFSKDTDIMLVCQKGLRSLAACEQLYNAGFENLFWVQGGLEAAEEEDFEREGSQPFKLAAIGGISEFFGWTDQQRAQAAREGLGYRLVFTGRLVGALVLLDALFLGAQRIGPMLQEMQPR

SEQ ID NO: 12620 - protein, 483 aa, Zea mays
  VARIANT 195: note = Ancestral polymorphism is G, Derived polymorphism is V
MDTALCDDLLQVVFGLLPPSAAPAVSLVSRRWLALLRAATSSLSLRLPASSAATLAALLSHYPFLAALTVVSAGTPVHDADAVLLAVAAAPAASRLSTLRLLPDWAVSPAALLTVCPALAGLTSLHLTAVRPLSFRWLKLLPRLKSFALVNSAATVDSAGSSSDDADGEAEDVAGTLPLEKLSLCGIRSGDRGLGWLWRRCGSLKWLQLRACDGTGDGPASLAFAGCLAGLLALELRACRAVADRVLLLAADHCRTLTSLLVYDGGGSEALHRFIQQRAAGLHTLDLRLPLDLHNDHLLAIGADSVHNATHGLASLRLQSCVLITGDGLRSLARTAAGAGIEELALVSCDVVEREPGLLTFLSQSMPRLRRLNLSYNETLNDKVIGAMLSSCRNLIDIRLRGCRGLTGGSLLSLLRHCGQSLEILDISRCPGIAVGNVELFAQRAARLNHVIIEESAMSEELKAIAQKKGMKVGSLPCEGGPF

SEQ ID NO: 12621 - protein, 229 aa, Zea mays
  VARIANT 74..229: note = Derived polymorphism lacks residues 74 to 229
MGNIFVKKPKITEVDRAILTLKTQRRKLAQFQQQLEKVIEAEKEAARQLVQQKKRDRALIALKKKKAQEELLKQVDTWQMNVEQQLSDIELASKQKAVFESLKAGNAALKSIQNEINIDDVQKLMDDTAEAKAYQDEINAVLGEQLSAEDEEAVMAEFENLEAQLAVESLPDTPVTEVRPEEKMKAPADTEAVPEDIDEAIELPDVPMKAPERPEAPEKTKVLEEPLPA

SEQ ID NO: 12622 - protein, 333 aa, Zea mays
  VARIANT 314: note = Ancestral polymorphism is L, Derived polymorphism is P
  VARIANT 298: note = Ancestral polymorphism is W, Derived polymorphism is R
MRKPSKGCKERDANYHRNDHTDDHGGKHFFKVLVGDFHKRLVIPGKFAKHFADKVEGSITLESLGGYTFDVQVAKDLGRVVLQSAGWKSFVSAHYLKKMDFLVFKYDGMSRMKVLIFDPSGCEKVPPSFVAENASSGGVKREAPIGLSGSYARLPMKAPETKRKSWKQMDRSRIIMNASSSLSNSSGGMASSEDDEAHPVPSYMLPQGTRLDRLQKKILKERLRDICSEIPIYVCVLKKTNISGHSQALEFSINYSDLYLPFKSRELILRCHGNSWEVLLRVKLPGAPRKCKRLCKGWARFAGDNSLQLGDICLFEPLDTKNGTMNVHIIRRD

SEQ ID NO: 12623 - protein, 369 aa, Zea mays
  VARIANT 72: note = Ancestral polymorphism is A, Derived polymorphism is T
  VARIANT 133: note = Ancestral polymorphism is E, Derived polymorphism is K
  VARIANT 240: note = Ancestral polymorphism is S, Derived polymorphism is W
MVFCADFAALRPSPADVRVVTSDGSAIRAHCSVLVSERGFPVPFRVSIDADRSPDADKAAASPVLERMIEGTRRGWDAGCTVHVLGAPADAVAAFLRFLYSSPRAEDAVGAHGAALLALAHAYRVPWLKRRAEAAVAARLTAERAVDALKLAALCDAPRLYLACARLAGKDLDAVERSEGWRFAGRHDAALQLNLLQLVHDAHQRKERWERERASQHVYGQLSDAMAFLDRIFAGDGEGWSACASAASSREDGGVRRGLEQLMRHLAACGGRTRKPAACPRCRRALQLLRLHASVCDRAGGEPCNVPLCSNLKAKMQEEGVGKTWKLLVKKVTRARVMSALASSSSREVPEVVKKSWAKYSSSRASRIR

SEQ ID NO: 12624 - protein, 81 aa, Zea mays
  VARIANT 12: note = Ancestral polymorphism is L, Derived polymorphism is V
MRLVGLVSLVALIFLLSFRSLLHPQVLAGDGSAVTVTSRRRDRSQQHAEQWAEERKRMRWFMTRDYASARRHTPRNNRLDP

SEQ ID NO: 12625 - protein, 433 aa, Zea mays
  VARIANT 47..433: note = Derived polymorphism lacks residues 47 to 433
  VARIANT 82..433: note = Derived polymorphism lacks residues 82 to 433
  VARIANT 99..433: note = Derived polymorphism lacks residues 99 to 433
  VARIANT 112: note = Ancestral polymorphism is Q, Derived polymorphism is R
  VARIANT 130: note = Ancestral polymorphism is T, Derived polymorphism is I
  VARIANT 162: note = Ancestral polymorphism is P, Derived polymorphism is L
  VARIANT 171: note = Ancestral polymorphism is T, Derived polymorphism is I
MDALSRPAVVIDNGTGYTKMGFAGNVEPCFITPTVVAVNDSFSGSAQPAVRGTPARGNWLAQHSAGVMADLDFYIGDEALARSRASSSHSLSYPIRNGQVENWDTMERFWQQCIFNYLRCDPEDHYFLLTESPLTAPETREYTGEIMFETFNVPGLYIAVQPVLALAAGYTTTKCEMTGVVVDVGDGATHIVPVADGYVIGSSIRSIPITGKDVTQFIHQLLKERGENIPAEESFDVARRIKEMYCYTSSDIVKEFNKHDKEPSKYIKHWTGTKPKTGAKYTCDIGYERFLGPEIFFNPEIYNNDFTTPLQVVIDKCIQSSPIDTRRALYKNIVLSGGSTMFKDFHRRLQRDLKKIVDARVRASNSRLISGDAKAQPIEVNVVSHPIQRYAVWFGGSVLASTAEFYEACHTKAEYEEYGASICRTNPVFKGMY

SEQ ID NO: 12626 - protein, 165 aa, Zea mays
  VARIANT 14: note = Ancestral polymorphism is S, Derived polymorphism is I
  VARIANT 17: note = Ancestral polymorphism is S, Derived polymorphism is T
  VARIANT 64: note = Ancestral polymorphism is G, Derived polymorphism is V
  VARIANT 70: note = Ancestral polymorphism is A, Derived polymorphism is D
  VARIANT 74: note = Ancestral polymorphism is S, Derived polymorphism is Y
  VARIANT 96: note = Ancestral polymorphism is M, Derived polymorphism is K
  VARIANT 98: note = Ancestral polymorphism is S, Derived polymorphism is Y
  VARIANT 101: note = Ancestral polymorphism is T, Derived polymorphism is A
  VARIANT 125: note = Ancestral polymorphism is M, Derived polymorphism is V
MIKLSYSKRLFKRISSTSNKQQAAASGGGGDNGSAAAAGGGGAREIEWEVRPGGMLVQKRDGRGGRETVAVRVSTGFSWHDVSIGATSTFGELKVMLSMVTGLEPREQRLLFRGKERNDTDHLHMVGVRDKDKVLLLEDPALKDMKLRALSARVVPRPCQSFIQV

SEQ ID NO: 12627 - protein, 326 aa, Zea mays
  VARIANT 102: note = Ancestral polymorphism is A, Derived polymorphism is T
MAGTCAHVEFLRAQPAWALALAAVGLLVAVRAAARFALWVYAAFLRPGKPLRRRYGAWAVVTGATDGIGRAVAFRLAASGLGLVLVGRNQEKLAAVAAEIKARHPKVPEVRTFVLDFAGEGLAAAVEALKDSIRGLDVGVLVNNAGVSYPYARYFHEVDEELMRTLIRVNVEGVTRVTHAVLPAMVERKRGAIVNIGSGAASVVPSDPLYSVYAATKAYVDQFSRCLYVEYKSKGIDVQCQVPLYVATKMASIRKSSFMVPSADTYARAAVRHIGYEPRCTPYWPHSVVWFLISILPESLIDSVRLGMCIKIRKKGLAKDAKKKAL

SEQ ID NO: 12628 - protein, 982 aa, Zea mays
  VARIANT 908..982: note = Derived polymorphism lacks residues 908 to 982
  VARIANT 561..982: note = Derived polymorphism lacks residues 561 to 982
  VARIANT 51..982: note = Derived polymorphism lacks residues 51 to 982
MGGGNEFLVGMTGSAPDSARQKRCHDTANGEVRDGDTVVKNGKTSDAASVEKREKKEHLFKCSAYHGKDTDMWSGDQRINKSRVPAALCEQGREMDDDLNKTNSKERMMGVELDKEKTITSDDCSKVEGKKKFNTASPEEERKKKPHNASTGKNMQRDDDKEVVRIMSNSDTKVKIKKVSTPLPKKEKNKEKLNKTYREKKMQAADSKMRSCYSGVKKGKVPTAFCDKEKKRKMPDNTSSEKETAPITPAVKEKKMRTTESMEIKMRHDRQNRRNVPLDVSNLKMGTSSGSNYKIWKEKLPHTLLKEKKRMWRNDSDKIYGGRVKELKIFSGGKEKNNQAPIAFLKFVRNNAEKFLVIPRIVAPRLEYLTNQLVYLKDSKGKCLKVLVSKVVDSLAFDQGWDVFVSNHLIKWGEFLLFEYIAERTFSVRVFGTDSCERLDFNPESTNKGETKKQAWSNMPPDDLVVTDGISENSGYYVSGECPRTKVPQTCHVTCNTKKDPKRVERVVGSGPVAQDISGNLIGPQCKTKGTPLCSKGKTVIMIIDSEDSEPSAHEKEDTMKLATSGPDSDISLVAVNTNEDPIRAQSGIGNGPSAVLADEKGNFPEIECGTKCISATCSEVKTVSQIISATALLDLHDSDENLGRKQRTNAIPLDSRTTAEDYHNYSKMIIIQNFNRKYEAPGGFRCLEKWRKDVVNNQTALDCTAPIKHENPQKTDGMLVDGYGLIELNPVDEYICSEGNHECVQPVFTMPIKEPSSADRVIDCGRDGTEINYSINEKDGGSIEKTSSPDEISKCKNSMMETAHNVNGKGTTAQFETKMDQAEPARSGVRSKICNSVVPANESEHRSTKQEGRMSSNREVPESLLPTKDEIPEPDHHSPPEINFQLCIPDTTQKWLDLSKSLSNAVRRQRRHDYDVIMLKDPKKRLWPVVYHDSLLFVGFTAGWKHFVASNDLRAGDVCELVKEPDDGEPVYSVRMSDHKI

SEQ ID NO: 12629 - protein, 1016 aa, Zea mays
  VARIANT 796: note = Ancestral polymorphism is S, Derived polymorphism is I
MASTRSSSLPSRGATDGEKRLEALALGRVAEAADAVASAACAGEVVRAIHAVASLLFPVDSEAVAGTVEEPFRSQILDAVTVTLSNEERESWRHAFYHGPAFPTMSKILLGNVALKWLPKINVSARQEIYDSFFVKGPPTEVIQALVPALSEKEFSKEDHQTFCLNLERLLILWLLDNKGVFQIVVDFICSKKHGEDILSPDKTISVSRVAQLLASVPDKARLGASAALTSPSFFKHVVSQLLAGAEATTIELAADKEANEHYVLSSMFHFVGEVLSRVCRRGSTGVLVAELIPKVRNHIHRCVPPDHRATIPEMVQHVCQSQFWFNMVEAMRDQHSIERLTEELLRQLASQHISDEEAYWILWTLFNQSFKRLTVMRAMFVDKFLLWKTFPLCCLRWILHYAVFECPPNSTTEILMQRTPNFFGILQSLVSIWSRKEFIQSYSVEQQAYITAAIGLCLEKLTKKELETTKDVLNSILQGVSCRLESPIDLLRKMASAVALTFSKVVDPKNPLYLDDNCCENVDWDFGVLSPKEFKAPLDAVETKTKPKTRENKKKAGEKKTKAIKRDIPDVRAKIVEINSIDHDQMSDTATNGQFEEEECDEEDMNMDAYSDSSLEPYDLSDDDTDLQKKISHLSDLAAALRKPDDPDGVENALNYAEKLVRASPDELRYNSGDLVRALVHVRCSDVAMEGEEDSAEEKRQKALVSLLVTCPFESLDVLTKLLYSSSVDIGQRILIIDAMTEAAQELAETKTVKIEQRRGNLITDTSPSWLVPSNIGPPGAGPWREVSEPGTLLSWSHRYEREVPSKSGQLKSGKSRKWGLGKAKDLQVEWSKNRFPLYAAAFMLPVMQGYDKRSHGVDLLNRDFVVLGKLIYMLGVCMKSMAMHPEASALAPALLDMIRSRDISRHAEAYVRRSVLFAASCILISLHPSYVASSLIEGNQDISTGLEWIRTWALQIAEADPDTECSSMAMTCLRLHSEMALQTSRALESANHSKTGRAIPSKLDSIILPFGNMM

SEQ ID NO: 12630 - protein, 389 aa, Zea mays
  VARIANT 324: note = Ancestral polymorphism is G, Derived polymorphism is V
MDGGAGEEGKQERHLVLAHKLFLLSHPSVDDLSKVALRAEVLDTVKSDDMATLFESLVAAGVLEGDAALLAEMRGRIDEEIRKLDEKIADAEENLGESEVREAHLAKSLYFIRVGEKEKALEQLKVTEGKTVAVGQKMDLVFHTLQIGFFYMDFDLISKSIDKAKNLFEEGGDWERKNRLKVYEGLYCMATRNFKKAASLFLDSISTFTTYEIFPYDTFIFYTVLTSVITLDRVSLKQKVVDAPEILAVIGKVPHLSEFLNSLYNCQYKSFFVAFSGLTEQIKLDRYLQPHFRYYMREVRTVVYSQFLESYKSVTMEAMATAFGVTVDFIDQELSRFIAAGKLHCKIDKVAGVLETNRPDERNAFYQATIKQGDFLLNRIQKLSRVIDL

SEQ ID NO: 12631 - protein, 262 aa, Zea mays
  VARIANT 85: note = Ancestral polymorphism is I, Derived polymorphism is V
  VARIANT 34: note = Ancestral polymorphism is R, Derived polymorphism is C
  VARIANT 20: note = Ancestral polymorphism is T, Derived polymorphism is I
MEVVGGVSLRPSPAPARIRTTLPPVDVGGRFLLRRVAGRQPARRALVVEARGGRGWSERQMQQQRRAPLLPKIEDDGNPRFVIFIRTANVYFWYPLNIITGGTTAKIMLAAKDNFLGKYIYKDTLARNLAAVIYKDEDVIIDTAKEQYRVLKTENQFRYGYKVVEKGNIRSALTTSNVIELPKKDELKTVVDKVKDFFGDVTAGAKESFAQITGSAVSKEEEEAESKEKFRSKRRKKQRKSKEGLSKDGEMIQSVTQVKHRL

SEQ ID NO: 12632 - protein, 517 aa, Zea mays
  VARIANT 126: note = Ancestral polymorphism is A, Derived polymorphism is T
  VARIANT 142: note = Ancestral polymorphism is R, Derived polymorphism is H
MSGGSSESSPLSGQNSLSSLSISKDNELSSESGCLSIVVLGASGDLAKKKTFPALFHLFQQGFLQSGEVHIFGYARSNLSDDGLRERIRGYLKGASDEHLSQFLQLVKYVSGSYDRVEGFELLNKAISEYETSKNNDSGSYRRLFYLALPPSVYPSVCKMIRSYCMSPSSHTGWTRVIVEKPFGKDLNTAEELSAELGQLFQEEQLYRIDHYLGKELVQNLLVLRFANRLFLPLWNRDNIANVQIVFKEDFGTEGRGGYFDQYGIIRDIIQNHLLQVFCLVAMEKPVSLKPEHIRDEKVKVLQSVEPIKHEEVVIGQYDGYKDDPTVPDDSNTPTFASVVLRVHNERWEGVPFILKAGKALNSRKAEIRVQFKDAPGDIFRCKKQGRNEFVIRLQPSEAMYMKLTVKKPGLEMATEQSELDLSYGMRYNGVKIPEAYERLILDTIRGDQQHFVRRDELRAAWEIFTPLLHDIDGGKLRSVPYKPGTRGPQEADELSRRMGYVQTHGYVWVPPTLSKV

SEQ ID NO: 12633 - protein, 359 aa, Zea mays
  VARIANT 39: note = Ancestral polymorphism is L, Derived polymorphism is S
  VARIANT 38: note = Ancestral polymorphism is P, Derived polymorphism is Q
MRTSIALEHSLRRQARQMPALGAPTSRFAPPPPRGLIPSVSIYLKLGFFFMQLNVIIPLAVDVVAIVERLATVKHKLLVLSGKGGVGKSTFSAQLSFALAEMDHQVGLLDIDICGPSIPKMLGLEGQDIHQSNLGWSPVYVESNLGVMSIGFMLPNPDDAVIWRGPRKNGLIKQFLKDVDWGEIDYLVVDAPPGTSDEHISIVQYLQATGIDGAIIVTTPQQVSLIDVRKEINFCKKVGVPVLGVVENMSGLRQPLSDLRFIKSDEAGKTDATEWALNYIKEKAPELLSVMACSEVFDSSKGGAEKMCHEMGVPFLGKVPMDPQLCKAAEEGRSCFADQKCSASAPALRNIVKKLIKAE

SEQ ID NO: 12634 - protein, 666 aa, Zea mays
  VARIANT 22..666: note = Derived polymorphism lacks residues 22 to 666
  VARIANT 310..666: note = Derived polymorphism lacks residues 310 to 666
  VARIANT 503..666: note = Derived polymorphism lacks residues 503 to 666
  VARIANT 522: note = Ancestral polymorphism is V, Derived polymorphism is A
  VARIANT 582: note = Ancestral polymorphism is L, Derived polymorphism is Q
  VARIANT 619: note = Ancestral polymorphism is P, Derived polymorphism is H
MAVGGAALSEPLTSLHSPRRVRSDDEERKREERNRKQREYYARRKADETTEEREARNKRMRDYRARKKAETVLYSPRQTQAYATGSSIVIQTNTKVAEPVTPVVARGSLHQLPTSVEPFSTISQPSTYNQSAITASTMGNLIMNRARYINMDDADREILLHKRREYKKLRQCVQDDTITGALYHRLDHLVPGSQGPRHLQLYFYDTEDATLAHRARRSPDLDINIIKNILTILEGNPYVQTFNRLGSIPNLDDYVIELNTNVTPDQRRYLIIIWMKTTNKMTMTFQMEEWFNLQECRFRYPRQFCAATQQGKDSYPLYRRRDDGRRVKVRGCVLDNRWVVPYNPGLLMRYNCHINVEACSSIKAIKYMCKYVYKGHDRASFSVDPAHKEDGVINEIRQYRDARYISPPEAVHRILGFPLFGVNPSVLQLQCHLPGMQSVIIDETAKLQDIVNEPTSSMTTLTEYFTKNHTDSFARTLLYKDFPEYYRWIPGSKRWQRRKQRGQIGRIVYAHPAEGERYFLRVLLNHVRDYNRDNPKSTCVQQMVLKDIRELVRSMGKDIRSYDLPEINDTGGTGKTFLYKALLARVRSEGLIAIATATSGIAASILPGGRTTHSRFKIPIKLADNSTCNFTKQSGTAELLRTASLIIWDEVAMTKRQAVECLDRSL

SEQ ID NO: 12635 - protein, 214 aa, Zea mays
  VARIANT 145: note = Ancestral polymorphism is A, Derived polymorphism is V
  VARIANT 152..214: note = Derived polymorphism lacks residues 152 to 214
  VARIANT 164: note = Ancestral polymorphism is P, Derived polymorphism is L
  VARIANT 166: note = Ancestral polymorphism is P, Derived polymorphism is L
  VARIANT 170: note = Ancestral polymorphism is H, Derived polymorphism is N
  VARIANT 172..214: note = Derived polymorphism lacks residues 172 to 214
MSTRAILSTKNQHVDQLNAKMIDKFPGNGKVYHSFDCADDDSRNNYPIEFLNSITPNGLPPHVLKVKINSPVILLRNLDPNNGLCNGTRLMVRALQDNAIDAEIVGGHNAGTRVFIPQIPMCPSDDISLPFKLKRKQFPIRLSFAMTINKAQGQTIPNVGIYLPEPVFSHGQLYVALSRGVSRQTTRILARPKKELDPTGKSTKNIVYKDVLNC

SEQ ID NO: 12636 - protein, 371 aa, Zea mays
  VARIANT 92: note = Ancestral polymorphism is A, Derived polymorphism is S
  VARIANT 198: note = Ancestral polymorphism is H, Derived polymorphism is D
MGGLTMDQAFVQAPEHRPKPIVTEATGIPLIDLSPLAASGGAVDALAAEVGAASRDWGFFVVVGHGVPAETVARATEAQRAFFALPAERKAAVRRNEAEPLGYYESEHTKNVRDWKEVYDLVPREPPPPAAVADGELVFDNKWPQDLPGFREALEEYAKAMEELAFKLLELIARSLKLRPDRLHGFFKDQTTFIRLNHYPPCPSPDLALGVGRHKDAGALTILYQDDVGGLDVRRRSDGEWVRVRPVPDSFIINVGDLIQVRERGAPGVGELGEGEVLHALLLQPGDLHHGGAGGGAGEQGRSAQVRRLQLGRLLQHQEEQQLQEAQRGEHSDRAFQEEPRPRLTTATARIHAIAMSSSDSEHAMSSLASW

SEQ ID NO: 12637 - protein, 285 aa, Zea mays
  VARIANT 108..285: note = Derived polymorphism lacks residues 108 to 285
  VARIANT 78..285: note = Derived polymorphism lacks residues 78 to 285
  VARIANT 66: note = Ancestral polymorphism is R, Derived polymorphism is L
  VARIANT 51: note = Ancestral polymorphism is R, Derived polymorphism is C
  VARIANT 14..285: note = Derived polymorphism lacks residues 14 to 285
MGGSCSSRDGEQGQRRHADPRGTPPLPHHLRSPRATRSPRPRSLPQEWRRRRKRPNAASGNGRCVRGRRRRRLGSGRRGAGSAARVLARRRIRELLRREGVGTNRESWSSGATTDEVGTQKGEGKKSRGAEHARTRMGGDGDKIWFHRSIAGTVQAAGSGDGDEAEEEKAFLVPSAAAFPHGMSAAAAGPSLAVAKKEEFSKSPSNSPASSGGTDGGSSAVPWPEQIHAQNSSPTLLEPSRQAIPLEFKSMAGCFFRLAEFYQDPEFGMLWQWKGLALASENQSA

SEQ ID NO: 12638 - protein, 486 aa, Zea mays
  VARIANT 226: note = Ancestral polymorphism is R, Derived polymorphism is P
MACLEAPPRVELCPVSCQPRGLQLPPWRLSLSRSSSSCRSCTLVSRQLPICNAQSYADDLWVAAPHSPASVRSRLLAAEREEAKAVLSLFLRQKGLRSTLAARIVNKSDGFIEHLVSKLQIAYRSRYAEGRELSTPEIRDALLPYLEALSKEHGDSLVEVVENFPDPFAMEREALSSSMAFTPTSSNKQKAIARISTAASGAALPELVPYLLDLGMDHEEIKDIVRKFPAFAYYSVDRKIKPLVELLLELGVKNSSIPGIIKKRPQLCGISMSDNLKPMMAYLESIGVDKAQWSKVITRFPALLTYSRNKVQTTVSFLAELGVSEKSIGKILTRCPHIMSYSVDDNLRPTAAYFRSIGADAASLIQKSPQAFGLNVEAKLRPTTEFFLARGFSVEEVGVMANRFGIVHTLSLEENLLPKYEFFLAMEYPRCELVKFPQYFGYSLDRRIKPRYARMTGCGVRLILNQMLSVSDARFEKILEKKTARL

SEQ ID NO: 12639 - protein, 311 aa, Zea mays
  VARIANT 29: note = Ancestral polymorphism is R, Derived polymorphism is C
  VARIANT 27..311: note = Derived polymorphism lacks residues 27 to 311
MARNEEKAQSMLNRFITMKQEEKRKPRERRPYLASECRDLADAERWRSEILREIGAKVAEIQNEGLGEHRLRDLNDEINKLLRERGHWERRIVELGGRDYSRSSNAPLMTDLDGNIVAVPNPSGRGPGYRYFGAARKLPGVRELFDKPPEMRKRRTRYEIHKRINAGYYGYYDDEDGVLERLEGPAEKRMREEIVSEWHRVERVRREAMKGVMSGEVAAAGGRSGEAAREVLFEGVEEEVEEERKREEEKREREKGEEVGREFVAHVPLPDEKEIERMVLERKKKELLSKYASDSLLVEQEEAKEMLNVRR

SEQ ID NO: 12640 - protein, 139 aa, Zea mays
  VARIANT 109: note = Ancestral polymorphism is A, Derived polymorphism is S
  VARIANT 95: note = Ancestral polymorphism is S, Derived polymorphism is L
  VARIANT 86: note = Ancestral polymorphism is P, Derived polymorphism is S
  VARIANT 79: note = Ancestral polymorphism is V, Derived polymorphism is A
  VARIANT 77: note = Ancestral polymorphism is S, Derived polymorphism is N
MEASAASDETLADVLDHLKPHTIALLHLLYNRCPPLAPPPPYAKWVGIAWAQLHLRARRVAARRGSGAGRSSRVVGSQVNLTDSSSYLLLPVWISALDEFQGSVAAATAMDKSPGQCDAKLAGEEHVGGEHDLKDLEPC

SEQ ID NO: 12641 - protein, 537 aa, Zea mays
  VARIANT 56..537: note = Derived polymorphism lacks residues 56 to 537
MANPPGRRVLERVGQGGARACGPGNCAGLRDAEQGAAASGTRCRSDARAVEHSGPQALHRPAPPSDRDRPGTSGLTAEETAAWFPDTLDDPLEKDLESYALPSNGRAIRGAHLGMSLDVMLIEIDERNWKEAITQFAAMREDLGALCKLLLPLAPEAHISNGKNESPGSKSNRWKYNFFGKKSRDDRSPRAEDNKSFRKQKSFGAKDVISEKSDFHHLNGMTREQVITYFKSEISKMKRMHKSALQEKTEELFRLKREKGSHSLKNDIEFEPLRKKIPELVLRMDQIISKNIKVPAICMTHDELDERCRLMSRIDALFYENQHFRGLLADRMKDIKALSSRLSEASIELSMQMLSEEELLRQIDKVREDCEDLRIECDIREGMYQTVTKHLLDDYKDNMDGAALNLSAKLSSLESAISEKDEALCLYNEENHSDQEVPEAIKQDSTEIVLRDIEVEPCMSPRRSNADDSRSEELSDHCNHMVRQAMVLTKIGLWYKQMIEARRSELQKAEAKLLDAFMKTCKLVADLRSKQNEGDAT

SEQ ID NO: 12642 - protein, 407 aa, Zea mays
  VARIANT 238: note = Ancestral polymorphism is A, Derived polymorphism is T
  VARIANT 181..407: note = Derived polymorphism lacks residues 181 to 407
  VARIANT 160: note = Ancestral polymorphism is M, Derived polymorphism is V
MALLLTGRVLVVACVLVACSSSCGCPVAAAAAMTTVDGITAIYSFGDSITDTGNLVREGATDMLRYIGSRPYGIDLLRGVPTPTGRCSNGYLMIDFLAKYLGLPLLNPYLDKAADFTHGVNFAVAGATALGATALAERGVTMPHTNSSLDVQLQWFRDFMASATTNSSQGTSQVRRKLASSLVMLEIGGNDFNYAFLQLQTRPTGGGYGSGNVTRIVEILEQVGALVPQVVQSITNAAKALLEMGAVRVVVAGNLPIGCSPAYLSGANVTEPAAYDADGCLAVLNGFAELYNAALRGAVAGLQRAHPRAVVAYADYFAAYARVLREARARGFDPARTRTACCGAREAAAYGFRLGRFCGAPRTAVCKDRARYVSWDGVHPTQHAYEAMAELLYRGGLACPPPINWPG

SEQ ID NO: 12643 - protein, 129 aa, Zea mays
  VARIANT 50: note = Ancestral polymorphism is R, Derived polymorphism is H
  VARIANT 33: note = Ancestral polymorphism is Q, Derived polymorphism is K
  VARIANT 13: note = Ancestral polymorphism is Q, Derived polymorphism is P
MAKYNVVQKNKRQCNQDRKRAAHGEPGTGKLKQRTAPVSMSGKRKKKLERRLNRKQKEAAMIKALENNMGDVDMVSVEESSEAAKGKSQVKFSVKKNSRIQIKRLKGKGRKKAKNAKPPAKEKVDAMVE

SEQ ID NO: 12644 - protein, 355 aa, Zea mays
  VARIANT 231: note = Ancestral polymorphism is P, Derived polymorphism is R
MRPVRALDLSCQPATHISSSCKIACMKPMSCHEQEQHAELAAATTNSGFDWLEDSVSFLTADVDAAGCGGYGWWSDDPATAAAAAAARRAGEQDLAAIREPAEPVAGARRMGTEADAAAVDSLRSQIPFQTDGELILPPRDVGLVLVDLCNGFCTVGAGNLAPVAPNKQISKMVEEAARLSKLFCDRNLPIFAFLDTHYPDKPEPPYPPHCIIGTGEENFVPDLEWLEKEPNVTIKRKSCIDGYISCIEEDGSSVFVDWVGKYQIKTVLVLGICTDICVLDFASSTLAARNIDRVPPLRDVVIYSEGCATYDLPVEIAMNIKGALAHPQDLMHHIGLYMAKGRGAKVVDRVVIEP

SEQ ID NO: 12645 - protein, 114 aa, Zea mays
  VARIANT 101: note = Ancestral polymorphism is P, Derived polymorphism is L
  VARIANT 92: note = Ancestral polymorphism is H, Derived polymorphism is Y
  VARIANT 88..114: note = Derived polymorphism lacks residues 88 to 114
  VARIANT 52..114: note = Derived polymorphism lacks residues 52 to 114
  VARIANT 43: note = Ancestral polymorphism is G, Derived polymorphism is D
  VARIANT 40: note = Ancestral polymorphism is R, Derived polymorphism is H
  VARIANT 36: note = Ancestral polymorphism is R, Derived polymorphism is W
  VARIANT 29: note = Ancestral polymorphism is G, Derived polymorphism is E
MSGRGKGGKGLGKGGALRHRKVLRDNIPGITNLAIRRLARRGGVKRISGLIYEETRGVLKIFLEQCCWFRGSSRAHPARPPRSVAMAQCRHHLLLMVIAAPRQARAMGKPLLSS

SEQ ID NO: 12646 - protein, 208 aa, Zea mays
  VARIANT 19: note = Ancestral polymorphism is R, Derived polymorphism is C
  VARIANT 99: note = Ancestral polymorphism is E, Derived polymorphism is K
MGASSFSTIGRIHHINVVRLVGFCAEEMRRALVWESTTYLHLGCDIQILHFDIKPHNILLDSNFVPKVSDFGLAKLYPRDKSFVPASAMRGTIGYIAPEMISRSFGAISSKSDVYSFAEQEAGEISVAADMHELERKLCIAGLRCIQMKPQDRPTMGEIIEMLECGTHGLGLQMPSRPFFCEDDDPNMPAADSYHFSSELTAISEEDG

SEQ ID NO: 12647 - protein, 278 aa, Zea mays
  VARIANT 136: note = Ancestral polymorphism is A, Derived polymorphism is P
  VARIANT 129: note = Ancestral polymorphism is D, Derived polymorphism is G
MMSNFQATTCKPHSRIIVKKPIASLGSTCQYPLYSHALGFHTLQEKVYPRLVLISASHKRLTSVCALSGKGSSGTADDGCVEYMSNDSVTILSKAIFWLVNVNVALFQPLMESLKKAVADAKKPRSIQDLLKEQVAKLREQASGGGRGNGNRRGGSGGSGGPDDESFKETLDEVVQVILATVAFILVYIHIIRGEELYRLARDYTRYLVTGKRTARLKRAMQRWRNFSESFMQKAGSEDDQYERPAVSKPAWWQQPQKFVHFVEDLCRGNWRPHAQES

SEQ ID NO: 12648 - protein, 613 aa, Zea mays
  VARIANT 223: note = Ancestral polymorphism is Q, Derived polymorphism is R
  VARIANT 214: note = Ancestral polymorphism is M, Derived polymorphism is R
MGPCLPWALGLLLPSLWEAKVAFSATALLIAALILFLLTTDQHAKSTATGGNRPASSARSSATAAYHRVAGRRRTRARGEAASDDITCAQGGGGYVVKLELLSAKYLIGANLDGSSDPFAVISCADQKRFSSMVPSQRNPLWGEDFNFLVEQLPVEVTITIYDWDTVCKCKVIGSVTIVVLTENESGASWYELDSKFGQVKHAFYGRFVIEYFMPLASILTIQWISACIDNPKTSGCRSACVFVQLKHFQILIGNLVLGKTTPAFLNIVHQSYSCALDRCFLLHGRMYISQWHLCFHSNVFSKQLNVIIPLQDIDEIKRSQHSLINPAITIFLNAGAGGHGTPRACSQNGRIRYTFASFWSRNRTFRALEAALQSYEATLEAEKQVRAHVLLQIENNSVFSSKTDNTKTPEKNIEKAIKFQPFINDHVLADITSKFFPGTPEKFFSTILGDSSMFFQQYRDARKDTNLKLSRWCASEEYGGKVREVTFRSQCHSPLCPPDTAVTEWQHASFSRDKRNLIYETKHQAHDVPFGSYFEIHCRWSLRTTSNSTCQVNIKIGVNMKKWCILQSRIKSGATDEYRREVCKILEAACDYFLKSEANSHDSDEIVMVSSP

SEQ ID NO: 12649 - protein, 365 aa, Zea mays
  VARIANT 155: note = Ancestral polymorphism is A, Derived polymorphism is S
MGEAEERCSAGAGCSFSLTCLEDGADLDTGGSAAESADGGKLAASLYGDAEEDQEYIDHLVSKESSFCRSPSSSLCSPVVSDVSDAGAETCPCPSSMAASSHEWFRCARRATVEWVFETQAYFGFSHRTAYLAVSYMDRFCLHRCMDRSVMPWAARLLAVACVSLAAKMEEYRAPALPEFRADDEYDFSSVSIRRMELLVLSTLGWRMGDVTPLDYLPCLSSSRLRRGGDGGLVAAKAAALIFSTAEAASVLDYRPSTVAVAAVLAAAHGAVTKEALESKMSSLSPSSLLDKDDVHACYSTMMLNESSSATPSKLLAAKRPAPSASGSTGAGSPYESVDADSSSFAAAADSNKRARLVELPAVGR

SEQ ID NO: 12650 - protein, 760 aa, Zea mays
  VARIANT 137..760: note = Derived polymorphism lacks residues 137 to 760
MAARAITRRRKYLFDHVKTPNLSSSSSTFQHGRIGSEDEPKITLLFLEQSSRDSRSEKEQYCVNLTNRNLAGIANRFLRRPAHGISLSYYGIGKNDFGLPLGARSMLQSVRASSTATAGQPKLDIDDEQSGDQKQNRKKKETSPEECDQAVEGLSTAKAKAKAKQVQESLKASQSAMQKFWARLLGIGPALRAVASMSRADWAAKLKHWKAEFVTTLQHYWLGTKLLWADVRISSRLLVKLAGGKSLSRRERQQLTRTTADIFRLVPFAVFIVVPFMEFLLPVFLKLFPNMLPSTFQDKMKEEEALKRKLKARMEYAKFLQDTAKEMAKEVQTSRSGDIKQTAEDLDEFLNKVRRGERVSNDEILSFAKLFNDELTLDNMSISRLVNMCKYMGIRPFGTDHYLRFMLRKKLQDIKNDDKMIQAEGVESLSEEELRQACRERGHLGLLSTEEMRQQLRDWLDLSLNHAVPSSLLILSRAFTVSGKVKPEEAVVATLSSLPDEVVDTVGTVLPSEDSVSERRRKLEFLEMQEELIKEEEKRKEKEEKAKQEEEEKAKLKETKGSAEDLALKEMIEATAREEELRKAKQHDREKLCNIGRALAVLASASSVSKERQEFLGLVNKEIELYNSMLEKEGAEEAKRAYIAAREESDHHAEAAAEEKISSALIEKVDAMLQELEKEIDDVDAQIGNRWQLLDKDHDGKVTPEEVAAAAAYLKDTIGKEGVQELISNLSKDTEGKILVEDIVKLASQTENNEEEEEAR

SEQ ID NO: 12651 - protein, 678 aa, Zea mays
  VARIANT 320..678: note = Derived polymorphism lacks residues 320 to 678
MSAAAGTPPEDGGDRPWQSYHTAYTNAKAGMEGVDKEKVQKVIYEMSKGSKYFENEQRKEAATKQKIEHLRAQCAVLTDNDISHFQKVADKKMLELEASRDLSKIWLHTDMDAFYAAVETLENPSLKGKPLAVGSMSMIATASYEARKFGVRAAMPGFIGCKLCPDLVFVPPNFERYTHYSELTRKVFQRYDPNFIATSLDEAYLNITNVCIERGITGEEVAIELRSAIHQETGLTCSAGVAPNRMIAKVCSDINKPNGQFILPNDREAVLTFVSTLPIRKIGGIGKVTEQMLHQVLGISTCQEMLQKAAFLCALFSESSADFFLSVGLGLGGTETPEQRQRKSISCERTFTATNDSSLLFKKLASLAENLSDDLQKEGFKGKTLTLKLKTADFEVRTRAVTTRNYIDSKEDILVYATKLIKAEMPISLRLMGLRMSQLHDEKDDPSTSTQKTLDIFFRSSNSNSNGNGTTVQRITNSPGQDNDSISLTTKEEYLAPDAGTSVSTGQQDFFLHDEICFIPEQQRSLDNDTKEAVLSDPLGGTKSDDVSSSAKHVKLAFHKVTPTKKLDEPDPLISPKAVSSSSKPDQQSWIDGYICSICGFELPPGFEEERLEHSDFHLAETLQQEEAVDGTRHISNESWVAERPRSTAPTPKKKLKSSKEGKHIPIDSFFTKCNKSP

SEQ ID NO: 12652 - protein, 102 aa, Zea mays
  VARIANT 94: note = Ancestral polymorphism is D, Derived polymorphism is N
MDAAAVRHRTVEANGISMHVAESGPDGDGAPAVVFLHGFPELWYSWRHQMAHLAARGYRCVAPDLRGYGGTAAPPDVASYSAFHVVGDIVALLDALGIHNKI

SEQ ID NO: 12653 - protein, 486 aa, Zea mays
  VARIANT 450: note = Ancestral polymorphism is R, Derived polymorphism is S
MSLASSHHLRPSPAGPARRPGCPAPRVALCRPPGASPPYRGRCCTIVAAAAPAAGAGGEAASAPAAAVPAVAPGAAARDKVRRHTISVFVGDESGMINRIAGVFARRGYNIESLAVGLNKDKALFTIVVSGTDMVLNQVIEQLNKLVNVHSVEDLSKEPQVERELMLIKLNVEPDQRPEVMVLVDIFRAKVVDISEKTLTIEVAGDPGKIAAVQRNLRKFGIKEICRTGKIALRREKIGATARFWRFSAASYPDLIEALPKKPLTSVNKTVNGSFVRPSNAGGDVYPVESYESSANQVLDAHWGVLDDDDATGLCSHTLSILVNDCPGVLNIVTGVFARRGYNIQSLAVGSAEKEGISRITTVVPGTVESIGKLVQQLYKLIDVHEVHDITHSPFAERELMLIKVSVNTAARREILDIAEIFRAKPIDVSDHTVTLQLTGDLDKMVALQRLLEPYGICEVARTGRVALVRESKVDSKYLRGYSLPL

SEQ ID NO: 12654 - protein, 373 aa, Zea mays
  VARIANT 296: note = Ancestral polymorphism is D, Derived polymorphism is V
MASAAATTTSAPAQNLNPLSINIKLPPWLSGLRCPFTFVCPPPPPPPPPPPPPPPLPPTEPVVPRSRRLPSLRVTTEYDSEEGVFVNKVSCKLAGDLAKLRLSFQSDPQGQWQGGGEEGDPLQQLFAAPLVGLITKRFSVLYDVEARNALLRGDCSLPGGAVQLRASHDVKAQQGEVSVITSLGDPLYKMELSSLVPYSGLPRATFHFPIGQVSVEEKRNEDDEKVLSVYGIGKSDFLDGVLTAQYNENDLNLRYCYKDKELTLVPSVSLPSNAVSIDFKRRFGPDDKLSYRYIFDTDEWNAVYKHKVGKNFKVKAGYDSEVRVGWASLWVGEEGGKAKTAPMKTKLQLMLQVPQDNPRNPYFLFNVKKRWDL

SEQ ID NO: 12655 - protein, 219 aa, Zea mays
  VARIANT 94: note = Ancestral polymorphism is Q, Derived polymorphism is R
  VARIANT 67..219: note = Derived polymorphism lacks residues 67 to 219
  VARIANT 61..219: note = Derived polymorphism lacks residues 61 to 219
  VARIANT 57: note = Ancestral polymorphism is E, Derived polymorphism is K
MEPDADENYMGDLSRFLPPSPSSSPPKNLGRRKQPSTQAQAQAQPRAKRGKGVLWQERRRQERERKQREEDARTMVGLAEAIPESNVGFRMLKQMGYDPDSRAGAEPVSIEIRRSRAGLGAEEPVLALTSALAPVEKPREVSERKRRQQEEMAAELREDSRNGLPEHLVRLGRPDLVAEQHHAALGVGERIHGRDEVRHRLLHVDHVCGDDEIEAARGG

SEQ ID NO: 12656 - protein, 142 aa, Zea mays
  VARIANT 5: note = Ancestral polymorphism is E, Derived polymorphism is G
  VARIANT 50: note = Ancestral polymorphism is S, Derived polymorphism is R
MFAVEFSVFWIPFNDRADKANYSYNNDGEKSNVPSLKNLPPIVHHETFFSNVQNDYNQTGLVPLEGCSASEASQLLSDRWTAAINMYNDQTIDPSEKPVMYSGSSSSSWGHLKLPHQMNFLEELRRAVDAHTEFASPVVTWN

SEQ ID NO: 12657 - protein, 476 aa, Zea mays
  VARIANT 357: note = Ancestral polymorphism is R, Derived polymorphism is W
MAAPAAAPLDEGKAKKVLRQVEFYFSDSNLPRDKFLRETVEQSDDGLVSLPLICSFSRMKSHLGLDADVKPETVPEETVLAVAEVLRPSPALRVSEDGKKIGRASELLKPDEIIEQVDSRTIAVSPLPCNVKQEDVQSFFTNYAKVNSVRLPRNIANKKHFCGTALVEFSEEEEAKRIMETALVFAGANLEIRPKKEFDAEQKSKKEAYEKTHLKKDNQYEGYQKGLIVAFKLEKATADTVVQQDNIDKENDSATKLDVSSSMEKPSGQGPEESILESDVIKQGMSSDDMTKEKDLNTGEATESEKCISDVPIESDKHGDSEPLSREGKIISGNVNVKNQISREDLKEAFKKFGAVRVMIIHAFSGFCLCCIGDNSGYLRFEDSKAAEKARMSAVLADGGLIIKDHIVTLEPVTGEAEKDYWDTIRSIQGKYKDSRSYKGRASNNQRGGKRFNAKRDRNPDSEKNSNKARKVEAIA

SEQ ID NO: 12658 - protein, 331 aa, Zea mays
  VARIANT 284..331: note = Derived polymorphism lacks residues 284 to 331
MEAAAAAVLHRTVEANGISMHVAESGPDGDGAPAVVFLHGFPELWYSWRHQMAHLAARGYRCVAPDLRGYGGTAAPPDVASYSAFHVVGDVVALLDALGIHNKVFVVGHDWGAIIAWYLCLFRPDRVAALVNTSVAFMRHIFVRAAAAAVTPIDYFHRTYGPTYYICRFQEPGVAEKEFSPANAGYLMKRILCNRFTSSAAGDDKRPPADAAEEEPLPPWLTEEDVGHFASEFERTGFTGPINYYRNMDRNWELAAPWADAKVRVPTRFIVGDGDLTYHYPGIQDYIHKGGFEADVPGLESVVVIPGAGHFVQQEKADEVSQHIYDFISKF

SEQ ID NO: 12659 - protein, 170 aa, Zea mays
  VARIANT 18: note = Ancestral polymorphism is K, Derived polymorphism is N
  VARIANT 24: note = Ancestral polymorphism is K, Derived polymorphism is N
  VARIANT 30: note = Ancestral polymorphism is E, Derived polymorphism is G
  VARIANT 62: note = Ancestral polymorphism is R, Derived polymorphism is Q
  VARIANT 102: note = Ancestral polymorphism is G, Derived polymorphism is A
  VARIANT 105: note = Ancestral polymorphism is P, Derived polymorphism is S
MAPVILAMNVHCYGCAGKIREVVKNLLGVEEVWVSVDTGLVVVSGTSLDAWLLRCRIQNSTRRPVTVVSDVAADTAPEPQHAAPPLGGYYPQHHYSGVLHMAPPPLPAGAYPYYYYYGSGDGWVPAPPQHLLQYVPTTTTVDGYFPSRQYVPNLAPVCFNDDNPNGCCVQ

SEQ ID NO: 12660 - protein, 253 aa, Zea mays
  VARIANT 24: note = Ancestral polymorphism is T, Derived polymorphism is M
MARVYVGNLDPRVTAREIEDEFRMFGVLRSVWVARKPPGFAFIDFDDRRDAQDAIRELDGKNGWRVELSTKVGGGRGRDRNGSDMKCYECGEAGHFARECRLRIGSGGLGSGRRRSRSPRYRSRSRSRSPRYRRSPSYSRSPRDRSPRRRSYSRSPLGSPARSLSRSPPLPPPPPRNNSRSPPGAREVSRSPPPPPPRNNSRSPPAARDVSRSPPAARDVSRSPPPPPDARRSYSGSPGQQPQRDESPYANDA

SEQ ID NO: 12661 - protein, 146 aa, Zea mays
  VARIANT 107: note = Ancestral polymorphism is R, Derived polymorphism is S
  VARIANT 32: note = Ancestral polymorphism is E, Derived polymorphism is K
MACSTNLCFSASIPPLPASSSSSVSSPFLTVERVSYVPSLSRWTIRYKQLGHAYQRSHVLAFASADASQGKRSSGENVVMVDPLEAKRLAAKQMQEIRAKEKLKRRSQAEAINGPLAMIGLTAGLIVEAQTGKGILGQELMTPAME

SEQ ID NO: 12662 - protein, 390 aa, Zea mays
  VARIANT 196: note = Ancestral polymorphism is P, Derived polymorphism is S
  VARIANT 355: note = Ancestral polymorphism is A, Derived polymorphism is E
  VARIANT 356: note = Ancestral polymorphism is K, Derived polymorphism is T
MTTATAIVAGHGLALRRSLPLPNPPGRATTSVSLSARPVTPARRMIVPASPSPRSPRRCRSISSESSTEASAAADIADEEVEAENKVDPQAEVCYLDPDVDPESIREWELDFCSRPILDARGKKVWELVVCDATLSLQFTRYFPNNAINSVTLRDALASVSEALGVPMPDRVRFFRSQMQTIITRACGDLGVKAVPSRRCVSLLLWLEERYEVVYSRHPGFQAGTRPLLALDNPFPTTLPENLFGDKWAFVQLPFSAVREEVESLERRYAFGAGLDLELLGFELDDTTLVPGVAVESSRAKPLAAWMNGLEICAMEADTGRASLILSAGVSTRYVYSGYQKTAASTQEAEAWEAAKKACGGLHFLAIQENLNSDGCVGFWLLLDLPPPPV

SEQ ID NO: 12663 - protein, 239 aa, Zea mays
  VARIANT 62: note = Ancestral polymorphism is A, Derived polymorphism is V
  VARIANT 103: note = Ancestral polymorphism is P, Derived polymorphism is L
MAQFLRGKAAAAAGAAVLRASSPAPWRRTASASYHHTIQAVPRETAGPRAAARERRHGRVPAVLLTLAGAAPGNGIAHRHLLTADRRQLAEMLKQSPYFLSTPVRLQVRAGERSNAILHAGTVLPIKVHRDENSGNILNLVMVKADEGTMLKVDLPVEFKGKDACPGLKKGGFLQKIRTSLVYLCPAEHIPPKIEVDLTNLDVGDRVLMHDIPVHPSLKLLSKNETMPVCKILASKPDE

SEQ ID NO: 12664 - protein, 72 aa, Zea mays
  VARIANT 15: note = Ancestral polymorphism is P, Derived polymorphism is R
  VARIANT 39: note = Ancestral polymorphism is R, Derived polymorphism is L
  VARIANT 52: note = Ancestral polymorphism is L, Derived polymorphism is F
MPSDDHHRRRTFLLPVYCPSFSATGAPASPPAAAASTGRLCCWMTRKKRKRLKHRRASTSGCWERFRAHAVL

SEQ ID NO: 12665 - protein, 446 aa, Zea mays
  VARIANT 361..446: note = Derived polymorphism lacks residues 361 to 446
MKITVRGSEMVYPAAETPRRRLWNSGPDLVVPRFHTPSVYFFRREDADGNDLAGADGSFFDGARMRRALAEALVPFYPMAGRLARDEDGRVEIDCNAGGVLFQEADAPDATIDYFGDFAPTMELKRLIPTVDFTDDISSFPLLVLQVTHFKCGGVAIGVGMQHHVADGFSGLHFINSWADLCRGVPIAVMPFIDRSLLRARDPPTPAYPHIEYQPAPAMLSEPPQAALTSKPATPPTAVAIFKLSRAELVRLRSQVPAREGAPRFSTYAVLAAHVWRCASLARGLPADQPTKLYCATDGRQRLQPPLPEGYFGNVIFTATPLANAGTVTAGVAEGASVIQAALDRMDDGYCRSALDYLELQPDLSALVRGAHTFRCPNLGLTSWVRLPIHDADFGWGRPVFMGPGGIAYEGLAFVLPSANRDGSLSVAISLQAEHMEKFRKLIYDF

SEQ ID NO: 12666 - protein, 328 aa, Zea mays
  VARIANT 113: note = Ancestral polymorphism is E, Derived polymorphism is V
MAALLRTAAALVPPPSSPLSAREPRGRCLRLACSRRAPVRQLRAWPLPTPHVFGRSGGRFRRLSVTEAEEAAQTAAQEDPETEVTGESAADDSAGSTDETPSIIVTTLQSYRVALINDDDAKAAEIESFLLSIEDEKNSLLNKITALDVELATQRERILRISADFDNFRKRTENEKLNMMENVQGELIESFLPVLDNFERAKMQIKVETEGEEKINNSYQSINKQFIEILNSLGVEDVETVGKPFDPMLHEAIMREESSEYEEGIILQEFRKGFKLGERLLRPAMVKVSAGPGPENSGDDDPTVVEDSVAPQKVEDVEEDGFDDGDAE

SEQ ID NO: 12667 - protein, 647 aa, Zea mays
  VARIANT 305: note = Ancestral polymorphism is S, Derived polymorphism is I
  VARIANT 419..647: note = Derived polymorphism lacks residues 419 to 647
  VARIANT 491..647: note = Derived polymorphism lacks residues 491 to 647
MSMRPRYTYAHGPDGSYSLNIQLTALPCPGMALHLNTVIDCTPGNAWLDRIPPITIDFLNKLPQQSEAPTPASAVAAQLTRRFTCSTGDFVRQLQRVEPMVTAAGLPLECVPSVEEFIHLSVSSNSFYKAVAITVEAGASVDDEDEELPPGAVVGECAICYKEYLVDGPTSVKLACNHTFHRRCLDRWTAVYPTCPYCRAPVPVEQDYWDDEDDCDDSESGYDDVTSEEGGDSELEYDVPNEEDDGSSPAPDGDDGAHEPFSRKLLEDKPRITEEMVRGYMSNTELETAVHAFGSRCSNISRVYSIGKSVNHFPLWVIEISDKPRQRESEPAFKFIGNVHGDEPVGREVLMHLANCLCDNYLKDSLATLIIENMHLHILPIMNPDGFALRWRGNANNIDLNRDFPDQFFPVNNDIDYRQPETRAIMNWVKQEHFTASASLHGGALVANYPWDGTRDTRAQYYFVSHCNILNNDFTSYNKHYYGCPDDKTFQHMASVYSRSHYNMSLSKEFEGGITNGAFWYPIYGGMQDWNYIHGGCFELTLEISDTKWPKADEDEYAQSSSKPNKDCKNGTAKQAKISMAYSFIHRPLSDEERRVSTPVVVTCNDQRREVSVAQNIANKEIDRTVAFDKVAILLHLLATATPQAFT

SEQ ID NO: 12668 - protein, 284 aa, Zea mays
  VARIANT 35..284: note = Derived polymorphism lacks residues 35 to 284
MALHLNTVIDLTVDNYWLFRIPPITIDFLNKLPQQSEAPTPASAVTTQLTRRFTCSTGDFVLCRQPQRVEEMVTAAGLPLECAPSVAEFISLSVRSNSYRKPVAMTVEVGAPVDEDEDEELPPGAVVEECAICYKEYLVGGATSVKLACSHTFHRKCLDRWTAVNRTCPYCRAPVPVEQDYWDDEDACDDEESESGDIPSEEGDDEESESDDIPSEEGDDEESEYDDIPSEEGDDWESEYEDVPNEEDHGSSPASDGSSQEVTAASPEFVSSVRDLSLSCLRLD

SEQ ID NO: 12669 - protein, 276 aa, Zea mays
  VARIANT 138: note = Ancestral polymorphism is T, Derived polymorphism is I
MPMRPRPRYAYARRPDGNYSFTIQRTALPCPGVELRFNTVIDCTWGKDPMPPITIDFHKNLPRLIEPPMPALSAVPAQMTRRFTCSSGDFVVYRQLQRVGAMVTAAGLPVECVPSVEEFIRLSALCAINLFCKTVAITVEAGADEDEDEELPPGAVAGECAICYKEYLVDGPTSVKLACSHTFHRRCLDRWTAVKSMCPYCRAPVPMEQDCWYEDDCDDSESDYDDVASEEDDDSESDYDDVASEEDDDSESDYDDVASEEGDGSSPAPDGSGQEA

SEQ ID NO: 12670 - protein, 243 aa, Zea mays
  VARIANT 34: note = Ancestral polymorphism is T, Derived polymorphism is K
MASLFKDPSKLSAYRDRRFKGTQEEYEATLHASTTLYIGNMSFYTTEEQAYELFSRAGEIKKIIMGLDKNSKTPCGFCFVLYYSREDAEDAVKYISGTMLDDRPIRVDFDWGFEEGRQWGRGRSGGQVRDEYRTDYDPGRGGYGKMVQRELEAQRELVDYGGSFQPNAPPPYERGERKRGYGDSHRNDRGDYQRKRYRSSDDRSAPEESKRAPDSDPAEKNPRFREKGDSDEEEDDYDKRRRR

SEQ ID NO: 12671 - protein, 289 aa, Zea mays
  VARIANT 64..289: note = Derived polymorphism lacks residues 64 to 289
  VARIANT 86..289: note = Derived polymorphism lacks residues 86 to 289
  VARIANT 92..289: note = Derived polymorphism lacks residues 92 to 289
  VARIANT 119..289: note = Derived polymorphism lacks residues 119 to 289
  VARIANT 140: note = Ancestral polymorphism is S, Derived polymorphism is L
  VARIANT 148: note = Ancestral polymorphism is V, Derived polymorphism is A
  VARIANT 199: note = Ancestral polymorphism is I, Derived polymorphism is N
  VARIANT 206: note = Ancestral polymorphism is P, Derived polymorphism is S
  VARIANT 251: note = Ancestral polymorphism is G, Derived polymorphism is R
MRRRLHAHLAPRNRLPVAPRVTASTGHIPPFPNSTDVKRDSPLAPPHPPSPTLEEPVEEAPKTYASVLRTKSKATMAITESQQAQQLAQQPQSASVHEKSNLDNHRDAEGASTEQALSSALTSIMDALKSTDWNTRKDASLALSSIVVSSGYLITSFRTSCLRSLECSKFDKFSCGKLFQGLILLNHQKLDHQHKIASIVASGIQPLHNLTVLRFIDQKVGAWESVLWTQQQIERGFTAIENLIQLKGCAGKYATGDEVQLLQNQVRLPRRARMTMILMRTRQMKPIAF

SEQ ID NO: 12672 - protein, 196 aa, Zea mays
  VARIANT 3..196: note = Derived polymorphism lacks residues 3 to 196
  VARIANT 17: note = Ancestral polymorphism is E, Derived polymorphism is K
  VARIANT 20: note = Ancestral polymorphism is A, Derived polymorphism is V
  VARIANT 84: note = Ancestral polymorphism is Q, Derived polymorphism is E
  VARIANT 87..196: note = Derived polymorphism lacks residues 87 to 196
MFQESGPVGTTNQSRTEVRVLMAELAADFLGTPRPGRRLGSRTKPAVVLPSQICALVVQERSWPPAATVARAPSLASRSRQPPQPRWRPPPRVACKEALTSYNSLDNPAAGAPVEQLNELEEVFKKAAKTDTPAEQFRLTRQNEERSKKVANDLAAALFVVTVEVKQVKAWLSDAQDELEASNIEADLVCISSYAS

SEQ ID NO: 12673 - protein, 137 aa, Zea mays
  VARIANT 87: note = Ancestral polymorphism is R, Derived polymorphism is H
  VARIANT 66..137: note = Derived polymorphism lacks residues 66 to 137
  VARIANT 64: note = Ancestral polymorphism is R, Derived polymorphism is C
  VARIANT 23: note = Ancestral polymorphism is L, Derived polymorphism is F
  VARIANT 20: note = Ancestral polymorphism is P, Derived polymorphism is L
MQTNLQMEGGQTHVPWRRTPARLRWLTRSGRQRGGPGHRRGGGPGALLHHERADLRREDYGWLRPRTESSSWSRRSQEVSGELRHEHAHLGAALVRRAHRPRLLEHVPRAAPRHHFEDPAALLLVVVATVVLAVAVV

SEQ ID NO: 12674 - protein, 455 aa, Zea mays
  VARIANT 47: note = Ancestral polymorphism is C, Derived polymorphism is R
  VARIANT 34: note = Ancestral polymorphism is T, Derived polymorphism is I
MCTPAACRGRVRINVGGRVFETTAATLSSAGRDTMLGAMVDASWNACPDGAAEYFIDRDPACFAVLLDLLRTGALHVPPGVPEATLYREALYYGLLDRVRAARLGELDGDRVRLAASVPGRAPGDGTAVRAAPDGGCCVAHGGAVRVYNWMLEERRPVCLAHAPVNDAAYLDAATLLVAARERPGRRDGHDGGVAAFSALTGGLRHRFRVAHARQPRSFTAGALAFDGGGGSGCAVFASCKGRLNEYGVGVWDRNTGEQADFFYEPPGCALGDADRLQWLDGTGALMVATMFPRADSSSISLLDFRDRSVVWSWSDVGTPASLEDKHAVHAVAMEDGRSVCVINQYDDLGFLDLRSSAGGVRWRSRSKLAAGGKAKALGEEVCYPKLATYGGQLFASTGDAISVFSGPDHVLTSTLRRSEGGAICDFSIGGDRIFALHSDENVFDVWETPPPAII

SEQ ID NO: 12675 - protein, 797 aa, Zea mays
  VARIANT 292..797: note = Derived polymorphism lacks residues 292 to 797
  VARIANT 55: note = Ancestral polymorphism is E, Derived polymorphism is G
  VARIANT 51..797: note = Derived polymorphism lacks residues 51 to 797
MAEDPAAEQETRQLEDRLREVGERLQAPPDDAEDLLNLLIEVEECLLKVEQSPPESTSNALQLATAALVKKELLAHADSNIRLAVASCISEITRITAPDAPYDDDAMKDVFSLIVEAFKHLDDIESPFFGRRTSILDTVAKVRSCVVMLDLECDDLINDMFHHFLRTVNSGHSEAVICCMETIMRLVIEESEDVQPQIASCLLQNVRKEEKESSSASFELAEKVIGTCREKLKPVFLQSLKGTSLSEYSQIVASVCEDVSDDREDNNADPSGKDTVDDGKLSERTISDELPQESSKAEQDVSRPEQDGTCMNGNTGTAISSGATLPDTSESDQGPPKEKTEQPCYADDITDTDQLKSDHNEGAEFDTAKPEKKAAVDSDKSAKLKLSDKCEAPVHSDADTKKEASAEGTDGAADDTSTAADCTPKPKRGRPPGPKSSQKKAAGKDQSSGSDLKKVNEAGDSAGKLAKRSAKDEKSTKKAGEGESSKKTQKYNSKQQKDENLSEDPAKDLSLKEMITPKSSTKVPGRTKGQSTENSTPKMKQEQETEEPPRSRKSKGLDKSLVGARIKVWWPDDKMFYNGVVESFDSVSKRHKVAYDDGDVEVLLLRDEKWEFISEEKGASVASETPGGRKRKADAVKEENTETPKSDAVDHPKKRGRPKGVRSSNGTPSNSATPSTKGKTAGKNTKETPKTGPNLIKELEKSSKDKASVSTETKDELPKDDRSASRPKEAISKGKDSKDEGKSTEGKARPGRKLKNAGTPAGDADKEKGKEKEVKAAEIEQEAPGNASTGKKRRRKA

SEQ ID NO: 12676 - protein, 83 aa, Zea mays
  VARIANT 64: note = Ancestral polymorphism is S, Derived polymorphism is F
  VARIANT 49: note = Ancestral polymorphism is L, Derived polymorphism is M
  VARIANT 46: note = Ancestral polymorphism is L, Derived polymorphism is P
  VARIANT 43: note = Ancestral polymorphism is A, Derived polymorphism is V
  VARIANT 40: note = Ancestral polymorphism is R, Derived polymorphism is H
MFNADNVVKECVVTSGAGGKAMALRSMGRGCGLFSAYYSHEPVRCLLDMVEVEFSYDVDIDLVFVDLPVLEQERYRWTLEIVV

SEQ ID NO: 12677 - protein, 226 aa, Zea mays
  VARIANT 156..226: note = Derived polymorphism lacks residues 156 to 226
  VARIANT 145: note = Ancestral polymorphism is A, Derived polymorphism is V
  VARIANT 76: note = Ancestral polymorphism is T, Derived polymorphism is M
MPKPPAGFVLNEWGRCIAAAFKCIFIIVRSWPAAGHQYHRLGPPTSCNAGPVLSPFDREFSTKKISIMKRLLHEFMRKQALHLQVYTEEIRVQSSGLYLPRIRSRVQHIHRRIALSALIKIYGCFLFHLASDFDNMRPHLIIVGALKMINIIAPSWRVIPATNMIDKIRKDPQLKKKICFNPYMYRGNLALQIGCKLLSVSLDIKKSLHEVRSSPSVRPPHATLVA

SEQ ID NO: 12678 - protein, 198 aa, Zea mays
  VARIANT 156: note = Ancestral polymorphism is R, Derived polymorphism is Q
  VARIANT 101: note = Ancestral polymorphism is L, Derived polymorphism is V
  VARIANT 61: note = Ancestral polymorphism is G, Derived polymorphism is S
  VARIANT 58: note = Ancestral polymorphism is L, Derived polymorphism is M
  VARIANT 42: note = Ancestral polymorphism is F, Derived polymorphism is L
MAAEEGEKAKSGGGGQQMTVVRGLDVARYMGRWYEIASFPSFFQPRDGRDTRATYRLLEDGATVHVLNETWSKGKRDYIEGTAYKADPGSDEAKLKVKFYLPPFLPIVPVVGDYWVLYVDDDYQYALVGEPRRKNLWILCRKTSIDEDVYNQLVERAKEEGYDVSKLHRTPQDDPPPESDAAPTDTKGVWWFKSLFGK

SEQ ID NO: 12679 - protein, 453 aa, Zea mays
  VARIANT 341: note = Ancestral polymorphism is P, Derived polymorphism is L
  VARIANT 305..453: note = Derived polymorphism lacks residues 305 to 453
  VARIANT 296: note = Ancestral polymorphism is L, Derived polymorphism is P
  VARIANT 295: note = Ancestral polymorphism is L, Derived polymorphism is Q
  VARIANT 268: note = Ancestral polymorphism is D, Derived polymorphism is Y
  VARIANT 252..453: note = Derived polymorphism lacks residues 252 to 453
  VARIANT 247: note = Ancestral polymorphism is P, Derived polymorphism is Q
  VARIANT 210: note = Ancestral polymorphism is F, Derived polymorphism is S
  VARIANT 201: note = Ancestral polymorphism is I, Derived polymorphism is T
  VARIANT 193: note = Ancestral polymorphism is D, Derived polymorphism is N
  VARIANT 122..453: note = Derived polymorphism lacks residues 122 to 453
MPFSSSGPPSNDVRPIPYLDECDAPRRKRRHTSYPNRSYYGTLDYECSYCHAVFWYAERVRSNQQDSSIRYNNCCKGGKISIPPFKPRPEPLASLARFDDDATSRKFIRNIRQYNCLFAFTSMGAQIDNSVNDGRGPPLFKICGQVHHRIGTLLPDNGSPPRFIQLYIYDTTNEVQNRINALDSGDRTQDNFDPVIIRNLIKMLDDHNPFVKKFRMARDRLADNPNEEFTIRLIGAKEGDPIQYNLPTTDELAMLVVRDFTLDTFKRDIIIETQNKELKRISSLHPAYMALQYPLLFPFGERGFQVGVLYNGATSSGQNARKHLTMQEYYCYQFHYRKNQPNPYLCYAMLSSQAKVDAKACIDENRLNYIINNQKNLRMESIQGITDAVSRGCISGEEMEKTIILPASHTGGRRYMIQNYHDDIAICRVHGPPDFFLTFTCNPNWQEILESLS

SEQ ID NO: 12680 - protein, 463 aa, Zea mays
  VARIANT 9..463: note = Derived polymorphism lacks residues 9 to 463
  VARIANT 12: note = Ancestral polymorphism is V, Derived polymorphism is I
  VARIANT 420: note = Ancestral polymorphism is S, Derived polymorphism is L
MAAGLARLRSAVERLGSSRARARARPFSAAVAEAAAAVTASSGLGIWLLSSNPHSLADSGQAEDAATAGGGGNIAFPAAVGGVGATGEREGRFLFGDSYRRRVFFKYEKRIRTRSPPEKIFEYFASVHSPEGEMHMLPTDLMRAVVPIFPPSESKIVREGRLRGERHPGELQCAPSDFFMLFDTNADGVISFAEYIFFVTLLSIPESSFNVAFKMFDLDHNGEIDKDEFRKVMTLMRSYNRQGAAHRDGLRFGRKVGQPVENGGLVEYFFGKDGNEHLHYDKFSSFLKQLHDEIVRLEFSHYDLKSSNTISAKDFALSMVASADMNHIDKLLDRVDDLDDNLDLKDLRITFEEFKAFADLRRRLEPFAMAIFSYGKVNGLLTKQDLKRAASHVCGVDLTDKVVDIIFHVFDANCDGNLSSEEFLRSLQRRENDIRQPATSGFLGVIACWLNCTKCSLQQMLPQ

SEQ ID NO: 12681 - protein, 609 aa, Zea mays
  VARIANT 296: note = Ancestral polymorphism is K, Derived polymorphism is E
MGGVCSRKRSQLVDEGDALQTSPRFSKTSSLKWLLLTLPRSSSDVSGKGQGNEPGRCPSLMELCVARVCQDIDRYSTFAMLPRDLSQQIFNELVNSNRLTEASLQVFRDCALQDIGLGEYPGVKDAWMEVVASQKQSLLSVDISCSEVADSGIDLLRDCSSMQSLACNYCDQISESGLGVLSGLSNLSSLSFKRSNAVTAEGMRAFANLVNLLNLDLEGCLKIHGGLIHLKDLTKLESLNMRYCNYIADSDIKYLTDLTNLKDLQLSCCKITDLGVSYIRGKQYQKFIYLFGGLQKLTHLNLEGCPVTAACLEAISGLSSLVLLNLNRCGIYDDGCENFEGLKRLKVLNLGFNYITDACLVHLKELISLESLNLDSCKIGDDGLSHLKGLVLLQSLELSDTEVGNNGLQHLSGLRNLQSINLSFTLVTDIGVKKISVLNSLKSVNLDNRQITDVGLAALISLTRLTHLDLFGACITDNGTNCFRYNFGEALFDISYLFCKQTTSFDTIYVVADFKNLVSLEVCGGFVTDAGVKNIKDLKALTLLNLSQNANLTDKTLELISGIVLPCWNKCTSFLQLKSHGHLVYRPDCFDQLERVKLTGVQCWSQTPE

SEQ ID NO: 12682 - protein, 221 aa, Zea mays
  VARIANT 41: note = Ancestral polymorphism is A, Derived polymorphism is T
MGEEASCNAASAMEAATNARPAKENGRAPAVAEVVAQEAAADPRLQGISDAIRVVPHFPKHGIMFNDITTLLLRPRVFKDAVDLFVERYRGMRIDAVAGIEARGFIFGPAVALAIGAKFIPLRKPRKLPGEVISEKYVLEYGTDCLEMHVGAIERPGERVLITDDLVATGGTLCAAIRLLERAEADVVECACLIGLPKFKDFYKLNGKPVYVLVESRESDK

SEQ ID NO: 12683 - protein, 223 aa, Zea mays
  VARIANT 78: note = Ancestral polymorphism is P, Derived polymorphism is S
MNSKKLSAMVLAGVDSHRYATSSAFAKYNPVKNIKPLLSSPKLKPRTKVGCQASLSSFSYPELSFKPKWWWRTLACVPYLLPLHNMWGHADAIYQLHPYLQRFSLPYAFIDTMALLPGWLFLAIFMTIYFFVVRRKWSPHFLRFHIILAILLDTGSQALATACNWNPSIAFQGKQMAHFWMAMAFIQIFTVAECVRCALSGVYANVPFISHAALIHSDLNLFR

SEQ ID NO: 12684 - protein, 438 aa, Zea mays
  VARIANT 156: note = Ancestral polymorphism is S, Derived polymorphism is I
MRYNAASGRVGLRFQQLHQHQHHARVDARHRGSGGGAQQGPFQWADHPRLVTEAAENGWAQFVFAVAPPRSKSKSASSSPLWGTCPLCDAGTSRDMAEAAAWELPMGSSERMQAVRLDPAAAAASSRKWLPGSNPSPLRGDTDAGNPNALCLARMSLPLPGPPLAGAPFPQDAYFEITIIYLNTKRPEWSASRASRRGRDGSSESDRVKLVSFAPAAKNPVQENRAVKDDEQDKRRHLVMSLGLATASAAPQRPSLVGTYASSIGFHSDGAVYLDGMKLVYESDKSSWAGVDKVVGCGFEPAKRKVFFTVDGQLVHAVSCNAEAFSSPLYPVLASSFDVMALVNLGQSKFRYAPGNARRTANPCFVRAASTVDARGSGSMGLDFDDSGELFSVGRVDSGWLETAKTSRSRKESVGGSGAASVGDPEAESDLFEIPLRD

SEQ ID NO: 12685 - protein, 362 aa, Zea mays
  VARIANT 233..362: note = Derived polymorphism lacks residues 233 to 362
MDRAALTVGPGMDMPIMHDGDRYELVRDIGSGNFGVARLMRNRADGQLVAVKYIERGEKIDENVQREIINHRSLRHPNIIRFKEVILTPTHLAIVMEYASGGELFERICNAGRFSEDEARFFFQQLISGVSYCHSMQVCHRDLKLENTLLDGSTAPRLKICDFGYSKSSVLHSQPKSTVGTPAYIAPEVLLKKEYDGKVADVWSCGVTLYVMLVGAYPFEDPDEPKNFRKTIQRILGVQYSIPDYVHISPECQNLVSRIFVADPATRITIPEIRNHPWFLKNLPADLMDDSTMSKQYEEPEQPMQSMDEIMQILAEATIPAAGPHGLNQFLNDGLDLDDDMDDLDSDTDLDLESSGEIVYAI

SEQ ID NO: 12686 - protein, 416 aa, Zea mays
  VARIANT 73: note = Ancestral polymorphism is G, Derived polymorphism is R
MATAADIRVSIGYQTRFGLRLAAALSSPPPSPASNSAFSPLSLHVALSLLAAGAGGATRDQLAAALGGDAPAGADGLHALAEQVVQLVLADGSGAGGPRVAFADGVFVDSSLKLKPAFEEIAVGKYRADTQSVDFQKKVDLIPFLPSSLTLAYFYRDAAEAAGQVNSWVEKITSGLIKEILPPGSVDHTTRLVLGNALYFKGAWTEKFDASKTKDSEFHLLDGSSVQAPFMSSTDKQYIVAYNNLKVLKLPYQQGADKRQFSMYILLPDAKDAIWSLAEKLSSEPEFLENHVPMHKVPVGQFKVPKFKISFGFEASELLKGLGLQLPFSAEADLSGLVDSPEGRNLSVSSVFHKSFVEVNEEGTEAAAASAATVVLRSFTMPQDFVADHPFMFLIREDLTGVVLFVGHVVNPLLAP

SEQ ID NO: 12687 - protein, 136 aa, Zea mays
  VARIANT 41: note = Ancestral polymorphism is T, Derived polymorphism is I
  VARIANT 59: note = Ancestral polymorphism is A, Derived polymorphism is V
  VARIANT 77: note = Ancestral polymorphism is T, Derived polymorphism is K
  VARIANT 80..136: note = Derived polymorphism lacks residues 80 to 136
  VARIANT 86: note = Ancestral polymorphism is A, Derived polymorphism is D
  VARIANT 114: note = Ancestral polymorphism is C, Derived polymorphism is Y
  VARIANT 124: note = Ancestral polymorphism is G, Derived polymorphism is D
MNAPDHYEHFVVPEGTKKVSYERDTKIVNAASFTDEREDHTVGNILRMQLHRDPNVLFAGYKLPHPLQYKIIVRIHTMSQSSLTQAYTQAINDLDKELEYLKQAFEWFSMQEGCAVKGKEMISGVKLMFCTVASCR

SEQ ID NO: 12688 - protein, 144 aa, Zea mays
  VARIANT 56: note = Ancestral polymorphism is K, Derived polymorphism is N
MKGSWEEGSASGCISKKNRAATAHGGRRCGGATDCSVAQRVTVPVGDDGVRFSLAKGVAACCRRRGDGLGSATAWRSWRGAGSRPREVERHEELTSPARRHGRDAVDGEVSGGCVDSGEIGEGGVVWPSRANARKFVSASVIDD

SEQ ID NO: 12689 - protein, 297 aa, Zea mays
  VARIANT 69: note = Ancestral polymorphism is V, Derived polymorphism is F
  VARIANT 44..297: note = Ancestral polymorphism lacks residues 44 to 297
  VARIANT 39: note = Ancestral polymorphism is T, Derived polymorphism is I
  VARIANT 37: note = Ancestral polymorphism is L, Derived polymorphism is R
  VARIANT 36: note = Ancestral polymorphism is N, Derived polymorphism is K
  VARIANT 12: note = Ancestral polymorphism is I, Derived polymorphism is T
  VARIANT 2: note = Ancestral polymorphism is R, Derived polymorphism is S
MRTVRSSYSCLIVMVPDDAGWYSIILCSLNCERKHNLTTDYNIRLGLVIFSQHKSTNSYVPSTTDSTDVLLVNLNKQNSKQHVDWTNWVIIRGDFFLTYIATFDFTAFGKMIIPLLIGHIVGDGKLDVGKFPFSILKFLEDIHGLRQELFVIEDEIHILAKQSIPRVSVDNEMEYKDIIKGGMKEVLVLNGHAYNRKCGVYNFGNYLWEIYCCNMPYPDLSFLFTRPEISHCCPSSLANVRCWDTNPDKRPEMAEVVSLAEAIDTSNGGDVNPKDQTQGCLSFFGDNQFKFNQLAYS

SEQ ID NO: 12690 - protein, 169 aa, Zea mays
  VARIANT 34: note = Ancestral polymorphism is M, Derived polymorphism is I
  VARIANT 38: note = Ancestral polymorphism is A, Derived polymorphism is T
  VARIANT 41..169: note = Derived polymorphism lacks residues 41 to 169
  VARIANT 61: note = Ancestral polymorphism is D, Derived polymorphism is H
  VARIANT 65: note = Ancestral polymorphism is P, Derived polymorphism is S
  VARIANT 82: note = Ancestral polymorphism is R, Derived polymorphism is K
  VARIANT 93: note = Ancestral polymorphism is R, Derived polymorphism is W
  VARIANT 94: note = Ancestral polymorphism is A, Derived polymorphism is V
  VARIANT 95: note = Ancestral polymorphism is G, Derived polymorphism is R
  VARIANT 97: note = Ancestral polymorphism is S, Derived polymorphism is F
  VARIANT 101: note = Ancestral polymorphism is P, Derived polymorphism is L
  VARIANT 108: note = Ancestral polymorphism is T, Derived polymorphism is M
  VARIANT 111: note = Ancestral polymorphism is E, Derived polymorphism is K
  VARIANT 136..169: note = Derived polymorphism lacks residues 136 to 169
  VARIANT 158..169: note = Derived polymorphism lacks residues 158 to 169
  VARIANT 161: note = Ancestral polymorphism is A, Derived polymorphism is V
MPPTPTRRRAKPALTSGQIYLPVWCCAYDHLVKMLQQAYAQMDGFDQTVNVKVVMATNRAHTLDSTLLRPVSDVPVSTRLLRHIIDLKRHFKRVGKFKVVLKYFQVGTVVEPASEFYSSRLKNRERKATLVDELLSDQSLKSYRYAHHTFAILHVHQWTVACFSVQDFL

SEQ ID NO: 12691 - protein, 306 aa, Zea mays
  VARIANT 7: note = Ancestral polymorphism is T, Derived polymorphism is I
  VARIANT 16: note = Ancestral polymorphism is I, Derived polymorphism is T
  VARIANT 50: note = Ancestral polymorphism is A, Derived polymorphism is T
  VARIANT 189..306: note = Derived polymorphism lacks residues 189 to 306
  VARIANT 192: note = Ancestral polymorphism is V, Derived polymorphism is G
  VARIANT 195: note = Ancestral polymorphism is Q, Derived polymorphism is R
MNGQGRTVDFRNTLIIMTSNLGTEHLLAGMVGKNSMKVARDLVMQEVESAHPAAMAAESAIDTNTEHPEPEHKDLLRVYEVGDGSTMGCLHSIGSDLTQTRELPELQQNVSMRSGQEASTVGKDSSRTPTSVRELVVPVCSLESGVLGKRIKRSLTGGNEMQSTQDKRSRKASMVNEAILQHVKYQNPQAHVTHRNLIYVIQDAMNFGVVSVDESQNVAILIKHGPLAIGINAAYMQTYIEGMPCPYICGRHLDHVVLLVGYGAAGFAPIHLKDKPYWIIKNSWGMNWRENEYYKICRVPTFATSA

SEQ ID NO: 12692 - protein, 94 aa, Zea mays
  VARIANT 90: note = Ancestral polymorphism is K, Derived polymorphism is M
  VARIANT 85: note = Ancestral polymorphism is E, Derived polymorphism is D
  VARIANT 73..94: note = Derived polymorphism lacks residues 73 to 94
  VARIANT 46: note = Ancestral polymorphism is L, Derived polymorphism is P
MNAPDRYEHFVVPEGTKKVSYERDTKIVNAASFTDEREDHTVGNILRMYKLPHPLQYKIIVRIHTTSQSSPTQAYTQAINDLDKEIEYLKQAFE

SEQ ID NO: 12693 - protein, 183 aa, Zea mays
  VARIANT 52..183: note = Derived polymorphism lacks residues 52 to 183
  VARIANT 154: note = Ancestral polymorphism is A, Derived polymorphism is V
  VARIANT 155: note = Ancestral polymorphism is G, Derived polymorphism is V
MASGEARLGMASGRCSRGWTLASRRAGASAVGEDAAEVRVGGVAGSSERIVWPPEARVVSNQKKGSLDESPSDDGLPNKQMNKPKKSVRVNFLPRKKARKPMGFWAAKLALRRVSYERDTKIVNVVSFTVEREDHIVGNILRMQLHRDPNVLFAGYKLPHPLQYKIIVRIHTTSQSSPTQAYT

SEQ ID NO: 12694 - protein, 97 aa, Zea mays
  VARIANT 51..97: note = Derived polymorphism lacks residues 51 to 97
  VARIANT 44: note = Ancestral polymorphism is R, Derived polymorphism is M
  VARIANT 38..97: note = Derived polymorphism lacks residues 38 to 97
  VARIANT 15: note = Ancestral polymorphism is G, Derived polymorphism is D
  VARIANT 9: note = Ancestral polymorphism is R, Derived polymorphism is C
  VARIANT 1: note = Ancestral polymorphism is M, Derived polymorphism is I
MNAPDRYERFVVPEGTKKQLHRDPNVLFAGYKLPHPLQYKIIVRLFICVRQIHTTSQSSPTQAYTQAINDLDKELEYLKQAFEDEKNRYEDRMKQGF

SEQ ID NO: 12695 - protein, 523 aa, Zea mays
  VARIANT 288: note = Ancestral polymorphism is S, Derived polymorphism is L
  VARIANT 435..523: note = Derived polymorphism lacks residues 435 to 523
MLVERMTKTMSTESIFSRKYGLLGKQEAHENAKRIEELCFASADEHFKNEPDGDGSSAVQLYAKESSKMMLEVLRKGPRTTAELEAPVDDTSLVSADAPRVLADTVLDISGGERAFIEADEAKELLSPLTKPGNSYKRICFSNRSFGIGAANVAGPILESVKNQLTEVDISDFVAGRPEDEALDVMRIFSKALEGSVLRYLNISDNALGEKGVRAFSELLKSQESLEELYVMNDGISEEAAKALSELIPATEKLKVLHFHNNMTGDEGAMYIAEMVKRSPNVESFRCSATRIGSDGGVALSEALGTCTRLKKLDLRDNLFGVDAGLALSKTLPKLPDLVELYLSDLNLENKGTIAIAKALEQSAPQLEVLEIAGNEINAKAAPDLAKCLAAMQSLKKLTLAENELKDDGAVIIAKSLEDGHIDLKELDVSVNMLQRVGARCFARAVANKPAFELLNINGNFISGEGIDEVEEILKAGKKPLKVLGPLDENEPDGEPDDDDEEVEDNEDELNSKLQSVKVEQDD

SEQ ID NO: 12696 - protein, 132 aa, Zea mays
  VARIANT 76: note = Ancestral polymorphism is E, Derived polymorphism is K
MALEKAKEIIASSPVDLALRKAKETVASHPVVVFSKTYCPFCTRVKQLLAKLGASYKAIELDVESDGAELQSALAEWTGQRTVPNVFVKGERIGGCDATMAMHDGGKLVPLLTEAGAIVTARATATTTTPSL

SEQ ID NO: 12697 - protein, 643 aa, Zea mays
  VARIANT 254: note = Ancestral polymorphism is R, Derived polymorphism is W
MKYMKLGSKPDVFQTEGSNIRFVATELATDIVISVGDAKFYLHKFPLLSKSSLLQRLVASSNDEKNDEVDISDIPGGPSAFEICAKFCYGVIVTLNAYNVLAARCAAEYLEMFESIDKGNLIYKIDVFLTSSVFRTWKDSIIVLQSTKSLQPWCENLKVINHCIDCIASKASIDPSEVEWSYTYNRKKLPSENGIDSHWNGVRKQPMVPSDWWVEDLCELEVDLYKRVIMTIKAKGSTPAAVIGEALRAYAYRRLLGSLEDAVSNGVDCTKRRAALDAIVFLLPAEEGSVSCGFLLKLLGAACLLESGESHRVNLIKRIGTQLDGASVPDLLIPLNTNEDNISSIDLIMAIVEEFMSRNGDSGTEKFQDDEGIVDIEKSTSVSSASKLAVAKLIDGYLAEIAKDPNLPLPKLIALAEMVSSLPRPTHDGLYRAIDMYLKEHPSLSKSEKKKLCGLMDCKQLSQDACMHAVQNERLPLRVVVQVLFFEQVRASSSVASARSDANSTSGLPSAVRSLLPRENGNSIGSSRSAATTMTTEEEESGVPTSSDINSLRSMRLANNSGGSERSSGSSDVNNKSSDDRSAAATGKAKGTMLMPKKMLSKLWSGKTNAGESSSSDTSDSPGSANPEEAKSTQSRITWRSVS

SEQ ID NO: 12698 - protein, 281 aa, Zea mays
  VARIANT 33: note = Ancestral polymorphism is Q, Derived polymorphism is H
MDGQFGWGREEGGWRKGPWTAQEDKLLVEYVRQHGEGRWNSVAKLTGLKRSGKSCRLRWVNYLRPDLKRGKITPQEESVILQLHALWGNRWSTIARSLPGRTDNEIKNYWRTHFKKAKPSKNVERARARFLKQRREMQSQLLLLQGQDQHRQEEEQPDHDDDGASEATPGVPLEEEEEQQQQQHEDLRMMLQQDMDDLLFQFCPMASCTSSSCLLPGGGSCASVVSASASEDGSSGDHQLDGAATWGWGSLWNLDDVVDDVDGGAWDSSFSFLQDQGLAFY

SEQ ID NO: 12699 - protein, 335 aa, Zea mays
  VARIANT 182..335: note = Derived polymorphism lacks residues 182 to 335
MSTARAPRNRFLCNHNRPSFSPPTRANSERHRLRLVTRARWTAAARRPQLSSMIGSTKPLAAPLHPLCPSGRRLAPSSCAPDSSPALTRAVERPGQSQSDGAPPPPRPDVVASSLALRASPQLNRWSRSRALRSNRRPRLESALSSSSAASVTKTSRPEDAAVAVEDGEDDDVCVEKGCCLWYYAPALGFLMFAVGVNSSAKDFIEAIKRPDAIAAGYIGHFVIKPLFGFLFGTLAVAVLNLPAALGKKLNSCIFICFRSIAEYVVNSDINLSVGAGIMLVSCVSGAQLSNYATFLIDPHMAFLSIVMTSLSTATAVFVTPTLSYFLIGQKLPGG

SEQ ID NO: 12700 - protein, 110 aa, Zea mays
  VARIANT 15: note = Ancestral polymorphism is P, Derived polymorphism is H
  VARIANT 28: note = Ancestral polymorphism is E, Derived polymorphism is K
MASGSNPDSMDTEPPGVLSIAVERNPPESRLQQLGVKSWPKWGCPPGKFPVKFDARQTCYLLKGKVRAHIKGSSECVEFGAGDLVVFPKGLSCTWDVVAAVDKYYKFDSS

SEQ ID NO: 12701 - protein, 530 aa, Zea mays
  VARIANT 51: note = Ancestral polymorphism is A, Derived polymorphism is S
MRCSPQLSHRDFVAVLSRCSTRAHLEQLHAHALVAGRAAAQPTTFHLIRFAALRLSCLAYARHLFDATPHPNVFLYSAILSAYASAAAAASPSSYAHARDALALFLRMLRHGRPSPNQFVYPLVLRAACAVDVRIVRSIHSHACKSGFCGYEYDVIRTSLLDCYSRHAMMADARKLFDGLTERSVVSWTALVSGYARAGKIGDAIMLFERMTERDVAAWNAIITGCSQNRLFAEAVGIFGRMVGTGLRPNATTISCVLSACGHLGMLKIGKLIHCCAWRTCVGFGSSVLNGLIDMYGKCGNLEGATWIFYEVSDRSLTAWNSLINCLALHGHSKCAISVFNEMRGEGVEPDVITFVGLLNACTHGGFVDEGIKYFELMQHEHGIEPEIEHYGCIINLLGRAGRFQDALNVISNMRIESDEVIWGSLLNACRVHRNVELAELAIRKLLELDPNNANYVVMLANVYSEGGLWEEVRKARKFMEEENIGKKLPGCSWIEVDRKIHRFYSGDDAHSESENIYDTLEDLAASMEL

SEQ ID NO: 12702 - protein, 155 aa, Zea mays
  VARIANT 20: note = Ancestral polymorphism is V, Derived polymorphism is L
MGPFGGIMIECGTNQPIEKVLAVEDAGKHYRELGRIEDEKANRNIFEARNKHITNTVTIDLHGQHVQHAMNLLKIHMMICICIPSVLLRVITGCGSEGTGKGKIKRSVIELAEKEHIEWREENSGTVALRLGGPREYRFLEHESDSDQVGNFNID

SEQ ID NO: 12703 - protein, 227 aa, Zea mays
  VARIANT 108: note = Ancestral polymorphism is T, Derived polymorphism is I
MEQTDEASSVNEQSAERHSTAWLDLTLAVSASLPAPDDGDSSSAGGSDDGDPANNKPASPPPDPAPAPAPPKVFSCNFCMRKFFSSQALGGHQNAHKRERSAAKRSATTPSSASAYRYHHLHHAQRMAIAGLPLEAHAALVRAALRVSPASAAIHKDASQELAAATTSTAPRFHDGDVSATAAAQWAPAQLCEEPVSSTWPGSFRTRTQAEPPSPEQSQKMDLDLRL

SEQ ID NO: 12704 - protein, 54 aa, Zea mays
  VARIANT 35: note = Ancestral polymorphism is A, Derived polymorphism is T
  VARIANT 34: note = Ancestral polymorphism is E, Derived polymorphism is Q
  VARIANT 29: note = Ancestral polymorphism is D, Derived polymorphism is N
  VARIANT 22: note = Ancestral polymorphism is R, Derived polymorphism is K
  VARIANT 15: note = Ancestral polymorphism is L, Derived polymorphism is I
MRWLRNPNGGNIESIRYKQGYKVDVDIPDQTWVEASKAEIMVICGCLDIPDQTW

SEQ ID NO: 12705 - protein, 490 aa, Zea mays
  VARIANT 127: note = Ancestral polymorphism is R, Derived polymorphism is P
  VARIANT 129: note = Ancestral polymorphism is I, Derived polymorphism is T
  VARIANT 131: note = Ancestral polymorphism is P, Derived polymorphism is T
  VARIANT 213..490: note = Derived polymorphism lacks residues 213 to 490
MEHVIGGKFKLGKKIGSGSFGELYLGVNVQSGEEVAIKLESVKSRHPQLHYESKLYMLLQGGTGIPHLKWFGVDGEYNVMVIDLLGPSLEDLFNYCNRKFSLKTVLMLADQMISRVEYMHTRGFLHRDIKPDNFLMGLGRKTSQVYVIDYGLAKKYRDLQTHRHIPYRENKNLTGTARYASVNTHLGVEQSRRDDLESLGYVLMYFLRGSLPWQGLKAGTKKQKYDKISEKKMLTSIEALCKSYPSEFVTYFHYCRSLQFEDKPDYSYLKKNFRDLFIREGVKYFDSKLSCLSSYCSRGFFWILAGCQPDYVFDWTVSRQAADNNRLRLSGKTGGLVGPSVDRAERAAAKQDVPHRFTGPADALAKRTGSGSGHYGEHTKHRTLLDSLMASNMGVDSDKRRHSSSRNGSTSRKALLSSNRGSGDPSEPNRSSHLVPTTTSSSRPSTNQRLHHSTGLEGRTPSFPKPGRIGYDDPTMRSFERLTISAERRK

SEQ ID NO: 12706 - protein, 961 aa, Zea mays
  VARIANT 488: note = Ancestral polymorphism is E, Derived polymorphism is K
MEAARFGTQSSHLYGGGLDLNRREKRVFGWDLNDWSWDSQRFVATPVQQQAANGSGLNSSPSSSEEAVEEVARNGGFRGDTDKRKRVIDDDETEDQCTVLHGGRSLSLKIGGAAGGVGAMENSDVNEDNERNGKKVRVQGGSSSGPACQVEDCGADLAAEKDYHRRHKVCEKHAKASTAVVGNTVQRFCQQCSRFHLLHEFDEGRRSCRRRLAGHNRRRRKTRPDTAIGGTASIEDKVSNYLLLSLIGICANMNSDNAQNANGQELLSTLLKNLGSVAKSLEPKELCKFLEAYQSLQNGLNAGTSGIANGAEEAAGPSNSKLPSVNDSHYGQASSSVVPVQSKATTVVTPEPASCKLKDFDLNDTCIDMEGFEDGQEGSPTPAFKTADSPNCASWMQQDSTQSPPQTSGNSDSTSTQSLSSSNGDTQCRTDKIVFKLFDKVPSDLPPVLRSQILGWLSSSPSDIESHISPGCIILTVYVRLVESAWQELSENMSLLLGKLLNSSTDDFWASGLVFVMVRHHLAFMLNGQIMLDRPLAPSSHHYCKILCVRPVAAPYSATINFRVEGFNLLSTSSRLICSFEGHCIFHEDTDSGAENVEYKDRDIECLSFCCSVPGPRGRGFIEVEDSGFSNGFFPFIIAEKDVCAEVSELESIFESSSNEHANARDQALEFLNELGWLLHRANRMSKEDETDTSLAPFNMWRFRNLGVFAMEREWCAVIKMLLDFLFIGLVDVGSRSAEEMVLSENLLHAAVRRKSVNMVRFLLRYKPNKNSKGTAQAYLFRPDALGPSKITPLHIAAATSDAEDVLDALTHDPGLIGISAWSNARDETGFTPEDYARQRGNGAYLNLVQKKIDKHLGEGHVVLGVPSSICPVITDGVKPGDVSLEICRAMSASVPGCLLCSRQARMHPSSTARTFLYRPAMLTVMGVAVVCVCVGILLHTFPRVYAAPTFRWELLERGPM

SEQ ID NO: 12707 - protein, 244 aa, Zea mays
  VARIANT 39: note = Ancestral polymorphism is A, Derived polymorphism is S
MGRAPCCEKMGLKRGPWTPEEDRILVAHIERHGHSNWRALPKQAGLPRCGKSCRLRWINYLRPDIKRGNFTREEEDAVIQLHQMLGNRWSAIAARLPGRTDNEIKNVWHTHLKKRLEPKTATQAPKRKPKKQQQPEAVTLAAPVSPEQSVSTSTTSTTTDYSAASSSLENADSFTSEEEDYQIDDSFWSETLAMAVDSSDSGMEEAEGAFGASPPAPSTNDDVDFWLKLFMQASDMQNSPQIYA

SEQ ID NO: 12708 - protein, 278 aa, Zea mays
  VARIANT 223..278: note = Derived polymorphism lacks residues 223 to 278
  VARIANT 222: note = Ancestral polymorphism is T, Derived polymorphism is A
  VARIANT 179: note = Ancestral polymorphism is R, Derived polymorphism is C
  VARIANT 168..278: note = Derived polymorphism lacks residues 168 to 278
  VARIANT 158..278: note = Derived polymorphism lacks residues 158 to 278
  VARIANT 137: note = Ancestral polymorphism is P, Derived polymorphism is S
  VARIANT 135: note = Ancestral polymorphism is C, Derived polymorphism is Y
  VARIANT 132: note = Ancestral polymorphism is I, Derived polymorphism is T
  VARIANT 119: note = Ancestral polymorphism is Y, Derived polymorphism is N
  VARIANT 109: note = Ancestral polymorphism is P, Derived polymorphism is S
  VARIANT 97: note = Ancestral polymorphism is A, Derived polymorphism is V
  VARIANT 91: note = Ancestral polymorphism is R, Derived polymorphism is C
  VARIANT 88: note = Ancestral polymorphism is A, Derived polymorphism is T
  VARIANT 85: note = Ancestral polymorphism is R, Derived polymorphism is H
  VARIANT 83: note = Ancestral polymorphism is R, Derived polymorphism is L
  VARIANT 65: note = Ancestral polymorphism is A, Derived polymorphism is T
  VARIANT 58: note = Ancestral polymorphism is D, Derived polymorphism is N
  VARIANT 40: note = Ancestral polymorphism is S, Derived polymorphism is N
  VARIANT 34: note = Ancestral polymorphism is G, Derived polymorphism is S
  VARIANT 29: note = Ancestral polymorphism is P, Derived polymorphism is S
  VARIANT 21: note = Ancestral polymorphism is Q, Derived polymorphism is E
  VARIANT 11: note = Ancestral polymorphism is A, Derived polymorphism is T
  VARIANT 2: note = Ancestral polymorphism is A, Derived polymorphism is V
MAVVCQVWLVAVARATALKFQLPSLLLLSADVTGVYCYLSGCRKHNMLPRPRYFGSYNGGWFFLAYGQTCGHQLLNPDIHASRRRLFAFWRPGDKVVVCDILPAAPVGPGWEQEDVVYYQDSFHFLTQGGHILMCGPIYGSYGDGGLLVVLSALSCFQEGGCSCSDEQFVRACYLVVSRGELLMVVRLAAHHHALMSSFKVFRMIIIEPDDNGEDADEYTRTWIELGELCGRMLFVGNMLLLKNVISLNPDAEEVSQQRLLSLVAERLVPTFLDSLDI

SEQ ID NO: 12709 - protein, 260 aa, Zea mays
  VARIANT 183..260: note = Derived polymorphism lacks residues 183 to 260
  VARIANT 80: note = Ancestral polymorphism is G, Derived polymorphism is V
  VARIANT 64: note = Ancestral polymorphism is A, Derived polymorphism is V
  VARIANT 63: note = Ancestral polymorphism is R, Derived polymorphism is H
  VARIANT 61: note = Ancestral polymorphism is V, Derived polymorphism is M
  VARIANT 58..260: note = Derived polymorphism lacks residues 58 to 260
  VARIANT 43: note = Ancestral polymorphism is E, Derived polymorphism is K
  VARIANT 28: note = Ancestral polymorphism is F, Derived polymorphism is S
  VARIANT 27: note = Ancestral polymorphism is R, Derived polymorphism is W
  VARIANT 1: note = Ancestral polymorphism is T, Derived polymorphism is M
MLSFFGAGRGAHRSQHPAPDKPLEENWFIRRSEAAKQATAEAERPSAPSAQQPKLSPQEAVKRAVELLGGGGRSGEDGRGHGGGGHSSRGRGSGRGRWRRRPECGTAGLLMWKMTGKRSTWGTADGDWLEQRLGEDKVKILEHAFMEAADNALPHPMEDAYLEACHANNMEWKMCIYAADCSEISLVQVRGSGMLKDSACHELDKIRSLKRPYIKRVQDRHKEVQVFEESDLMKSLSKSTCVREVMSTCADQSYLGILLY

SEQ ID NO: 12710 - protein, 703 aa, Zea mays
  VARIANT 96..703: note = Derived polymorphism lacks residues 96 to 703
MAGNGAIVESDPLNWGAAAAELAGSHLDEVKRMVAQARQPVVKIEGSTLRVGQVAAVASAKDASGVAVELDEEARPRVKASSEWILDCIAHGGDIYGVTTGFGGTSHRRTKDGPALQVELLRHLNAGIFGTGSDGHTLPSEVTRAAMLVRINTLLQGYSGIRFEILEAITKLLNTGVSPCLPLRGTITASGDLVPLSYIAGLITGRPNAQAVTVDGRKVDAAEAFKIAGIEGGFFKLNPKEGLAIVNGTSVGSALAATVMYDANVLAVLSEVLSAVFCEVMNGKPEYTDHLTHKLKHHPGSIEAAAIMEHILDGSSFMKQAKKLNELDPLLKPKQDRYALRTSPQWLGPQIEVIRAATKSIEREVNSVNDNPVIDVHRGKALHGGNFQGTPIGVSMDNARLAIANIGKLMFAQFSELVNEFYNNGLTSNLAGSRNPSLDYGFKGTEIAMASYCSELQYLGNPITNHVQSAEQHNQDVNSLGLVSARKTAEAIDILKLMSSTYIVALCQAVDLRHLEENIKASVKNTVTQVAKKVLTMNPSGELSSARFSEKELISAIDREAVFTYAEDAASGSLPLMQKLRAVLVDHALSSGDAEREPSVFSKITRFEEELRAVLPQEVEAARVAVAEGTAPVANRIADSRSFPLYRFVREELGCVFLTGERLKSPGEECNKVFVGISQGKLVDPMLECLKEWDGKPLPINVK

SEQ ID NO: 12711 - protein, 704 aa, Zea mays
  VARIANT 414..704: note = Derived polymorphism lacks residues 414 to 704
  VARIANT 256: note = Ancestral polymorphism is L, Derived polymorphism is H
  VARIANT 232..704: note = Derived polymorphism lacks residues 232 to 704
  VARIANT 157..704: note = Derived polymorphism lacks residues 157 to 704
  VARIANT 118..704: note = Derived polymorphism lacks residues 118 to 704
  VARIANT 35: note = Ancestral polymorphism is R, Derived polymorphism is P
MACDSPCMATPRADPLNWGKAAEELMGSHLDEVKRMVAEYRQPLVKIEGASLSIAQVAAVATGVGEARVELDESARSRVKASSDWVMSSMMNGTDSYGVTTGFGATSHRRTKEGGALQRELIRFLNAGAFGTGTDGHVLPAEATRAAMLVRINTLLQGYSGIRFEILEAIVKLLNANVTPCLPLRGTVTASGDLVPLSYIAGLVTGRENSVAVAPDGSKVNAAEAFKIAGIQGGFFELQPKEGLAMVNGTAVGSGLASTVLFEANILAILAEVLSAVFCEVMNGKPEYTDHLTHKLKHHPGQIEAAAIMEHILEGSSYMKLAKKLGELDPLMKPKQDRYALRTSPQWLGPQIEVIRAATKSIEREINSVNDNPLIDVARSKALHGGNFQGTPIGVSMDNTRLAIAAIGKLMFAQFSELVNDYYNNGLPSNLSGGRNPSLDYGFKGAEIAMASYCSELQFLGNSVTNHVQSAEQHNQDVNSLGLISSRKTAEAIEILKIMSSTFLIALCQAVDLRHIEENVKSAVKSCVMTVAKKTLSTDSTGGLHVARFCEKDLLQEIEREAVFAYADDPCSANYPLMKKLRNVLVERALANGAAEFNAETSVFAKVAQFEEDLRAALPKAVEAARAAVENGTAAIPNRITDCRSYPLYRFVREELGAVYLTGEKTRSPGEELNKVLVAINQGKHIDPLLECLKEWNGEPLPIC

SEQ ID NO: 12712 - protein, 715 aa, Zea mays
  VARIANT 46: note = Ancestral polymorphism is R, Derived polymorphism is P
  VARIANT 96..715: note = Derived polymorphism lacks residues 96 to 715
  VARIANT 243..715: note = Derived polymorphism lacks residues 243 to 715
  VARIANT 505..715: note = Derived polymorphism lacks residues 505 to 715
MECENGRGVAATNSDSLCMATPRADPLNWGKAAEELMGSHLDEVKRMVAEYRQPLVKIEGASLSIAQVAAVATGAGEARVELDESARSRVKASSDWVMTSMMNGTDSYGVTTGFGATSHRRTKEGGALQRELIRFLNAGAFGTGADGHVLPAETTRAAMLVRINTLLQGYSGIRFEILEAIVKLLNANVTPCLPLRGTVTASGDLVPLSYIAGLVTGRENSVAVAPDGSKVNAAEAFKIAGIQGGFFELQPKEGLAMVNGTAVGSGLASTVLFEANILAILAEVLSAVFCEVMNGKPEYTDHLTHKLKHHPGQIEAAAIMEHILEGSSYMKLAKKLGELDPLMKPKQDRYALRTSPQWLGPQIEVIRAATKSIEREINSVNDNPLIDVARSKALHGGNFQGTPIGVSMDNTRLAIAAIGKLMFAQFSELVNDYYNNGLPSNLSGGRNPSLDYGFKGAEIAMASYCSELQFLGNPVTNHVQSAEQHNQDVNSLGLISSRKTAEAIEILKLMSSTFLIALCQAVDLRHIEENVKSAVKSCVMTVAKKTLSTNSTGGLHVARFCEKDLLQEIEREAVFAYADDPCSANYPLMKKLRNVLVERALANGAAEFNAETSVFAKVAQFEEDLRAALPKAVEAARAAVENGTAGIPNRIAECRSYPLYRFVREELGAVYLTGEKTRSPGEELNKVLVAINQGKHIDPLLECLKEWNGEPLPIC

SEQ ID NO: 12713 - protein, 110 aa, Zea mays
  VARIANT 23: note = Ancestral polymorphism is K, Derived polymorphism is N
  VARIANT 33: note = Ancestral polymorphism is D, Derived polymorphism is G
  VARIANT 46: note = Ancestral polymorphism is P, Derived polymorphism is H
MSLEDSFKERVAMWRREHDIIYNQLPVLLEKMDILFPAENMENSEPENKSETKNLVAPLPAVTPEEIGERYKDLEESIRGFIKDLDEAEKEEEEDGGTSEAASPSSVDDE

SEQ ID NO: 12714 - protein, 87 aa, Zea mays
  VARIANT 31: note = Ancestral polymorphism is R, Derived polymorphism is G
MSLEDSLKKRVAKCRREYDIIYKQNKSEAKGEPVDPLRAMTPAEIGERYKDLADTVKGFLKDLDEAEKEIVAGTSQAATPPASVEDQ

SEQ ID NO: 12715 - protein, 463 aa, Zea mays
  VARIANT 62: note = Ancestral polymorphism is D, Derived polymorphism is E
  VARIANT 179: note = Ancestral polymorphism is G, Derived polymorphism is D
  VARIANT 193: note = Ancestral polymorphism is P, Derived polymorphism is L
  VARIANT 210: note = Ancestral polymorphism is L, Derived polymorphism is P
  VARIANT 214: note = Ancestral polymorphism is G, Derived polymorphism is E
  VARIANT 223: note = Ancestral polymorphism is G, Derived polymorphism is D
  VARIANT 265: note = Ancestral polymorphism is R, Derived polymorphism is W
  VARIANT 304: note = Ancestral polymorphism is T, Derived polymorphism is M
  VARIANT 332: note = Ancestral polymorphism is G, Derived polymorphism is R
MERRHGFFAALREEVARGLSPARARRKPDATDLAAALSFTGVAGAGEMLAPLMEGPDPEPSDDGDGSGRRGAARGRKEGWGHWVRVQFARAPSSAVALRSDIRMLLGVMAAPLAPVRVCAAEPLPHLSVKDTPIETSSAQYILQQYLAASGGHKLLASLRSTYAMGKVRMVATEFETAGRLTKNRSAGRGGEPGRFVLWQMAPEMWYIELAVRGSKVHAGCNGKLVWRHTPWLGAHSAKGPVRPLRRALQGLDPLTAASMFARARCIGERKVNGEDCFILKLSTDPEILKARSEGHAEIIRHVTFGYFSQRTGLLVHIEDSHLTRIQSAAGGDAVYWETTISSSMEDYRPVDGIVVAHSGRSAVTLFRFGEVAMSHTKTRMEEVWSIEEVAFNVPGLSMDCFIPPTDIKSGSVGEAMELAHGERSRAGPPPPPPGCRAKVAALGKAEEGKVAWGGGTVLENQN

SEQ ID NO: 12716 - protein, 288 aa, Zea mays
  VARIANT 41: note = Ancestral polymorphism is R, Derived polymorphism is S
MAKDIEASGPEAGEFSAKDYTDPPPAPLIDAEELTQWSLYRAVIAEFIATLLFLYITVATVIGYKHQTDASASGPDAACGGVGILGIAWAFGGMIFILVYCTAGISGGHINPAVTFGLFLARKVSLVRALLYIIAQCLGAICGVGLVKGFQSAYYVRYGGGANELSDGYSKGTGLAAEIIGTFVLVYTVFSATDPKRSARDSHVPVLAPLPIGFAVFMVHLATIPITGTGINPARSLGAAVIYNKDKAWDDQWIFWVGPLIGAAIAAAYHQYVLRASATKLGSYRSNA

SEQ ID NO: 12717 - protein, 422 aa, Zea mays
  VARIANT 334..422: note = Derived polymorphism lacks residues 334 to 422
  VARIANT 291..422: note = Derived polymorphism lacks residues 291 to 422
  VARIANT 167..422: note = Derived polymorphism lacks residues 167 to 422
  VARIANT 153: note = Ancestral polymorphism is P, Derived polymorphism is S
  VARIANT 118: note = Ancestral polymorphism is G, Derived polymorphism is S
  VARIANT 45..422: note = Derived polymorphism lacks residues 45 to 422
MATFSKASRLCGAVTMQPKQLWSLLLSRILPKLLGLPGILLKKFRKEGSVCSSWHATYKCLLDLRQYKQPQTPCLFYTCESTGSNVGFLYSLKENRSYKLTLSEPPIRSRLLVGSSNGWLITADERSELHLVNPITGEQVALPSVITIEHVKPIFDASGTIHMYELSYETPPDLFDLGDLRDELYFKAFVFPDPSTTGSYIVVLIHEPHSQLSFARPGDDKWAWVGQGREYKDCTYVDGLLYTVNYFGKIDAFDFTASPVKMTIIMDELKYPVCENMYIIQAPWGDLLHVWRTIDVPPNAPSWVPGKCLSETLKIQVYKMDLEAKQRVEINRLQCDSVLFLGHNDSLCLSAQVHPGLKSNHAYFTDDFKELTVLLKNCMRDMGVMDLENSVKKEIVSQIWSNWPCPTWITPNLMKLNQAFNI

SEQ ID NO: 12718 - protein, 213 aa, Zea mays
  VARIANT 127..213: note = Derived polymorphism lacks residues 127 to 213
MPPEAASSTGHIVARIRRPLPAERPHVRRCTRLLCSAFLTVLLVAGVVLFVVYLAVRPHRPRFHVTAFSASGIGPSSGGTVSLSGQLSIRNPNRDIAFFYDRFYLSVEYRGADVVKGQALTAAPLYQPPKTTSALAFQGVAASAASGDMARDAVEAGGRVELTVKVRSRIRARLAFWGNRHWHPLHVGCEVAVGPDGQLLAEYMQKRCSIDFF

SEQ ID NO: 12719 - protein, 377 aa, Zea mays
  VARIANT 48..377: note = Derived polymorphism lacks residues 48 to 377
MAASPAEAGAQALPEATEAKEKGKRGGVLRRVWRALFGGREDFEKRLQYLSKEEAAVHARMRRRTQFSRRTVRNLIVLSVLAEVLAVVYAIMMTRNEDLTWQMRAIRVLPMFVLPVVSSVIYSTVVNFTRMLERKDQKTLEKLRAERKAKIDELKERTNYYLTQQLIQKYDLDPAAKAAAASVLASKLGEDTGLKVHVGEEPKLDAAVARSNDVEIVPSDGLRNRKQPNARGSRTGSPTADTPARGTESSLTAGADLETAPAPLVVEHHQGLGASDGGGWIAKIAALLVAEDPSQSYALICGNCHMHNGLARKEDYPHVTYYCPHCHALNTSKQSMWQYSGSNSGRSSPVVLDDGLSTSSSVQETELSNLTHTAGAT

SEQ ID NO: 12720 - protein, 61 aa, Zea mays
  VARIANT 9: note = Ancestral polymorphism is R, Derived polymorphism is Q
  VARIANT 33: note = Ancestral polymorphism is W, Derived polymorphism is R
  VARIANT 37: note = Ancestral polymorphism is R, Derived polymorphism is M
MELRGCVCRIKSSALELLSMEEDLTTDLDDDLWDLVMRDLQLKASFLYIDLYRLIACKCNE

SEQ ID NO: 12721 - protein, 388 aa, Zea mays
  VARIANT 55: note = Ancestral polymorphism is N, Derived polymorphism is I
  VARIANT 49: note = Ancestral polymorphism is G, Derived polymorphism is V
MQMSTGSNHYGVFPHPFCNQHVVSFQTSSITSGSGAIPVCLDTSSGMNGDMAMLNTTSSTIVSTGSPNMVADSSCQNLKYSAPLAVEWSYPELQLLNDGLNKYANEPGIMKYIKIAATLPDKTVRDVAMRCQWMAARKEATRRRKPEERYLGKKIKDRKDKMAQPSSWGTNPPVQAEMRSSSFMPRNAKHNGFLSGDSQIDHEMLNILEENARLLNQIEVNILTSQAHNNINLFHHIRRNINGLLQSMCQIPGIMSKMPPLPVSVDERLASYILPRAHTVNFLCYSIFTFIIGFVFCFVLPLLNKYSFSFDEYIAALVSPGSTEMLTLDMPLLSFEGTSSWQQSFERRTKSVVAFLIKDNIQRFNFNDETGSDTSDRAISYLSRILEP

SEQ ID NO: 12722 - protein, 315 aa, Zea mays
  VARIANT 13: note = Ancestral polymorphism is S, Derived polymorphism is F
  VARIANT 16..315: note = Derived polymorphism lacks residues 16 to 315
  VARIANT 34: note = Ancestral polymorphism is K, Derived polymorphism is N
  VARIANT 35: note = Ancestral polymorphism is P, Derived polymorphism is L
  VARIANT 55..315: note = Derived polymorphism lacks residues 55 to 315
  VARIANT 75..315: note = Derived polymorphism lacks residues 75 to 315
  VARIANT 93: note = Ancestral polymorphism is P, Derived polymorphism is L
  VARIANT 165: note = Ancestral polymorphism is T, Derived polymorphism is A
  VARIANT 250..315: note = Derived polymorphism lacks residues 250 to 315
  VARIANT 271: note = Ancestral polymorphism is S, Derived polymorphism is Y
MDEGILEMCLQHSRARLPPDKQLAAEKSFALYCKPVELYNIIQRRAIKNHSPIYRINRACLLTNFSEFGNKDKTEATFIISVDLASYLHRLQPRLLKLLRSNAFKAKPALITLIGACAAMGANAEVTASITCLRDAIASDDWAARKAAAEALAALALEHTDLLTTYKSSCVTFFEARRFDKVKVVQESMNQMIEAGKEIPGAEEDECSSLCHQRPSHNEDLLLQLGKCYTYFFFIYKLSCNYSGSASDGRYPAASLGSNSVPLATRKSILSVSRSSLSDVSTSVIFWTFSRLSGEAEVVLRKRLVEQLLISLINS

SEQ ID NO: 12723 - protein, 1791 aa, Zea mays
  VARIANT 1546..1791: note = Derived polymorphism lacks residues 1546 to 1791
  VARIANT 1102..1791: note = Derived polymorphism lacks residues 1102 to 1791
  VARIANT 1096..1791: note = Derived polymorphism lacks residues 1096 to 1791
  VARIANT 940..1791: note = Derived polymorphism lacks residues 940 to 1791
  VARIANT 448..1791: note = Derived polymorphism lacks residues 448 to 1791
  VARIANT 409..1791: note = Derived polymorphism lacks residues 409 to 1791
  VARIANT 387..1791: note = Derived polymorphism lacks residues 387 to 1791
MDELVSVALEEVCARLAPGIPVVDLWPALRGTLDATGLPLGPAVKRALWARILALRVVNLVEGDGDGVPISAGDPAEKDFEEAERRGMRLVASAGIRDNFLGLYERRFAKSELSAVQKATLECVAASRTSGVPQSELCKKFRMKGNNFHFIAKSLESQRLIVRQSTIIKMKDHGAEREDASQNKHIINTNSLYLSRYAKDLNMTSQQRIEITKPELLGSNEEANVDAFRVDGAFDVNSKNDISIHDYLPAMKAICDKLEEASGKALVVSDIKVDLDYRMAYGHRAWRNVLHRLIDARLVEIFDAEDDDKVVRCLRLLKNFDPNEFQPKSIASNFKFVKKGQATDQILELPLENCIYDMISSQGTKGITLVEIGKHLGLNNSKKLHKRVSSMLKKFNLTWEAEVPDKTSQYRIWTSKNFSLYKAGTALQNFEALSEDCDDCSDLWSLVSSKDLESPSSQGKLLLLEEENHDKPIGHHIQNNRDASAAVSQLVEEDKLPSNQRRRRCRPLSSDDQRHRRILHMLKKKKFVLKVELHKWLERLEKKDGKIMDRKTLTRTLNKLQQEGSCKCIKVSAPLVTNYARSRLFDVILHSSVGDVSPELVEQFRTRQRNFDTESRAGAAAKVKQNQHMTAIPGLRISRRVKVYKPLLLEAMYANGFIGAKMIRAKLFHKFLWAYVNSLPNWCNAFGCTKAGHYDKSLNQSCLLFSMEAAMKEMPLELFLQIVGSAKKIDNMITLCRLGKTLSEIPTEEYNQILDTHANGRLSRLVNILDKLKLVQLAKEFLEDAGVSSNAMYTHSMELRPYIEEPMPRILPSSQLNNHRKIRHDFVLSKKEFVDSYWETLECCYLTAGLADPLSAFPGSSVPEVSHRRSWCSLRVMTTEQRLELQQRIMDVGEKGKIPFKDCVRIARELNLSVEQVLRLSYERQSRLHEQPSFTSKQKQQRVGSGLTPVRRKRRADGTSLKLLKRTVQASGSAEQILEQPIVDEEVPMISRYAILRKSCMRSKRFFWTCESDRKLLMAYIRVRAVLGARYYRVPWKSLSDLPAPPHTCLRRMAVLLKTNGKIRGAVMCLCNLLGERYVRYLEKERSLKRRRLFPQISNRSQENSLDSDCEQFNWDDFEVPEIKSALNEVLELIQTEKIDQAKRIGPVNQKNINNDNDVTKDTICSQELPNNQAILGETKTSAVSESGFCDPEKSCRHSNAESENMEVFCKPQEKIIKDHRNKIIERGIWKSLAVANALELLKLVFLNTSLGSNVQASLAATLQLYSESEIFTAVSFLKEKKFLVTGSGGKPYTLSSQFLTNACCSPFPFGSGKKASIFSNWLIAQQKNTTDSGVYLYPDIQCGEIVHLFSLVLSGNLLISPFLPSEGVGEADEPNSSGPLVVDTSGLADNSHKRKADTVKLKSSKAKKPKPLPKIESDFCYRREKGFPAIQIGLNLHRIQTSNFLQEFHGKESSIFTSSWAMSKKNVDLHAERHIMPLFSNCLSSYRHLLSESQLENSYSGWPWDAMTNYAEELSPVSEHQNELFTLSPELFRNAFRVIHQAAMQLVLIIVDTLKRFQLAVKVNAYDGVQIVDSLHSSKYHIATLAECDSCCCTDPPTSQFVDNENTKNLLKEKHTKPINFPGPIKMLGDGHTVTVINVQSKLSPPYMHSKDPGDAERLSTPGENNKESSFYHNCERHCYQPILPWINGDGSTNSTLYEGLSRRVIGYVMHYPGLSEEDVIRRMDVLNPQTCRTLLEKLTLDGNLHVRVFEEPVPMAPTTLQGMFKQHSSKEPSKCVKRYFANPMSTLQL

SEQ ID NO: 12724 - protein, 364 aa, Zea mays
  VARIANT 33: note = Ancestral polymorphism is D, Derived polymorphism is G
  VARIANT 42: note = Ancestral polymorphism is F, Derived polymorphism is L
  VARIANT 81: note = Ancestral polymorphism is P, Derived polymorphism is H
  VARIANT 318: note = Ancestral polymorphism is Y, Derived polymorphism is S
MAGTVTVPGSSKPSTPLLKDELDIVIPTIRNLDFLEMWRPFFQPYHLIIVQDGDPTKTIKVPEGFDYELYNRNDINRILGPKASCISFKDSACRCFGYMVSKKKYIYTIDDDCFVAKDPSGKDINALEQHIKNLLSPSTPFFFNTLYDPYREGADFVRGYPFSLREGAHTAVSHGLWLNIPDYDAPTQLVKPKERNERYVDAVMTIPKGTLFPMCGMNLAFDRDLIGPAMYFGLMGDGQPIGRYDDMWAGWCVKVICDHLSLGVKTGLPYIWHSKASNPFVNLKKEYKGIFWQEDIIPFFQNVTIPKDCDTVQKCYIYLSGQVKEKLGKIDPYFAKLGDAMVTWIEAWDELNPAGPAAGKDKAK

SEQ ID NO: 12725 - protein, 348 aa, Zea mays
  VARIANT 10..348: note = Derived polymorphism lacks residues 10 to 348
  VARIANT 40: note = Ancestral polymorphism is S, Derived polymorphism is L
  VARIANT 143..348: note = Derived polymorphism lacks residues 143 to 348
  VARIANT 148..348: note = Derived polymorphism lacks residues 148 to 348
  VARIANT 182: note = Ancestral polymorphism is V, Derived polymorphism is A
  VARIANT 220: note = Ancestral polymorphism is L, Derived polymorphism is P
  VARIANT 223: note = Ancestral polymorphism is S, Derived polymorphism is N
  VARIANT 264..348: note = Derived polymorphism lacks residues 264 to 348
  VARIANT 284: note = Ancestral polymorphism is I, Derived polymorphism is N
  VARIANT 327..348: note = Derived polymorphism lacks residues 327 to 348
MAPPSSPLWRSASSSSRTRAYARFSASSSSGSSDTRVYTSSVVCNSFRLVAEKSPVLLSFDNIENSHQRHTPRYKFDWDGQPPVSNTEIPSVIDHRRIVSSSNGYNSTADWTSSSGREDSNSRLPDRTSGQIPASSQSVVTSQRPASQEGRSGSKSYSEDELREKSVLTIREYYSAKDEKEVVLCIEELNAPNFYPFLVSLWVNDSFERKDMERELLAKLLVSLCSGRHNLLSKQQLSDGLSNVLASLEDNLSDAPRATEYLGRLLARFMEESILLLQEVGKLIQESGEEPGYLIQGGIAADILGAVLDSIKSDKGNSFLDEIKTTSSLKLVDFRPQHLKRSKLDAFM

SEQ ID NO: 12726 - protein, 283 aa, Zea mays
  VARIANT 237: note = Ancestral polymorphism is G, Derived polymorphism is V
  VARIANT 242: note = Ancestral polymorphism is H, Derived polymorphism is Y
  VARIANT 250: note = Ancestral polymorphism is L, Derived polymorphism is P
  VARIANT 253: note = Ancestral polymorphism is H, Derived polymorphism is R
  VARIANT 271..283: note = Derived polymorphism lacks residues 271 to 283
MEAEGQGFTNGHATWTSAMSSFMLSYLTNVVSSGERTSSGFKKVHYNSCAKAINEKFQTALNGEQIKNHLKTWSRRFAKINRIRKVSGTGWDEDSFTITLDEEHYNGYVKDHKNDADCLNKPLEHFAEMQTIFGNTMATGKFAKDSSAALGEDDEVQNEEVMAHAFTKRMSSCDDNATTSSTSKTRKKAKKRDSEEEGLIAAFRSVGDTLSNAIEKVATGDTDVPDDLFDSLINLPGFEQNHISLYFNYLVAHPHIARAFNKLPFDHKLIWARNFISEKFPGV

SEQ ID NO: 12727 - protein, 88 aa, Zea mays
  VARIANT 10..88: note = Derived polymorphism lacks residues 10 to 88
  VARIANT 13..88: note = Derived polymorphism lacks residues 13 to 88
  VARIANT 16: note = Ancestral polymorphism is R, Derived polymorphism is H
  VARIANT 22: note = Ancestral polymorphism is R, Derived polymorphism is H
  VARIANT 29: note = Ancestral polymorphism is C, Derived polymorphism is Y
  VARIANT 40: note = Ancestral polymorphism is R, Derived polymorphism is C
  VARIANT 44: note = Ancestral polymorphism is A, Derived polymorphism is T
  VARIANT 47: note = Ancestral polymorphism is A, Derived polymorphism is E
  VARIANT 53: note = Ancestral polymorphism is G, Derived polymorphism is C
  VARIANT 59: note = Ancestral polymorphism is A, Derived polymorphism is P
  VARIANT 61: note = Ancestral polymorphism is G, Derived polymorphism is D
  VARIANT 72: note = Ancestral polymorphism is R, Derived polymorphism is C
MVLLYLDQPEICQVAHLNSAFRGTASAGCVWAAKLPANYRYLAALVATADDEGCGDRDPNGKRLTKKEIYARLCRSTLFYAAERNSGF

SEQ ID NO: 12728 - protein, 471 aa, Zea mays
  VARIANT 44: note = Ancestral polymorphism is D, Derived polymorphism is Y
MAALATLLRHSRRSHAHVLPISRALSTTTPTTGGTDPVAITLSDAKRQLLRERDPDRVVSILDAIDTASISAASTRHALSLAARRLSRSRRFADAEALLSSHLTASTTEAHLAAVLCSYASANLPEKAIDAFRSAAPSLPTPNSPLPFNALLSTFIRCRRYRRVPVLFAELSKEFSITPNATSYGILVKAYCMARDDAKAKQALDLMREQGISPTNRIYTTLIDSMYKRKMTNEAESLWKEMVESECEPDVATYNVKAMYYALHGKPEEVMEVMTEMEAAGVKPDTTTYNFLMTSYCKSGKLEDAKVLYHSLAEKGCSADAATYKHMLAELCAYGDFDAGLGIFKDSLKRRKVPDFRTMKGLVEGLAKGGRVADAKEVVAEVKKMFPENLLSGWKKVEKELGLDSDSGETPLLEVTSGETVAEVRPDAAEVEALELEGSAAEEVTVSEESSDDEAYVPEASSSEEVPQGRA

SEQ ID NO: 12729 - protein, 182 aa, Zea mays
  VARIANT 132..182: note = Derived polymorphism lacks residues 132 to 182
  VARIANT 40: note = Ancestral polymorphism is A, Derived polymorphism is V
  VARIANT 33: note = Ancestral polymorphism is T, Derived polymorphism is I
MKHPHYQVSKKSSGFTSNMLIVCTNWHVVLSPTTGTLSMAAIMNKSTHLDILPLPRDNSADSGQEDGGSREFEFKPHLNSQSSLWSKILYGTKMMTNDNGSTYRSPNLRRSLTTESERYGRYDPSEIQRESRASSDASKNAPSGPWGPTSSSTPTDDTSSSQPGIKTREERLLETIVTASGV

SEQ ID NO: 12730 - protein, 721 aa, Zea mays
  VARIANT 150..721: note = Derived polymorphism lacks residues 150 to 721
MAPHTTGVGGGSGAEEEVSEAAAASPALRHRHAGKGEAEAEGLDGNGDAGADGQASLERVFADKAVPSWREQLTLRAFVVSALLAVMFNVIVMKLNLTTGIVPSLNVSAGLLGFFFVRMWTAAVERMGFLCHPFTRQENTIIQTCVVSAYGIAFSGGFGSYLFGMSDKIAKQATEAKDANNIKDPHLGWMIGFLFLVSFIGLFALVPLRKIMIVDYKLTYPSGTATAYLINGFHTPEGAKLAKKQVKTLGKYFMFSFFWGFFQWFYTAGDECGFKNFPTLGLEAYNNRFFFDFSPTYVGVGMICPYIVNVSVLLGGILSWGVMWPLIAKKKGSWYLASVDDSSLHGLQAYMVFISIALILGDGLYNFIKVLIRTIAGFISMVQQNSKGMLPVSDNGSSMSATEALSFDDERRTEIFLRDQVPKSVAYGGYVVVAAISIGTLPQIFPQLKWYYILVAYVVAPVLAFCNAYGSGLTDWSLASTYGKLAIFVFGAWAGLSHGGVLVGLAACGVMMSIVSTASDLMQDFKTGYLTLASPRSMFVSQVIGTGMGCVIGPCVFWLFYKAFGDIGESGTEYPAPYAIVYRNMAILGVDGFGSLPENCLTLCYIFFAAAIAINLARDLTPHRVSRFIPLPMAMAIPFYIGSYFAIDMFLGSMILFVWERLNKAKADAFGPAVASGLICGDGIWTLPQSILALAKVQPPICMKFLSRSTNAKVDSFLGLS

SEQ ID NO: 12731 - protein, 307 aa, Zea mays
  VARIANT 116: note = Ancestral polymorphism is S, Derived polymorphism is F
  VARIANT 94..307: note = Derived polymorphism lacks residues 94 to 307
  VARIANT 61: note = Ancestral polymorphism is C, Derived polymorphism is Y
MYGGGGGGGHYDGGSGGAGNANALFGGGGFMPSQSTVVPENSGLSKVLPNSPLFCFLSSICSPSYADPSWALPIDRCGGQGRSAQTLLPLTVKQTMDAAQTSGDRSNFAINGVEVSTIRLVGRMLGKVERVTDVVFTLDDGTGKIDVNRWENEASDAKEMADANNENYVIVIGGLKGFQGKRHVVAYAVRRVTNFNEITCHFLHCIQVHMELTGLKQIYSSAATYGGVAHAPSQPNPVDGNYISNLVLSVFHDPSVMDQEHGLHIKDVIDRLKLPDDVVSAAIQGHVDVGNIYNTIDDFHYKSVRNG

SEQ ID NO: 12732 - protein, 134 aa, Zea mays
  VARIANT 121: note = Ancestral polymorphism is S, Derived polymorphism is L
  VARIANT 105: note = Ancestral polymorphism is T, Derived polymorphism is P
  VARIANT 102: note = Ancestral polymorphism is M, Derived polymorphism is I
  VARIANT 92: note = Ancestral polymorphism is T, Derived polymorphism is I
  VARIANT 88: note = Ancestral polymorphism is V, Derived polymorphism is F
  VARIANT 37: note = Ancestral polymorphism is S, Derived polymorphism is I
  VARIANT 12: note = Ancestral polymorphism is T, Derived polymorphism is I
  VARIANT 7: note = Ancestral polymorphism is N, Derived polymorphism is I
MQFNVKIIYIGICRDQERSLGLAWFTLHSRCFHRVFSHCSSSACELAPIFNELVDRVSFHGELLQAALSRQVLNSIHWILLVPITMQVDEFTTMLLEIHDKMMLTNKNEVSKLFLISLCVSVLTFRNASFKTWR

SEQ ID NO: 12733 - protein, 513 aa, Zea mays
  VARIANT 85: note = Ancestral polymorphism is G, Derived polymorphism is R
MGAKAEHVAVCPAAATVVLVPFPAQGHISPMLRLARALAERGVAAIVAVPDFVYRRLVSACGQVRTRVEVELASMHSGVPDDGVGEPPGFAGFARAMEHHMPTSLEAMLTAQRGRGVACLVADVLASWAIPVATRCGVSAVGFWPAMLATYRVVAAIPELVDKGLISDYGIPISTKRLDIGEEGKVNGDHRTSDSLHVLPAQLGLSTAELPWLVGDAASQKTRFTFWLQTMERAKSFRSILVNTFPVEATAADAGTVSQQRVLQVLQVGPLLSLPPKGFDDDGCITKGDDLSHDSTSKNPSMWQADETCVEWLDAQRAGSVVYVSFGSWVSSIGRDAINELALGLAATGRPFLWALKDEPSWREGLPSQYAEAVAGRGKIVAWSPQEDVLRHKAVGCYLTHCGWNSTLEAIQNGVRLLCYPVSGDQFINCAYIVKVWETGIRLPSTNRNVVEDCIERIMEGEEGRRMQVNVDEMRERVVMGEARCAANRNLDSFVDEIMKNENLLARRPCPLT

SEQ ID NO: 12734 - protein, 282 aa, Zea mays
  VARIANT 85: note = Ancestral polymorphism is C, Derived polymorphism is F
  VARIANT 88: note = Ancestral polymorphism is G, Derived polymorphism is R
  VARIANT 96..282: note = Derived polymorphism lacks residues 96 to 282
  VARIANT 120: note = Ancestral polymorphism is S, Derived polymorphism is C
MTPSSALALAHHAAVSPLPSSTPRPSPRSSSLSLGPGSAGLGPRRPEGFSQHREYGLVPMVIETTSRGERAYDIFSRLLKERIVCIHGPIADDTASLVVAQLLFLESENPLKPVHLYINSPGGVVTAGLAIYDTMQYIRCPVTTLCIGQAASMGSLLLAAGAPGERRALPNARVMIHQPSGGAQGQATDIAIQAKEILKMRDRLNKIYQKHTRQPIDKIEQCMERDLFMDPEEARDWGLIDEVIENRPASFMPDGIGGGLDVPRLGGVGGGRGRDVEEPSAV

SEQ ID NO: 12735 - protein, 157 aa, Zea mays
  VARIANT 49: note = Ancestral polymorphism is Y, Derived polymorphism is C
MQASRARLFKEYKEVQREKSADPDIQLICDDSNIFKWTALIKGPSETPYEGGVFQLAFAIPEQYPLLPPQVRFLTKIFHPNVHFKTGEICLDILKNAWSPAWTFQSVCRAIIALMAHPEPDSPLNCDSGNLLRSGDIRGYQSMARMYTRLAAMPKKG

SEQ ID NO: 12736 - protein, 157 aa, Zea mays
  VARIANT 89: note = Ancestral polymorphism is I, Derived polymorphism is V
  VARIANT 38: note = Ancestral polymorphism is T, Derived polymorphism is N
  VARIANT 31: note = Ancestral polymorphism is D, Derived polymorphism is G
MQASRARLFKEYKEVQREKSADPDIQLICDDSNIFKWTALIKGPSETPYEGGVFQLAFAIPEQYPLLPPQVRFLTKIFHPNVHFKTGEICLDILKNAWSPAWTLQSVCRAIIALMAHPEPDSPLNCDSGNLLRSGDIRGYQSMARMYTRLAAMPKKG

SEQ ID NO: 12737 - protein, 240 aa, Zea mays
  VARIANT 90: note = Ancestral polymorphism is S, Derived polymorphism is I
MGDSQYSFSLTTFSPSGKLVQIEHALTAVGSGQTSLGIKAANGVVIATEKKLPSILVDETSVQKIQALTPNIGVVYSGMGPDFRVLVRKSRKQAQQYYRLYKEHIPVTQLVRETAAVMQEFTQSGGVRPFGVSLLIAGYDDNGPQLYQVDPSGSYFSWKASAMGKNVSNAKTFLEKRYTEDMELDDAIHTAILTLKEGSWTCRYEGQISSNNIEIGIIRADREFKVLSPAEIKDFLEEVE

SEQ ID NO: 12738 - protein, 240 aa, Zea mays; identical to SEQ ID NO: 12737
  VARIANT 123..240: note = Derived polymorphism lacks residues 123 to 240
  VARIANT 84: note = Ancestral polymorphism is R, Derived polymorphism is L

SEQ ID NO: 12739 - protein, 383 aa, Zea mays
  VARIANT 75..383: note = Derived polymorphism lacks residues 75 to 383
  VARIANT 87: note = Ancestral polymorphism is A, Derived polymorphism is V
  VARIANT 94..383: note = Derived polymorphism lacks residues 94 to 383
  VARIANT 111..383: note = Derived polymorphism lacks residues 111 to 383
  VARIANT 117..383: note = Derived polymorphism lacks residues 117 to 383
  VARIANT 170..383: note = Derived polymorphism lacks residues 170 to 383
  VARIANT 191..383: note = Derived polymorphism lacks residues 191 to 383
  VARIANT 326: note = Ancestral polymorphism is R, Derived polymorphism is H
MKILMYQLCNSVAFVHDPKVLHRELKLHILLKDHKTMENKYVIFPPFCRPEMVVGWYHSHPGFGCWLSGVDINTQQSFEALNPRAVAVVIDPIQSVKGKVVIDAFRLINPQTMMLGQEPRQTTSNVGHLNKPSIHALIHGLNRHYYSIAINYQKNELEEKMLLNLHKKKWTDGLILKRFDTHSKTNKQTVQEMLNLAIKYNKAVQEEDELPPEKLAIANVGLQDAKKHLEEHVSNLMSSNKVDTTTGSYVYRCLSLPKLMNKLIGNSKRCQYKKLLLKHCSINSMQLRSASLALFVWLGKIIVETCISHIAASAPMKRTFRKYSYRDIDLDTLLNMSTDDLVQLFLVDAWRSVHYKEDLPEARNWCGWLSEDLWWLHLKRFGK

SEQ ID NO: 12740 - protein, 190 aa, Zea mays
  VARIANT 12: note = Ancestral polymorphism is S, Derived polymorphism is I
  VARIANT 45..190: note = Derived polymorphism lacks residues 45 to 190
  VARIANT 102..190: note = Derived polymorphism lacks residues 102 to 190
MGPDFRVLVRKSRKQAQQYYWLYKEHIPVTQLVRETAAVMQEFTQSGGVRPFGVSLLIAGYDDNGPQLYQVDPSGSYFSWKASAMGKNVSNAKTFLEKRYTEDMELDDAIHTAILTLKEGYEGQISSNNIEIGIIRADREFKGNSFKPSRDQGFLGRGGVSCLLMILVRTTIAVSLMSSQPEDCLGFITL

SEQ ID NO: 12741 - protein, 635 aa, Zea mays
  VARIANT 324..635: note = Derived polymorphism lacks residues 324 to 635
MEREAASAVVRRRRSAEGGARPQLARGRPGDTRAPCCELVTGLNFEGKDNFGAVIDFTVRSEMRLSIGQVHRNVLALASSRSCFVLGDRVSFRMLSQPRVAGFHQTAWRGSQILEDNRGGPLTLASLEVQSRVEYGKKGKMERTGGPKPSSRASSLYVKPKVSSNVKPAKSALMKPAGIKKTLKVDEALFSAKSFEELGLPPLLVDQLNKEGLTAPTEVQSAAIPIIAQKHDVVIQSYTGSGKTLAYLLPILSDIGPLKRTMEQDHSEKRSGIEAVIVAPSRELGMQIVREVEKILGPNDKRLVQQLVGGANRSRQEEALKKNKPIIVVGTPGRISEISAAGKLHTHGCRFLVLDEVDQLLSFNYREDMHRILEHVGRRPGGTSRDILGPLARRSERQTILVSATIPFSVIRAARSWGHDPVLIRAKSVVPLDSITVPRPALSQSDANPSSSSQSVNQAAVGSLPPSLEHYYCTAKAQHKVDTLRRCIHALEAQTVIAFMNNTKPLKDVVFKLEARGIKATELHGDLGKLARSTVLKKFKDGEFRVLVTNELSARGLDVPECDLVVNLDLPTDSTHYAHRAGRTGRLGRKGIVVTICEESEGFVVRKMRKQLDVAIKPCEFTEGELVVHKEEDVE

SEQ ID NO: 12742 - protein, 115 aa, Zea mays
  VARIANT 26: note = Ancestral polymorphism is R, Derived polymorphism is M
  VARIANT 11: note = Ancestral polymorphism is T, Derived polymorphism is S
MAQYNNWAASTIWMMASRGTSAVLSRAARMRQKLQSALEASALDIEDVSYQHAGHAAVKDNANETHFNIKVVSPKFEGQNLVKRHRMVYDLLRDELSSGLHAVSIVAKTPKELGS

SEQ ID NO: 12743 - protein, 211 aa, Zea mays
  VARIANT 164: note = Ancestral polymorphism is A, Derived polymorphism is V
  VARIANT 163: note = Ancestral polymorphism is R, Derived polymorphism is S
  VARIANT 159: note = Ancestral polymorphism is R, Derived polymorphism is L
MRRNISRRFGPVSAHLWRMKDRESEKGQNRREQEDGERRRGGMEPDKAGEAAKEPTETEAGDSVDPRELVSSDDEIDYSVEPDFYDPDLDDVDERWVSRQRKGRTSDAVLSCPACFTTLCLDCQRHEKYVNQYRAMFVRNCKIKTDQVLREGKSKRKKRRGGRAGDPAAASEGESKGQSYHPVCCEVCSTEVGVLDEDEVYHFFNVIPSNS

SEQ ID NO: 12744 - protein, 399 aa, Zea mays
  VARIANT 136: note = Ancestral polymorphism is T, Derived polymorphism is I
  VARIANT 102: note = Ancestral polymorphism is A, Derived polymorphism is T
  VARIANT 26: note = Ancestral polymorphism is T, Derived polymorphism is I
MALVPSRSDSEALIPEVEMNAGADQTATTARVTVVQASSVFYDTPATLDKAEKLVAEAAGYGSQLVLFPEVFVGGYPHGSTFGLVVGNRTAKGKEDFQKYHASAIDVPGILNDVNVSMFYIIFHENYCDLFFVKETLSFLHICYFCGALHKHIINAGPEVSRLSALAGKYKVFLVIGVVERAGYTLYNTVLSFDPLGKYLGKHRKVMPTALERVFWGFGDGSTIPVYDTPIGKMGALICWENRMPLLRTAMYAKGIEIYCAPTVDCMPTWLSSMTHIALEGGCFVLSACQFCRRKNYPPPPEYTFCGLEEEPSPESVVCSGGSVIISPLGTVLAGPNYESEALLTADLDLGEIVRAKFDFDVVGHYSRPEVLSLVVKSDPKPAVSFISAAGRDDDYVQT

SEQ ID NO: 12745 - protein, 273 aa, Zea mays
  VARIANT 43..273: note = Derived polymorphism lacks residues 43 to 273
MAAVVAAVEAGVVAVASGRGCSSRLVRGLYWRLRAVLRRLRSERARRGRRFSFHYDALSYALNFDDGRAAPAPAPAAADLVLAPGDNDALRHDGSDTSEAWYEYGPAWALGAAKSTIDGEIGRSGRCNTRLTCQLPLPPTLFNDAVSVSLFGHYILAVDRRGATAAPGDSWIVSSRIPEQKKRRKKLARHESDSLHPSITVKSADRQILVQRVRQYSGREARVPAFPVLQGKGTRHASHDEWKYSQPVQAMLPLFHTGHSNQCSTSIRSSPAT

SEQ ID NO: 12746 - protein, 550 aa, Zea mays
  VARIANT 177: note = Ancestral polymorphism is G, Derived polymorphism is A
  VARIANT 245: note = Ancestral polymorphism is L, Derived polymorphism is R
  VARIANT 357: note = Ancestral polymorphism is A, Derived polymorphism is T
MALAPSHAHASLAVAPFTVLCTFLALVALLFLHRYRRSNARPSKKTRQLPPGPAGLPIIGSLHCLVSKKPVFRWVHGLLKDMNTKILCLRFGAVHVVVVACPEIAREVLRTNDAALASRPETDACELFSLGYKGAILSPYGEQWRKMRRVLTSEILSASMEQRQQRRRAQEADYLVASLYSQCCSSASAAASSAASSAVVDIRHVARHFSCNMIRSLVFGKRHFGAGAGPGPEEVAHVDTLFALLNYIYIFSVSDYVPAAWRWMVAGLDLGGDREAGRSVMRTLSRLHDPIIRERIREWDGLRERGEKREVRDFLDALVSLVDSQGRPFLSFDEIKAQTAEMMFATIDNPSNAVEWALAEMMNRPEVMKKAMEELDAVVGKDRLVQESDIPGLNYLKACVREAFRLHPYHALNLPHVAMEDTVVSGYLVPKGSHVLLSRLALGRNPDVWDEPLQFRPERHLVNDGDVVLTEPDLRFISFSAGRRGCPGVSLGSSITMMLFARLLQGFAWSKPPGVRAIRLEESSASLALAEPLLLQAQPRLPVHLYAASG

SEQ ID NO: 12747 - protein, 157 aa, Zea mays
  VARIANT 119: note = Ancestral polymorphism is V, Derived polymorphism is I
MATATASVAPPSTSTSSVLLHRRLPSPAPAPASAAFPRLSGPAPPPRRARLLLRVALTNEVASDDVAAEEAAAAPKIGRRVRVTAPLRVYHVLKAPDLDIQGMEGVVKQYVCVWKGKRVTANFPFKVEFELAVEGQPKPVRFFAHLREDEFEFVDGE

SEQ ID NO: 12748 - protein, 267 aa, Zea mays
  VARIANT 115: note = Ancestral polymorphism is H, Derived polymorphism is Y
  VARIANT 88..267: note = Derived polymorphism lacks residues 88 to 267
  VARIANT 86: note = Ancestral polymorphism is D, Derived polymorphism is Y
  VARIANT 67..267: note = Derived polymorphism lacks residues 67 to 267
MILTGHKENEEFALAMCPAEPYVLSGGKDKSVVLWSIQDHISALGDSSSSPGASGSKQSVKTANEKESPKVDPRGIFHGHDNTVEDVQFYPSRDQCNFFKIPQVLHALAHYNARHPGGEFDAVKPLKQSRVGFRGQAWFHINFWARPRSSSSNNKTIKRFFAEVHYKPTSISSPSSSSSSLAITAVPIVEICIIIEEPLSQYRRSCAFCPSYRDILHPKGCRKFVCGNDKDLFEQRLDPCCCTGMGIGKMPFTARPDMSAFLNISPK

SEQ ID NO: 12749 - protein, 356 aa, Zea mays
  VARIANT 341: note = Ancestral polymorphism is A, Derived polymorphism is T
  VARIANT 245: note = Ancestral polymorphism is D, Derived polymorphism is Y
  VARIANT 182..356: note = Derived polymorphism lacks residues 182 to 356
  VARIANT 107: note = Ancestral polymorphism is E, Derived polymorphism is K
  VARIANT 96: note = Ancestral polymorphism is P, Derived polymorphism is L
  VARIANT 45: note = Ancestral polymorphism is A, Derived polymorphism is D
  VARIANT 42..356: note = Derived polymorphism lacks residues 42 to 356
MATRSAAASKREGRRSQQQLDPAIRADGQTQLSHEIALELSQRSAAAGLRALMESKLLSGTTLIVDRYSYSGVAFSAAKGLDIEWCKAPENGLIAPDLVIYLDVQPEKAAERGGYGGERYEKIEFQKKVAEHYHSLCDSTWKVLICANQGSGIASETDSIPILFSLHFAVILVESGDTGNCWPKSCCLCCGSKRKCSKAKKKQEHQKKVKCRNASKQVHALEVAGRETAPPVPREKFEKRFGQSDAFLASTLQDNGEGCRFDMLKSLDDCIHVLSCGYENKTQWGKEVGWIYGSVTEDILTGFKMHCHGWRSVYCMPKRPAFKGSAPINLTDRLHQVLRWALGSVEIFLSKHCPIC

SEQ ID NO: 12750 - protein, 962 aa, Zea mays
  VARIANT 123..962: note = Derived polymorphism lacks residues 123 to 962
  VARIANT 311: note = Ancestral polymorphism is S, Derived polymorphism is Y
  VARIANT 873: note = Ancestral polymorphism is K, Derived polymorphism is M
MFKSMVYFVNISIGEVEVWPKGQASAGLAVAAWARDIRVDRLSPPSERCPPLAVMHTVAVAARCLVMESRPPVAADVASLPLVDMHAACLRDNKTAVVALGDEELHLVAMTSRRNLTNHACFWGYKLPFGLYNSCLTMLNLRCLGIVFDLDETLVVANTSRSFEDRIDALQRKLSNETDPQRRNGMLSEIKRYQDDKSILKQYIEGDQVYDDGKVYKAQPEIVPPLSDNQQTMTRPVIRLQEKDIILTRINPLIRDTSVLVRLRPAWEDLRSYLIARGRKRFEVYVCTMAERDYALEMWRLLDPDSRLINSVRLHDRMVCVKSGLKKSLLNVFHDGSCHPGMALVIDDRLKVWDEKDQLRVHVVPAFTPYYAPQAEANCSIPVLCVARNVACNVRGGFFKDFDEGLLPRISNVHYEDEVNDISSAPDVGNYLITEDENVALVNGNRDSLPFDGMSDAEIERRMKEANAQAFHQTATNFVMPVAPAQNFVSSSVAPLAPPLSMMPPPFSQPVVQPGFSDPLQGSPAREEGEVPESELDPDTRRRLLILQHGQDTRDPTPPHPAIPPVQVPVPPVQPHGNWFPTEDGINPSNLSRGSAGFTVESDSMPYEKKQPPHPSFFHGGDSPMSSDRFGYQNQRFPSQLPHTEDHHMLQNHAPPKYRSFSGEELATRHVPSSQRNHIESGRHFSQYAGTSAGVLEGIAVKCGSKVEYRSTLCDTAELQFSIEVWIVGEKFGEGIGRTRREAQRQAAEMSLRNLANKYLSSDPNKLTDMKQDAFGSNRNIFGYSGNTRDDMLPLSSTSEESRFMKMEENNSRKTGDSVTALKELCTVEGYNLVFQACPSPADGLVGKESYAQVQIGRQILGKGVGLTWEEAKLQVMSSLILTDFVFLLLPYFPCLKKIWIHLAADEALGTLRSMLGQLGHRRSGSPRSLAPNFNKRFKPDFPRTVQRVPYGTYSRIEGHAP

SEQ ID NO: 12751 - protein, 534 aa, Zea mays
  VARIANT 477: note = Ancestral polymorphism is W, Derived polymorphism is R
  VARIANT 436: note = Ancestral polymorphism is I, Derived polymorphism is T
  VARIANT 412..534: note = Derived polymorphism lacks residues 412 to 534
  VARIANT 398: note = Ancestral polymorphism is R, Derived polymorphism is G
  VARIANT 312..534: note = Derived polymorphism lacks residues 312 to 534
  VARIANT 145..534: note = Derived polymorphism lacks residues 145 to 534
  VARIANT 110: note = Ancestral polymorphism is G, Derived polymorphism is E
  VARIANT 87..534: note = Derived polymorphism lacks residues 87 to 534
MPSSSSGPPSSDVRPIPYLDECDAPRRKRRHSASAIYTPPNITATQARATRRHLLNQSRITRKASYPNRSYYGTPDYECSYCHAVFWYAERVRSNQQDSSIRYNNCCKGGKISIPPFKPRPKPLASLARFDGDATSRKFIRNIRQYNCLFAFTSMGAQIDNSVNDGRGPPLFKICGQVHHRIGTLLPDDGCPPRFIQLYIYDTTNEVQNRINALDSGDRTQDNFDSVIIRNLIKMLDDHNTFVKKFRMARDRLTDNPNEEFTIRLIRAKEGDPIQYNLPTTDELAMLVVGDFTLDTFKRDIIIETQNKELKRISSLHPAYMALQYPLLFPFGERGFQVGVLYNGATSSGQNARKHLTMQLYYCYQFHYRKNQPNPYLCYAMLSSQAKVDARACIDENRLNYIINNQKNLRMESIQGITDAVSRGCISGEQMGKTITLPASHTGGRRYMIQNYHDDIAICRVHGPPDFFLTFTCNPNRQEILESLSQPGQTPSERSDIIVRVYHMKLNDLLHHIRNGSIFGPCTADRWTTHFYQI

SEQ ID NO: 12752 - protein, 268 aa, Zea mays
  VARIANT 10: note = Ancestral polymorphism is S, Derived polymorphism is F
  VARIANT 30: note = Ancestral polymorphism is S, Derived polymorphism is L
  VARIANT 186: note = Ancestral polymorphism is L, Derived polymorphism is M
MAASSSSCLSVLLASWLVCAACLFVSGNASGAAHRVVDPEWHPATATWYGSAEGDGSDGGACGYGTLVDVVPMKARVGAVSPVLFKSGEGCGACYKVRCLDHGVCSRRAVTVIVTDECPGGVCAGGRTHFDLSGAAFGRLAVAGAGGQLRDRGEINVVFRRTACRYGGKNIAFHVNEGSTSFWLSLLVEFEDGDGDIGSMQLKQANSAQWRDMQHVWGATWSLTPGPLVGPFSVRLTTLSGKQTLTAQDVIPKNWAPKATYTSRLNFA

SEQ ID NO: 12753 - protein, 255 aa, Zea mays
  VARIANT 39: note = Ancestral polymorphism is F, Derived polymorphism is S
MEQTRTGGAGEQPRGAPGEEAAKRIIVGGDAPASGTSGSGCFDCNICLECATEPVVTLCGHLYCWPCIYEWLRHDVAEAGARSSARRQCPVCKAAVSPDALVPLYGRGGSSSAKKPLASIPRPRRPALRQSTHDSGSGGHHHHHRHAETSTPARSLRHPAHAHAAQFDALLSAPFGDRGMLHSTTSTTGGMLGGMAVAVLPLVLRGQARVPGMYYPSPYHLMSPRQRRWHVEVERSLHQIWFFLCVFVVLCLLLF

SEQ ID NO: 12754 - protein, 173 aa, Zea mays
  VARIANT 76..173: note = Derived polymorphism lacks residues 76 to 173
MASRLAVAVAVAAPASSPSPVGTVAPPRVALRRGLPPTWHALRALPRSRGAAVVCQAQGGQDTAIQVPDVSKSTWQSLVVESELPVLVQFWASWCGPCKMIDPIVGKLSKEYEGKLKCYKLNTDENPDIATQFGIRSIPTMMIFKNGEKKDAVIGAVPESTLVTCIDKYVGGR

SEQ ID NO: 12755 - protein, 357 aa, Zea mays
  VARIANT 177: note = Ancestral polymorphism is P, Derived polymorphism is T
  VARIANT 79..357: note = Derived polymorphism lacks residues 79 to 357
MAMAMAEWWAAATEAVAVYTGLTPTAFFTAVAVAAALYVAVSGLFARPAQTSSRRQEEAAEERTFEPLPPPVQLGEVTEEELRAYDGSDPKKPLLMAIKGQIYDVTQSRIFYGPGGPYASFAGRDASRALAKMSFEASDLTGDISGLGPLEVEALQEWEYKFKSKYVTVGIIKKTVPFSEGDAARSDVTTERDIVAGIVESNSVPEPEETGMTNQGSVVEKITESPDIDVNTSSHEDAKKAKELPDPDVTNTSSQADAVDKPEEIPNAVVKNRRSIEGAIEAKETPQVEDGKDTYQPEDATEKPNEATDVVDLKNTASHEDAKQPKKTRNEDEKDVSSHQHGDENPKETSNVEVKNA

SEQ ID NO: 12756 - protein, 314 aa, Zea mays
  VARIANT 249: note = Ancestral polymorphism is T, Derived polymorphism is A
MEGGAVPKPSEKRVALVTGGNRGMGFEICRQLASSGLTVVLTARSETRGAEAARELHGFGLPDVVSHQLDVTEPTSAARLADFVRTKFGKLDVLVNNAGIMGVTMEVGDDEAAVKEMMVGKDQNEIAEWLKQRTTQSAEQAEECVRINYHGTKTVTEALLPLVQSSSSSSSGGRIVNVTSSFGLLRFFSGEELRQELSSVDTLTTQRLDELSALFLEDYRSGRLEPRGWPTDRVYAAYQVSKALVSAYARVLARDNPALRVNCVHPGYVQTEMNRNTGDLTAAEGARVSVAVALADQGGVTGAYFDRTQIASFV

SEQ ID NO: 12757 - protein, 291 aa, Zea mays
  VARIANT 54: note = Ancestral polymorphism is C, Derived polymorphism is Y
  VARIANT 64: note = Ancestral polymorphism is P, Derived polymorphism is S
MGCKACDKPKPNYRKGLWSPEEDQKLRDYILLHGHGCWSALPAKAGLQRNGKSCRLRWINYLRPGLKHGMFSPEEEETVMSLHATLGNKWSRIARHLPGRTDNEVKNYWNSYLKKRVEGKDQGPSTPAPAASNSDDDSHCVKQRRDDDGTADSGASEPRESSSADDSSCLTDPHACRPHAPVPPKVMFADWLDMDYVGGALPATAPAAPGLLGAAGVATASTGDRDQHQVMSMSQGSVQVDGPSGADVSLHGFDDSGAGCWEFQEHFDAIDHMQAAGFCDLLSMSDYFGLD

SEQ ID NO: 12758 - protein, 293 aa, Zea mays
  VARIANT 117: note = Ancestral polymorphism is L, Derived polymorphism is P
MGRAPCCDRTKGLKKGPWTPEEDKLLVDYIQTNGHGSWRLLPKLAGLNRCGKSCRLRWTNYLRPDIKRGPFTSEEQKSIVQLHAIVGNKWSMIAAQLPGRTDNEIKNYWNTHLKKQLRRMGLDEPPPGPAAGCPSARHMAQWETARLEAEARLSLLATAASSSSCGAIAATSASSSSSTVDLKTACARPADIFLRLWSSDIGDSFRRKTAAAPVVKRKDAVIKQESQALLLGPGDDSSAASNETEVAEALEEYQMFLDFAGEELGLFHGRHGGFSLFPPLDVLAEASLDTAFK

SEQ ID NO: 12759 - protein, 186 aa, Zea mays
  VARIANT 57: note = Ancestral polymorphism is P, Derived polymorphism is S
MAAVVEAAPAAETAAKAVAEEEAGVTAPGPPVGGSNSKALIVVDKVDDKPFSLNNMPRNSNDRDIALATVEIEKINSLIKAWEENEKAKADNKTAKKQSIILSWENTKKAIIEAELKKKKEELEKKMAEYAEKMKNKKAIIHKKAEEKRAMVMAQHGEEILKTEEMAAKYRATRVAPKKFLRCFRA

SEQ ID NO: 12760 - protein, 141 aa, Zea mays
  VARIANT 101: note = Ancestral polymorphism is E, Derived polymorphism is G
  VARIANT 100: note = Ancestral polymorphism is P, Derived polymorphism is S
  VARIANT 97: note = Ancestral polymorphism is W, Derived polymorphism is R
  VARIANT 95: note = Ancestral polymorphism is W, Derived polymorphism is R
  VARIANT 91: note = Ancestral polymorphism is E, Derived polymorphism is K
  VARIANT 86..141: note = Derived polymorphism lacks residues 86 to 141
  VARIANT 69: note = Ancestral polymorphism is T, Derived polymorphism is M
  VARIANT 64: note = Ancestral polymorphism is V, Derived polymorphism is A
  VARIANT 61: note = Ancestral polymorphism is T, Derived polymorphism is I
  VARIANT 47: note = Ancestral polymorphism is P, Derived polymorphism is A
  VARIANT 32: note = Ancestral polymorphism is G, Derived polymorphism is D
  VARIANT 31: note = Ancestral polymorphism is H, Derived polymorphism is N
  VARIANT 9: note = Ancestral polymorphism is L, Derived polymorphism is S
  VARIANT 1: note = Ancestral polymorphism is M, Derived polymorphism is I
MQFFGGSLSTSIAQEATPTSGSSPVPIVATHGGCTAPARVHDLGHQPTASPVFGASDIVATAEVCTIFTDLSADVKERELHNLLCWLLGFEVSYWMRTVPELREVIRRSMPEVEKTRVINREEVRITDYLSEFLCFIVCLY

SEQ ID NO: 12761 - protein, 411 aa, Zea mays
  VARIANT 147: note = Ancestral polymorphism is R, Derived polymorphism is W
MGIKGLTKLLAQHAPTAAVQRRVEDYRGRVIAVDASVSIYQFLAVVGRKGSELLTNEAGEITSHLQGMLNRTIRMLEAGIKPVFVFDGEPPEMKKKELAKRSLKRDDAIKDLNRAMEIGDENAIEKFSKRTVKVTGRHNDDCKRLLRLMGVPVVEAPGEAEAQCAALCENHQVYAVASEDMDTLTFGARRFLRHLTDLGYKKSPVTEFDVSKVLEELGLTMDQFIDLCILSGCDYCENIRGIGGQRALKLIRQHGCIEEVLQNLNQTRFSVPEDWPYQEVRTLFKEPNVCAGIPDFTWTSPDPEGLMDFLSTENSFSPDRVTKAVEKIKVARDRYSPGRMKHLTPVASLRGSHTEKEPQCILGSPGQTLKVMSSPQVCKSPSSGFRYGSSKPFMLGRQSGFHGMPYALSFI

SEQ ID NO: 12762 - protein, 225 aa, Zea mays
  VARIANT 92..225: note = Derived polymorphism lacks residues 92 to 225
  VARIANT 76..225: note = Derived polymorphism lacks residues 76 to 225
  VARIANT 41: note = Ancestral polymorphism is A, Derived polymorphism is T
  VARIANT 36: note = Ancestral polymorphism is T, Derived polymorphism is I
MSTESGELLGIDPVDLRFPFELNKQISCTLQLTNKTDKQVAFKVKTTSPKKYCVRPNNGMVAPRSKADVVVTMQAQRDAPPDMHCKDKFLVQSAIVAKETMPKEVTGDMFTKDSGNIVDEVKLKVVYTAPSSSQSEGFEDGNLGSLSYQEETKEPKESEKIISEPFALISKLMEEKNSAVELNNKLRQELDLLRRDISRQHGGFSLVLVLVVAILGILLGFLMKR

SEQ ID NO: 12763 - protein, 168 aa, Zea mays
  VARIANT 4: note = Ancestral polymorphism is F, Derived polymorphism is V
  VARIANT 65..168: note = Derived polymorphism lacks residues 65 to 168
  VARIANT 73: note = Ancestral polymorphism is G, Derived polymorphism is R
  VARIANT 78: note = Ancestral polymorphism is S, Derived polymorphism is F
  VARIANT 98..168: note = Derived polymorphism lacks residues 98 to 168
  VARIANT 103: note = Ancestral polymorphism is K, Derived polymorphism is M
  VARIANT 114..168: note = Derived polymorphism lacks residues 114 to 168
MSRFIVFVHSNTKCVHACSLNIRSFFSSVGWLVHSQTCALKVNIHCDGCEKKVKKILHKIDGVYQSSIDAEQGKVTVSGLMDPATVIKKLNKAGKPAQLWGAKLDVVSQLQKLQLGGGGGGGKDKQPKGGDGGAKGQQTKGGGGEGGGGKGGKDANMVLPQPTPQQMQ

SEQ ID NO: 12764 - protein, 242 aa, Zea mays
  VARIANT 200: note = Ancestral polymorphism is L, Derived polymorphism is H
  VARIANT 156: note = Ancestral polymorphism is N, Derived polymorphism is Y
  VARIANT 99: note = Ancestral polymorphism is V, Derived polymorphism is D
MPGRLLSVRIPSLAKLGAPRCAKSMASDTGKKLIQIDVSSDTIPVMIPVSEFLFTRVPTLCLSACFAWKVRWHPFFLNPDAPKEGVRKSDFYKAKFGPVQYERVISRMAEIFRGLGLEYDMSGLTGDTMDSHRLIALAGHQGYDKQNALVGELFLNYFCEGKYIGDKQVLLDAARKVGIEGAEELFQDPTKGVDEVQEELKKYSSGISGVPHFVINDKYQLSGGQPPNVFMRAFEMAAKDGA

SEQ ID NO: 12765 - protein, 33 aa, Zea mays
  VARIANT 10: note = Ancestral polymorphism is C, Derived polymorphism is Y
  VARIANT 9: note = Ancestral polymorphism is V, Derived polymorphism is I
MERSQACPIYAKSENIFKRIMFPLQIMLFNEDE

SEQ ID NO: 12766 - protein, 593 aa, Zea mays
  VARIANT 197: note = Ancestral polymorphism is I, Derived polymorphism is T
MGTSSGANFHQQPPPTQGMLPPRHGPRPSGLQTSLSLASSEQVGSPDMQEPGSNSEPGHDSATESASSKDTWPAEPNQSNGGVAASDVVSKAAEKEVANGVSKPQVIHGPSSRMSGMLLREVARERVDLVAEKMKMMSDEHLEEVKNELRSILEGTGGSHHIEEFLYLQKLVQDRHDLTPSMLSVAHHVQLEILVAIKTGIQAFLHPSVTIPHNRLVEVFLYKRCRNIACQSALPAEECRCNVCASRNGFCNLCMCVICNKFDFEVNTCRWIGCDFCSHWTHTDCAIHNGQIGMGQSVKSSIGHAEMLFRCRACQRTSELLGWVKDVFQQCAPGWDRDALLRELEFVCKIFRLSEDAKGRVLFRKCLDLIERLRNTPADSINPRMILQALQELEMDSPKISENEDVGHLITPQEACNRIAEVVQEAVRKMELVAEEKMRLYKKARLAVEACDRELEEKVREAQELKAERQRKKQQVEELESIVRLKQAEAEMFQLKANEARQEAERLQSIALTKSKTAEQDYASMYLKRRLEEAEAEKQFLFEKIKLQENQRPTVGVGSSSGAGGDSTPTMMLSKIQDLLKNVRSMPAKSEGH

SEQ ID NO: 12767 - protein, 524 aa, Zea mays
  VARIANT 385: note = Ancestral polymorphism is G, Derived polymorphism is V
MAVRWCLLLLVLVLAAAAACAEKGEWDPVIRMPGEKEPAGSHSHSGEGFDGEVDDAVGTRWAVLVAGSSGYGNYRHQADICHAYQILQKGGIKEENIVVFMYDDIANSALNPRQGVIINHPEGEDVYAGVPKDYTGDQVTTKNFYAVLLGNKTAVTGGSRKVINSKADDHIFIYYSDHGGPGVLGMPNLPYLYAGDFMKVLREKHASNSYAKMVIYIEACESGSIFEGLMPEDLNIYVTTASNAEESSWGTYCPGMEPPPPSEYITCLGDLYSVSWMEDSETNNLKEETIKEQYEVVKKRTSDFNSYGAGSHVMEYGDKTFKGEKLYLYQGFDPANANVTNKLLWSGQEAVVNQRDADILFLWKRIDDGPDRRIVLVVCFYFLRGCLQFWFVRFQYELLHEKSEEKQEVLREITGTVRHRKHLDNSINFIGKLLFGAEKGPSTLEAVRPPGQPLVDDWDCLKQMVRIFESHCGSLTQYGMRHMRAFANICNSGTPGASMKRASMGACGGYNSARWSPLAQGYSA

SEQ ID NO: 12768 - protein, 682 aa, Zea mays
  VARIANT 72..682: note = Derived polymorphism lacks residues 72 to 682
MVVRCPVSLPLPSVIPDRLFRGRTFENWDATMPARSWAPLGFIKTSKLFALIPINPPRTFLVAPSSGPPSRQALWNLRELDRIGAPAMADEAKAKGNAAFSAGRFEEAARHFTDAIALAPGNHVLYSNRSAALASLHRYSDALADAQKTVELKPDWAKGYSRLGAAHLGLGDAASAVAAYEKGLALDPSNEGLKAGLEDAKKAAAAPPRRGPSGPDAIGQMFQGPELWSKIASDPTTRAYLNEPDFMQMLREVQRNPSSISMYLSDPRMMQVLSLMLNVKIQRPEASEPSQSTPPPPPPQQQQTSPLQTKAREVEPEPEPEPMDFTDEEKERKERKAAAQKEKELGNTAYKKKDFEAAIQHYTKALEHDDEDISYLTNRAAVYIEMGKYDECIKDCDKAVERGRELRADFKMISRALTRKGTALVKLAKTSKDFDIAIETYQKALTEHRNPDTLKKLNEAERAKKELEQQEYYDPKLADEEREKGNEFFKEQKYPEAIKHYTEALKRNPKDPRVILLPLSHTICLLQTVYSNRAACYTKLGAMPEGLKDAEKCLELDPTFTKGYTRKGAIQFFMKEYDKAMETYQAGLKHDPKNQELLDGVRRCIEQINKANRGEISQDELQERQNKAMQDPEIQNILTDPIMRQVLNDFQENPRAAQEHLKNPGVMQKIQKLVSAGIVQMR

SEQ ID NO: 12769 - protein, 513 aa, Zea mays
  VARIANT 344..513: note = Derived polymorphism lacks residues 344 to 513
  VARIANT 324..513: note = Derived polymorphism lacks residues 324 to 513
  VARIANT 200: note = Ancestral polymorphism is S, Derived polymorphism is F
MASLSDSAGAGSGGRAGAELMVPQFLLKVLHAILAARSPRPHAPPPPPPAASAFRRRDRWFHLPLHLPPAAEHLPEPSPAEPLVVDVYLAPSGGGPEEVLERWTVACEPWPSPAAAGEGLAVNRAYKRCITLLRSLYAMLRFLPAYRAFRALCASGQVYNYEMGHRVGSFSTPFSRAEEATMRTERLAPVETQLGRLVVSVQYLPSLAAFSFNATSLASAAIITDYVGSPAAEPMRAFPASLTEAAGSPSPQPSRRPNSWASPAPWPHTMRQPAKFSPPPAHYASPTPSPPMFGYLHSRFSGETAPMSIPQAGGGRGPMHQHHQNLSEPSRAFMFPPPSPKYLRGEAGRQESPTETNRSFKRADGIRMGDLYANLPSGYKIKDSRDESGRSSGVFSSSGSPQLGFSRSSSRLSMQDDTDDADFPFAVDDVDPDSRPGSSGGKDTGDPVGSSFHKSQDAAVGYLVHLLKSARPLRDFSYSSHTSMGESIEAGSTSSFMSRRTSDALEEKSSNYN

SEQ ID NO: 12770 - protein, 177 aa, Zea mays
  VARIANT 76: note = Ancestral polymorphism is R, Derived polymorphism is C
MARRTNHTSTAAAATTTMVASSPSPPRPPPPASAGAWGPYASSRAFFSNVATILIILACVSLLAFTLHAAARFLLRCLARRRAAREEAQAPGQQPKLPSGAAAASAAAGSERAGATGAGVWAEAECAICLSELLEGGERVRVLPACGHGFHGACVEGWLAARASCPTCRAPSRAGEP

SEQ ID NO: 12771 - protein, 310 aa, Zea mays
  VARIANT 84..310: note = Derived polymorphism lacks residues 84 to 310
  VARIANT 124: note = Ancestral polymorphism is I, Derived polymorphism is N
  VARIANT 147: note = Ancestral polymorphism is S, Derived polymorphism is F
  VARIANT 148: note = Ancestral polymorphism is G, Derived polymorphism is R
  VARIANT 152: note = Ancestral polymorphism is L, Derived polymorphism is P
  VARIANT 169: note = Ancestral polymorphism is R, Derived polymorphism is C
  VARIANT 173: note = Ancestral polymorphism is S, Derived polymorphism is F
  VARIANT 192..310: note = Derived polymorphism lacks residues 192 to 310
  VARIANT 195..310: note = Derived polymorphism lacks residues 195 to 310
  VARIANT 279..310: note = Derived polymorphism lacks residues 279 to 310
MLSGAISRLGARLRLHADPSPTSPRLRVLSTRRGKRSSPTLSPADCDDEGPLRCLFVLSHDPECPPWLLVVQPRLRPGSLLESKLAEALNLANSLEERRDGFYHSEFGTKGASPHLVWGQLRRIYNGPAPLADLAVGADHVAAYDASGKVVLWWRGGGRFPARADGAFRSLVSGDSFSYAVQANASAAVRCWGPQGSAVQEGLANASAAPYLAAGGTRACAVLASGAALCSGSDASADALPRDLFGYGLAVGDSHACALRRPGHTAVCWTLGGPTTTLYEPTMGISFGFLVADGNFTCSNSRKRRIQTCP

SEQ ID NO: 12772 - protein, 394 aa, Zea mays
  VARIANT 305: note = Ancestral polymorphism is C, Derived polymorphism is R
MASFVVHHHGSPLDREGKVKMSALALRSSLRPCEAAEEVGAGQAWCRGADMGIAAFADEFSVEDLLDLEDLCEVDKDCAELGDTVPAAESVQEEDKVSSDSHGSSVLSYELMTLPVPHPMIDLPLPAHDAEELEWVSRIMDDSLAELPPPPKLPAAPLGAARRPLEGAVAGPMRSPTTTICALSTEALVPVMRAKRSKRSRGSVWSLSGGAPLSESTSSSSTATTSSCSSSASFSPLLLLPADPSLVLSSHLLDETPRPKKKSKHGKHGKSGKPKKRGRKPKHHPKPPQFSGGAAYAPAQGDRRCSHCGVQKTPQWRAGPEGAKTLCNACGVRYKSGRLLPEYRPACSPTFVSSIHSNSHRKVLEMRRKKDGDLGQLPLPVPAALLLGPAVESF

SEQ ID NO: 12773 - protein, 142 aa, Zea mays
  VARIANT 10: note = Ancestral polymorphism is A, Derived polymorphism is G
  VARIANT 46..142: note = Derived polymorphism lacks residues 46 to 142
  VARIANT 54: note = Ancestral polymorphism is S, Derived polymorphism is F
  VARIANT 96: note = Ancestral polymorphism is A, Derived polymorphism is D
MKVQCDVCAAEAASVFCCADEAALCEACDRRVHRANKLAGKHRRLSLLSPAAPSSSAQQTPPPPLCDICQEKRGLLFCKEDRAILCPDCDVPVHTASELAMRHTRFLLTGVRLSGSPQSPPRARRRRRRTRTTAAAAASPST

SEQ ID NO: 12774 - protein, 125 aa, Zea mays
  VARIANT 106..125: note = Derived polymorphism lacks residues 106 to 125
MGSGADRPSAVAWSTTREWWKEAGEGQRNEAPLAAQGLHPCLGKAWQARHGEAMDCHNLVERRFVCRVFSLLLMDNSCEKGEDQLADEAAAGSRAGLQQDLAMANRGIVTHRGFSNATLLAPSWY

SEQ ID NO: 12775 - protein, 366 aa, Zea mays
  VARIANT 103: note = Ancestral polymorphism is G, Derived polymorphism is S
  VARIANT 102: note = Ancestral polymorphism is S, Derived polymorphism is F
MGSRVSGPYMDSSPPPPPRPPSPPRHPPHPQGERHGGWEMPYQDVDHKLRALVGGAEGFGRHAIGGLYGAIHRVTSLQDNGPGSLREACHAEEPLWIVFEVSGTIHLHSYLRVSSYKTIDGRGQRVVLTGKGLQLKSCHHVIICNLVFEGGRGHDVDGIQVKPDSTNIWIDRCTLADYDDGLIDITRQSTDITVSRCHFMRHDKTMLIGADPTHVGDRCIRVTIHHCFFDDTRQRHPRLRFGKVHLYNNYTRSWGIYAVCAGVEAQIVSQCNIYEAGGGPPKKTTVFKYMPEKAGDQEDVVAGSISSEGDAFLNGALPCLIDNPGSVFRPEDYYQQRTMEPASPALKDIIQLCAGWQSVPRPPDDR

SEQ ID NO: 12776 - protein, 130 aa, Zea mays
  VARIANT 25: note = Ancestral polymorphism is P, Derived polymorphism is S
  VARIANT 50: note = Ancestral polymorphism is K, Derived polymorphism is E
  VARIANT 75: note = Ancestral polymorphism is T, Derived polymorphism is A
MADEAEAEAKNPSCLILLSNVATVPFLLWARCCLLFLPPPPEQSLFVLSKFGYSMRAKHIFRDLKEDPYVVELDTRVDGRDIQSVLLDLVGRRTVPQVFVNGQHIGGSDDTVNALSNGQLQKLLGKSQSQ

SEQ ID NO: 12777 - protein, 235 aa, Zea mays
  VARIANT 93..235: note = Derived polymorphism lacks residues 93 to 235
  VARIANT 82: note = Ancestral polymorphism is E, Derived polymorphism is K
  VARIANT 76..235: note = Derived polymorphism lacks residues 76 to 235
  VARIANT 73: note = Ancestral polymorphism is P, Derived polymorphism is L
  VARIANT 7..235: note = Derived polymorphism lacks residues 7 to 235
MERGDCQFTVVPPRQYDEAQFMHQLMVAGDQQDPAGAGRGAAAAGGERKRRFTEEQVRSLETTFHARRAKLEPREKAELARELGLQPRQVAIWFQNKRARWRSKQLEHDYAALRAQFDAMHARVESLRQEKIALAAQVDELRGRLNERQDQSGSCEVNDAEAAADDKRNNSTSSLVQDDGATPPPAAVDASEDSAATGEYYDHVAYEYDGLHDPFVCATPDLWDTWPLLEWNAVA

SEQ ID NO: 12778 - protein, 377 aa, Zea mays
  VARIANT 268: note = Ancestral polymorphism is P, Derived polymorphism is T
  VARIANT 266: note = Ancestral polymorphism is F, Derived polymorphism is S
  VARIANT 91: note = Ancestral polymorphism is F, Derived polymorphism is S
MAPRGGREEASSGSEDEEEEAGFSRSYFLAKEKEPSSVKKRARAAAGKLSDLNLVDEQVLRASLAQIPPKHKEEVESLTRSYKDQYRNWLFELRCGFGLLMYGFGSKKQLLEDFASTTLTNFTVVVINGYLPAVNLKQVIATIAEMFWDQTKAKRRKRAGTRSQLSQQFPSQSTEGIISFLMRQTSDDVDDHVCLLIHNIDGPALRDTESQQCLAQISCCPQIRVVASIDHVNAPLLWDKKMVHKQFKWSWYHVPTFAPYKVEGVFYPLILASGGHAQTTKTALVVLQSLTPNAQSVFRVLAEYQLANEKEEGMPVSSLYTKCRERFLVSSQVTLNAHLTEFKDHDLVKTRKHSDGQDCLRIPLVSDALEKLLQELA

SEQ ID NO: 12779 - protein, 88 aa, Zea mays
  VARIANT 26: note = Ancestral polymorphism is G, Derived polymorphism is D
  VARIANT 20: note = Ancestral polymorphism is T, Derived polymorphism is I
  VARIANT 19: note = Ancestral polymorphism is A, Derived polymorphism is T
  VARIANT 8: note = Ancestral polymorphism is T, Derived polymorphism is I
MAKLASLTTLLLLIVVVMATVSSVHGARAFERVDQVAILHEPSLEANPPSATLLEVEALVPFDEEAVDGPVGYDLATDCTRKTPVFGP

SEQ ID NO: 12780 - protein, 394 aa, Zea mays
  VARIANT 216: note = Ancestral polymorphism is G, Derived polymorphism is R
MDNARLVYLKGRCGLGSRKLGLMWASSSQSSIMEPTHLPFDGNSGHTPKKSNLLICYLYVVVGESALILIRHGESLWNEKNLFTGCVDVPLTPKGVEEAIEASKRICNIPIDVIYTSSLIHAQMTAMLAMMQHRRKKVCVFPFKFQYGELQGLNKQETVDRFGKEQVHEWCRSYDILPPNGESLEKCAKRVVAYFKDQVHLARPLYTNWKIHFLLGLLLMEYCELLDKADECEDPYMHMVYASTWAVSVYFTYQRTWKPFNPILGETYEMVNHQGITFLAEQVSHHPPMGVAHCENEHFTYDITPKVKTKFLGNSLEIYPVGRTRVTLKKSGVVLDLVPPLTKVNNLIFGRTWVDSPGEMVMTNLTTGDKVVLYFQPCGWFGYDIWPSIYSCIC

SEQ ID NO: 12781 - protein, 471 aa, Zea mays
  VARIANT 169..471: note = Derived polymorphism lacks residues 169 to 471
  VARIANT 18..471: note = Derived polymorphism lacks residues 18 to 471
MVATTHAASMSFLLSHPQSRSATPSRHLPLRLAACRVRCATDASALSPAVTTKHWRATDENIREEAARHPAPKQGLSAWYEPFPPAPNGDPNERYSLDKIVYRSSSGASSTCDTTWRRWPASRGNSNLFWAKRLGRDHQGKMNDLWVKHCGISHMGSFKDLGMTVLVSQVNRLCRAPLSRPIAGVGCASTGDTSAALSAYCAAAGIPAIVFLPANRISLEQLIQPIANGATVLSLDTDFDGCMRLIREVTAELLSSSLCIIFTAFLEQKLVEFDRTERLNHFVLTDSDIAVVDDLGHIFEKYPHFHLAVTFRNNKGQPLNSGFVAVRGTSDGITKAVEFLKQVLGTYSLRYIKASRMLGDQLALAWVVKFHLPSALGKFSKHEAFTGEVNGTSVLFLPCAVYNWTQPEGAGQFHGIPLDVKDLQSRRIVQKLEGHTDTVIAVSCHPKENMIASGALDNDKTVKVWVQKEED

SEQ ID NO: 12782 - protein, 290 aa, Zea mays
  VARIANT 189: note = Ancestral polymorphism is T, Derived polymorphism is I
  VARIANT 155: note = Ancestral polymorphism is Q, Derived polymorphism is H
  VARIANT 144: note = Ancestral polymorphism is H, Derived polymorphism is Y
  VARIANT 143: note = Ancestral polymorphism is V, Derived polymorphism is A
  VARIANT 130..290: note = Derived polymorphism lacks residues 130 to 290
  VARIANT 127: note = Ancestral polymorphism is L, Derived polymorphism is P
  VARIANT 105: note = Ancestral polymorphism is A, Derived polymorphism is D
MDALMASYASDTDSDGGESASVSGGAPEVPEPSALLPPPPLDLLQPPNFVDYSAMAQGGRVRSFPHVEGNYAVHVYIPVVIPSDARKQLALSMKRAASLVPDLYAVDADYALSELCKDEQKLEKVLLSREFHVSLGRPVAVQVHQIDSFIAMLRQKFQPQQQLVISKNFTAWYWMEFNKWEHFVNDDCTRSFVSLEVTRTGLPEITRQILMVDEVYRLHGLPEFYTNPRPHISLVWALGDVSGKLKQALKDIEKYQSSMSSLQKCNVRCKFSRVVCKVGKKVHDICKVAD

SEQ ID NO: 12783 - protein, 321 aa, Zea mays
  VARIANT 171: note = Ancestral polymorphism is G, Derived polymorphism is E
MLCSGRMLACNGVLPGRLRLPRADAYHLRPPALARRWRVVASAAASGGSPDLPSSSSSPPNPPFGAGDDQTAASPGFCIIEGPETVQDFAKLDLQEIQDNIRSRRNKIFLHMEEIRRLRIQQRIKNVELGISDEERDHELPDFPSFIPFLPPLSAANLKVYYATCFTLIAGIMVFGGFLAPILELKLGVGGTSYEDFIRSVHLPMQLSQVDPIVASFSGGAVGVISALMVVEINNVKQQELKRCKYCLGTGYLACARCSSTGALVLTEPVSTFSDGDQPLSAPKTERCPNCSGSGKVMCPTCLCTGMAMASEHDPRIDPFI

SEQ ID NO: 12784 - protein, 284 aa, Zea mays
  VARIANT 205: note = Ancestral polymorphism is T, Derived polymorphism is M
  VARIANT 189..284: note = Derived polymorphism lacks residues 189 to 284
  VARIANT 180: note = Ancestral polymorphism is S, Derived polymorphism is P
  VARIANT 129..284: note = Derived polymorphism lacks residues 129 to 284
  VARIANT 74..284: note = Derived polymorphism lacks residues 74 to 284
MVVRGASTPPRGGNDRPGGDCRGRDAGEEAAVVASSIGSGREACGINLTSVVPAFWVMFCAEDNNPTTKGKAAQSSSENGGGKKQQGKESATKPLAEAPKDYIHVWAWHGEATDSRSLAERVRREKISQRMKLMQDLVSGCNKVVGKAVMLDEIINYVKWAMVFGSHDDMAFERPPEWFSPDGVPPLHWPPGPGSGCSFQGTPRTDLMAAETGMNWLLSCSSSGPRELWPYGGASRRRTDHASCRSARRTTFSGRTATPGRTGSTWLSPRITKSHGRGRTTYVG

SEQ ID NO: 12785 - protein, 134 aa, Zea mays
  VARIANT 78: note = Ancestral polymorphism is R, Derived polymorphism is G
MGSLMSGWSSSVLSDKEARLMRNRSLTKEEVAAFWRQHGSIPNAGSPRAVPVQYCCTRSDDDGFFLPENAADSSAANRGSWWTRSSWAFLNEPPPPTTTREAEAVLGSRAPRSFVVVACDQQLHAAARIVTGNA

SEQ ID NO: 12786 - protein, 246 aa, Zea mays
  VARIANT 4: note = Ancestral polymorphism is T, Derived polymorphism is M
  VARIANT 8: note = Ancestral polymorphism is S, Derived polymorphism is I
  VARIANT 10: note = Ancestral polymorphism is E, Derived polymorphism is A
  VARIANT 12: note = Ancestral polymorphism is R, Derived polymorphism is Q
MQAMMGAIAEQRRERALVLALALVAFALCAAGVDGEEEGGGPAEAEPAAGQSSLPPGWSGDSGSAHGSSPGGGSWEYGWSWAAGPDGKGGGFGFGYGGSGGEGGGGGGGGGGGGGGSGKAFGFGIGGYKGHHGGFSGGGGSGGGGGFGAGGYGGGFGGALGNGGAAGGFDGEAGNGGGGGGYGGGDGAGGGYGSSGAGDELHGVSGSGDGGEAGYKGKGPSSAGLWSKRGHFRGWRSAHRDGGGNN

SEQ ID NO: 12787 - protein, 209 aa, Zea mays
  VARIANT 103: note = Ancestral polymorphism is S, Derived polymorphism is F
  VARIANT 40: note = Ancestral polymorphism is A, Derived polymorphism is V
MAECEELVESGGAEEDMPRVVAALAGILERVANRNDAAAAAEVSAVAPASAFRATTKPGISVRAYMARIARFAGCSPACYVVAYVYLDRLLRRGRLLALAVDSYSVHRLLITAVLAAVKFMDDICYNNAYFAKVGGISLVEMNYLEVDFLFGVGFDLNVAPETFGDYCAVLRSELLCAEAAPAPLRLQHCCLSEDDAGAGCSAQQQLAA

SEQ ID NO: 12788 - protein, 67 aa, Zea mays
  VARIANT 42..67: note = Derived polymorphism lacks residues 42 to 67
  VARIANT 36: note = Ancestral polymorphism is F, Derived polymorphism is S
MVESGPVTATPNAACGFQESSYGVVEVELVLPNSPFVSPTKEEASYADAVTAAAARNGSRSSPRRVD

SEQ ID NO: 12789 - protein, 208 aa, Zea mays
  VARIANT 1: note = Ancestral polymorphism is M, Derived polymorphism is I
  VARIANT 12: note = Ancestral polymorphism is P, Derived polymorphism is L
MEADIAKPSMAPAEVGIVAGPLPNTAGLEALTGAMDKLEALLRPKEGQSNPVGLKRGTNDKDITAKIKRAMDLSEDLSAHIKKTKDNVAGILNKPQAVATSRRQEPWCRLISQYTMHPTLSIYGALFIIGHGAHHDFRLGESSTASPVCRLKQAKRGALLEVFESKVVCVNGKSLDKAAKVTLNGGDKIIFRSPARHDLAKIGFAAIP

SEQ ID NO: 12790 - protein, 231 aa, Zea mays
  VARIANT 29: note = Ancestral polymorphism is P, Derived polymorphism is R
MQAYMEGGQLLGACCLPGFLVPDHYAAFPLPLPLQLPSQPNDNRLFQMPFDQEEAENHGGMLYSDQCGLYPLPAFGSCSAAAGATAKPTAGFMPSTIGAETKVCTSLTTKGCNESNSTWWKGSAATIAERGKMKVRRKMREPRFCFQTRSDVDVLDDGYKWRKYGQKVVKNSLHPRSYFRCTHSNCRVKKRVERLSTDCRMVMTTYEGRHTHSPCSDDASSGDHTDCFSSF

SEQ ID NO: 12791 - protein, 312 aa, Zea mays
  VARIANT 222: note = Ancestral polymorphism is M, Derived polymorphism is K
  VARIANT 203: note = Ancestral polymorphism is G, Derived polymorphism is V
  VARIANT 51..312: note = Derived polymorphism lacks residues 51 to 312
  VARIANT 49: note = Ancestral polymorphism is G, Derived polymorphism is S
MDGSAGSFVAVRRLSGSDRAAAFHHSSSGASPRLASDLDSSSFVFLHSGCCCSRLTPRDDAYGYGLCCPYAVAAAEVVTGSTAWIGRGLSCVCAQRRDSDARLSFDLTPVQEECLQRLQNRIEVQYDSANREHQEALQSLWCASFPGTELRGLISEQWKEMGWQGKDPSTDFRGGGFISLENLLYFARNYPKSFQELLRKQNGDRAIWEYPFAVAGVNITFMLIQMLDLQSVKPRSLFGAVFLKLLSENDQAFDILYCITFKLMDQQWLDMHATYMDFNTVMKSTRRQLERELLIEDIQRIEDMPSYRLLAR

SEQ ID NO: 12792 - protein, 213 aa, Zea mays
  VARIANT 116: note = Ancestral polymorphism is E, Derived polymorphism is D
  VARIANT 24: note = Ancestral polymorphism is S, Derived polymorphism is L
MAAASAITAVSGVVLPQTFLSHRSPPPQVLAVASSFHRLSLCASHRRITHIIPRADASAEAGEPEPVTTSAESEEEVAEGSVAVAEAEEPTPPSKPKVKFGEIIGILNKQFIEEAEKVKTVPDLRPGDIIELRMQRPNKRRLSLFKGIIIAKHKAGVHTTIRVRRIIAGVGVEITFPVYSPRIKEITVIRHKKVRRAKLYYLKDKLPRFSTFK

SEQ ID NO: 12793 - protein, 198 aa, Zea mays
  VARIANT 4: note = Ancestral polymorphism is N, Derived polymorphism is D
MLLNNCGEPVHRQVIDNGLLPILVKIVKKKTDLPVREKIFLLLDPTQTSLGGAKARLPQLKAAGGRANGDGTRKTRTRDRPRAVPAPEANAELQANIDKRRLITHANAKSKSEKFPPPHQDGALGFPLGCSNHMEPSFEPPNPSPFSTVFPYEKSTVPTWSGPLANSTAGNQKRKHKSGRSSKQPATAHARLYTSFHA

SEQ ID NO: 12794 - protein, 231 aa, Zea mays
  VARIANT 22: note = Ancestral polymorphism is S, Derived polymorphism is L
MASLLRPLVLVLLIASCAAQQSPPAQPPPTPNAPPANSPPQAPPAGNPPPAPQAPPAGNPPPAPTATPPPAPTTPPPAPTTPPPAPTTPPPAPTTPPPAPTTPPPSPPASPPPAPTTPPPSPPASPPPAPATPPPSPPMAPPPATPPPPATPPPPAAPTPAPSVAPTPPPVATPAASPKSPKTPSPAAATSPAPSLSPAGTPTNEDSGASARAVGFATVVALAGAGLAVLL

SEQ ID NO: 12795 - protein, 212 aa, Zea mays
  VARIANT 19: note = Ancestral polymorphism is A, Derived polymorphism is V
  VARIANT 5: note = Ancestral polymorphism is M, Derived polymorphism is K
  VARIANT 2: note = Ancestral polymorphism is A, Derived polymorphism is T
MAAIMAAGLVVLALLAAVAAPAHATDYVVGDSAGWASGVDYATWASGKTFAAGDNLVFQYSAMHTVAEVSSADYSACSASNSIQSYSDQNTKVALTAPGTRYFICGAPGHCGNGMKLAVTVAAAAATTTPETSTSTPAATTTPTTTNADTPNADTPPETSTSTPAATTPPTTTKSTSTSSTSSTGAACGGEARLGMGILAAAAGLAGLALMG

SEQ ID NO: 12796 - protein, 401 aa, Zea mays
  VARIANT 35: note = Ancestral polymorphism is F, Derived polymorphism is S
MAAPGSSELAKNEGDGMTNSLVGLWQRDRVLVFNFSDYLFKLLLIGDSGVGKSCLLLRFADDSYLDSYISTIGVDFKIRTVEQDGKTIKLQIWDTAGQERFRTITSSYYRGAHGIIIVYDVTDQESFNNVKQWLNEIDRYASDNVNKLLVGNKSDLTANKVVATETAKAFADEMGIPFMETSAKNAINVEQAFMAMAASIKDSDYLFKLLLIGDSGVGKSCLLLRFADDSYLDSYISTIGVDFKIRTVEQDGKTIKLQIWDTAGQERFRTITSSYYRGAHGIIIVYDVTDQESFNNVKQWLNEIDRYASDNVNKLLVGNKSDLTANKVVATETAKAFADEMGIPFMETSAKNATNVEQAFMAMAASIKDRMASQPAAANARPATVQIRGQPVNQKTSCCSS

SEQ ID NO: 12797 - protein, 303 aa, Zea mays
  VARIANT 8: note = Ancestral polymorphism is L, Derived polymorphism is P
MLGLRRLPAVSGRLAPEVTSVSAASSHSAVFFRTLQILVQQGPVRLQKLSAPDTGIVELRLERPEAKNAIGKEMLQGLRSAIQEVEADTAANVVLVTSSVPKVFCAGADLKERRLMGPSEVRDFVNSLRSTFSSFEALSIPTIAVVEGVAFGGGLELALSCDLRICGSKDAKFSLPETGLAIIPGAGGTQRLPRIVGRSRAKELIFTGRRFDAVEAVTMGVVNYCVPAGDAYQKALELAREINQKGPLAVKMAKKAIDQGAEVDLPSALAVEEECYQQVLHTEDRLEGLAAFAEKRKPIYKGK

SEQ ID NO: 12798 - protein, 229 aa, Zea mays
  VARIANT 46: note = Ancestral polymorphism is P, Derived polymorphism is L
  VARIANT 74: note = Ancestral polymorphism is T, Derived polymorphism is K
MGKRWIPLEANPDVMNQFIWGLGVSERAVQFCDVYGLDDELIALVPHPVLAVLFLYPFTSLDEENKEESSVSAKSTAGGKDLSKKVYFTKQTIGNACGTIGVIHAIGNATSQIKLVEGSYFGKFYKQTADMDPVQRAAFLEEDDEMEDAHSIAASAGDTNINLDVNVHFVCFSCVDGELYELDGLKSQPTPHGPSSPETLLQDAAEVIKARIAENPNSMNFNVMALSKK

SEQ ID NO: 12799 - protein, 282 aa, Zea mays
  VARIANT 162..282: note = Derived polymorphism lacks residues 162 to 282
  VARIANT 142: note = Ancestral polymorphism is K, Derived polymorphism is N
  VARIANT 140: note = Ancestral polymorphism is W, Derived polymorphism is C
  VARIANT 139: note = Ancestral polymorphism is P, Derived polymorphism is S
  VARIANT 137..282: note = Derived polymorphism lacks residues 137 to 282
  VARIANT 135: note = Ancestral polymorphism is V, Derived polymorphism is M
  VARIANT 134: note = Ancestral polymorphism is G, Derived polymorphism is R
  VARIANT 133: note = Ancestral polymorphism is R, Derived polymorphism is H
MDSIRHHLLDEPAAAATASAAPRPVYCRSTSFGSLVADQWSESLPFRPDDADDMVVFGALRDAFSQGWLPDGSFAAVKPEPLAFPDSPYERGSYPCLGGFLLAEGPETPTEAATTPGSEEEAAAAVSRGKHYRGVRQRPWGKFAAEIRDPAKNGARVWLGTYDSAEDAAVAYDRAAYRMRGSRALLNFPLRIGSEIAAAAAAVAATAPAAGDKRASPEPTASSDSSPSASSATPKRRKRGEAAAATMAMALVPPPPAAQAPVQLTLPARPWFAAGPVQQLVS

SEQ ID NO: 12800 - protein, 458 aa, Zea mays
  VARIANT 161: note = Ancestral polymorphism is D, Derived polymorphism is G
  VARIANT 57: note = Ancestral polymorphism is Q, Derived polymorphism is R
MYRGGLDRFKKAQTLEPFSVKSESGTKKAPAAAGTAKALAPLTLPLDSNFVPGQNHQSPQGTISRVAGQDGDAPGHVGTQVGGGQSTWQPPDWAIEPRPGVYYLDVVKDGEVIDRINLDNRRHLFGRQVPACDFVLDHQSVSRQHAAVIPHRNGRLKFGMDSIILVLHLNNFYGLCICRPAARFTTNHISMLFQFSIYVIDLGSVHGTFVANERLTKDNPVELEVGQSLRFAASTRTYILRKNAAALFPTPSLPSDVSLPSPPDPNDEDAVVAYNTVLNRYGISKSDILSSSKDSSGGASSANDGKHAVERLLKRGKKRRVSFRDQVGGELIQVVGISDGADVETEPGPIGVKEGSLVGKYESLVQVTVIPKGKEQASRKECTSTSPSGVTDKLQEVLKKVKSATRPGIYDDLYGDSVPAKVGSSWAYKSDDQPVEEKTRGMNLNMNSADDSDDLFGD

SEQ ID NO: 12801 - protein, 163 aa, Zea mays
  VARIANT 103: note = Ancestral polymorphism is R, Derived polymorphism is C
MRGPRRAGRQLQPPQRRPARCRRRRRRRRGRQGQAHHLEAPRRRVTVGRFAGGSRPDERELPMVYTEMEGEFNFNSGHAPRRISWGARQAAATDRGTVRRFLCSVFACFGRGHAPSAAVARAMPELNDDDVVSDHSAAFIHGSRSWSTSWRLKDGRADAMVQR

SEQ ID NO: 12802 - protein, 329 aa, Zea mays
  VARIANT 17: note = Ancestral polymorphism is E, Derived polymorphism is Q
  VARIANT 33: note = Ancestral polymorphism is A, Derived polymorphism is V
  VARIANT 34: note = Ancestral polymorphism is A, Derived polymorphism is V
MDFSGEIDDFSLQLIREQLLGGEASLPIVTNAAAYSASVVHHPTQAEFHQPAAFLPQPSHVAYVDLTNEYAADATVASAGGEAAFRAEPVMIRFGGEPSPVSDPSRRPLLTISLPPASHAWGPAAVPLEAPGAAALDANDFRKYRGVRQRPWGKFAAEIRDPKKRGSRVWLGTYDTAIEAARAYDRAAFRMRGAKAILNFPNEVGTRGADFLAPPPPPPQAAATSQNKRKLMHDAEATATAGAGAGAEPAKSVKAEASGSPASSLSPATTTTPASTVTTCSPSSDAGAGHEMFPVTPSSWTWEQLEGVFGILSPLSPHPQLGFPEVTVN

SEQ ID NO: 12803 - protein, 249 aa, Zea mays
  VARIANT 133: note = Ancestral polymorphism is V, Derived polymorphism is I
MAAALSGTAVSTAALLAPIRAPTSAFIRRSQLTCHRLHSLKCRRAGSIVPAAAAAAAGSSSPSSAVFHGECFVVGDNIDTDQIIPAEHLTLVPSKPDEYRKLGSFAFAGLPSAAYPTPFVAPGEESSRYAIIVGGANFGCGSSREHAPVALGAAGARAIVAEGYARIFFRNSVATGEVYPLELTDVGAWKECKTGDVVTVDLANSVFINHTSGKEYKLKPIGDAGPVIEAGGIFAYARKTGMIASKAAA

SEQ ID NO: 12804 - protein, 209 aa, Zea mays
  VARIANT 16: note = Ancestral polymorphism is V, Derived polymorphism is M
  VARIANT 37: note = Ancestral polymorphism is G, Derived polymorphism is E
MGARNSAAATPVLLNVYDLTAANDYLYWLGFGVFHSGIEVHGTEYGFGAHDYPSSGVFEVESKSCPGFIYRRTVWLGTTDMSQEEFRSFIEKLAGDYHGDTYHLINKNCNHFTDDVCQNLTGKPIPSWVNRLARVGSVFDCLLPESVQVSPVGRVPTSRRISDDDLYSIHSPMADKDDNDEDEAKHLLPAPSNDQLSVDVPPKLAKDLL

SEQ ID NO: 12805 - protein, 212 aa, Zea mays
  VARIANT 67: note = Ancestral polymorphism is C, Derived polymorphism is Y
MDGRKSTMAGGSNTSQFPNIDTWNFDGCYYNITEGEDSHHNEHVHELKDAMKMFEGLQNHPFLFTHCWILLRNERKWRERSTATRPGRVVNEDQPTNMFPSSEPEVSISPEGRDSCKRKRANKNTTSADSTACVEVLKRMTKNRELVEVKCDGQYKELLARRDHELDLKEQEMEFKIMAVNIDEVAEEKRAYYRNMQRRIIEKSNKDNNSST

SEQ ID NO: 12806 - protein, 409 aa, Zea mays
  VARIANT 231: note = Ancestral polymorphism is S, Derived polymorphism is F
MEMAGAAEADTPSHEPVRTGRSNTILLPIVGVLFAYLLYRFLRPRLRRGLRLDRHVPFPSGASLPAWLRRRAPSGSAVLPYFAPIADRLGALPYLGPFADRLPHGGGAHALVTFPGGEALSVATILEAPGEVVAKSAHSTLYRAAVRSGEAAVLLRFVRPACAVAAEEAYAAARRVGAVSHPNLVPLRAVYVGPRGEKLLVHPFYAAGSLHRFLQEGIEESHRWSIVCNLSLGIAKGLDHLHTGLDKPMVHGNLKTSNVLLDANYECRISDYGLYLLLSPAAAQEMLEASAAQGYKAPELVKMRDATCESDVYSLGVVLLELLAQKERADDDGRPNPRDILLPASFKNLVLERKISDAFSSDLARHCKRSGKEKSLNAFFELATACCSPSPSLRPSTRQVLKRLEEIAR

SEQ ID NO: 12807 - protein, 277 aa, Zea mays
  VARIANT 40: note = Ancestral polymorphism is K, Derived polymorphism is N
MEADALLHAPMTSSSSSSSSSSDSVGGSCVVNGAQELPSNTGKPHKNVKRKRTASPSAAPGGGVAPAPPEAAIADDDCGGRRRKRGSAGTRHPTFRGVRMRVWGKWVSEIREPRKKSRIWLGTFPTAEMAARAHDVAALAIKGRGAHLNFPHLAHDLPRPASTSPADIQAAAAKAAAAAADADVEVEQCESSHAVETPSSSAASSEEVAAASNAEEMSVLFDLPDLLMDLSDGLWSPIWAAAPAAVEEYDGGDSLSEPLLWAHEHCWLDAAAPVQPD

SEQ ID NO: 12808 - protein, 257 aa, Zea mays
  VARIANT 12..257: note = Derived polymorphism lacks residues 12 to 257
  VARIANT 13..257: note = Derived polymorphism lacks residues 13 to 257
  VARIANT 66: note = Ancestral polymorphism is P, Derived polymorphism is A
MTLLVTASFAQCSSLMEEERALSPVSDASTTCSSSGGTGPNSPITSSQSVDDTCGGAGSSSSRKRPRRELKHPTYRGVRMRAWGKWVSEIREPRKKSRIWLGTFDTPEMAARAHDVAALAIKGRAAHLNFPGMSHELPRAASAAPEDVRAAAALAAAMEMESVAPPTPPGDSSHSARNDENEEPAASSSSGNDADNAQSEEQAAPSEHSVLADGHVLDLALFELPDVLLEFGFAPPPPLTSCAYDLSWDEPLLLWEH

SEQ ID NO: 12809 - protein, 144 aa, Zea mays
  VARIANT 128: note = Ancestral polymorphism is A, Derived polymorphism is D
  VARIANT 123: note = Ancestral polymorphism is A, Derived polymorphism is V
  VARIANT 113: note = Ancestral polymorphism is L, Derived polymorphism is V
  VARIANT 100: note = Ancestral polymorphism is A, Derived polymorphism is V
  VARIANT 97: note = Ancestral polymorphism is S, Derived polymorphism is T
  VARIANT 90: note = Ancestral polymorphism is R, Derived polymorphism is Q
  VARIANT 73: note = Ancestral polymorphism is G, Derived polymorphism is E
  VARIANT 54: note = Ancestral polymorphism is G, Derived polymorphism is A
  VARIANT 46: note = Ancestral polymorphism is D, Derived polymorphism is N
  VARIANT 41..144: note = Derived polymorphism lacks residues 41 to 144
MATSALQQTTSFLGQALVSRPAGVDAGSRITMRRTVKSAPQSIWYDPDRPKYLAPFSEQTSSYLTGEFPGDYGWDTAGLSADHETFARNRELEVIHSWWAMLGALGCVFPEVLAKNDVKFGEVVWFKAGAQIFSEGGLDYLVLL

SEQ ID NO: 12810 - protein, 85 aa, Zea mays
  VARIANT 70: note = Ancestral polymorphism is V, Derived polymorphism is M
  VARIANT 60: note = Ancestral polymorphism is T, Derived polymorphism is N
  VARIANT 55: note = Ancestral polymorphism is H, Derived polymorphism is R
  VARIANT 47: note = Ancestral polymorphism is N, Derived polymorphism is D
MMLTVYSRYLCLIFAKNFCSFQTWMHPIFPALFYACDRVIRKFHENDYHSSIVRRPFSITVAPGDNYLTVHIRTLGDRTSKLSIL

SEQ ID NO: 12811 - protein, 128 aa, Zea mays
  VARIANT 45: note = Ancestral polymorphism is Q, Derived polymorphism is L
  VARIANT 40: note = Ancestral polymorphism is D, Derived polymorphism is A
MDGTTVCSMCGDVGFPDKLFRCARCRRRFQHSYCTNYYGAAAPAQAGAGVCDWCLSDDVVSGKKRQYSSASGCSKRHPQVEEADWSTQQPAFPPSSGCSKGAGKVTGSEQAEGGRRPRRYKLLKDVLC

SEQ ID NO: 12812 - protein, 102 aa, Zea mays
  VARIANT 96: note = Ancestral polymorphism is T, Derived polymorphism is I
  VARIANT 75: note = Ancestral polymorphism is K, Derived polymorphism is M
  VARIANT 71: note = Ancestral polymorphism is G, Derived polymorphism is R
  VARIANT 52: note = Ancestral polymorphism is K, Derived polymorphism is T
  VARIANT 51: note = Ancestral polymorphism is A, Derived polymorphism is P
  VARIANT 43: note = Ancestral polymorphism is S, Derived polymorphism is L
  VARIANT 40: note = Ancestral polymorphism is S, Derived polymorphism is Y
  VARIANT 34: note = Ancestral polymorphism is V, Derived polymorphism is M
  VARIANT 30: note = Ancestral polymorphism is F, Derived polymorphism is L
  VARIANT 25: note = Ancestral polymorphism is N, Derived polymorphism is K
  VARIANT 24: note = Ancestral polymorphism is N, Derived polymorphism is S
  VARIANT 17: note = Ancestral polymorphism is T, Derived polymorphism is I
  VARIANT 15: note = Ancestral polymorphism is K, Derived polymorphism is N
  VARIANT 12..102: note = Derived polymorphism lacks residues 12 to 102
  VARIANT 9: note = Ancestral polymorphism is F, Derived polymorphism is C
MFEVVSSGFASQAAKPTEKQVKFNNSQLQFWMQVFIILHSADSDLKMFAVAKRISNKILVELKFLHQIIFGRLQMFYEHNDNKMSYPAMAQLLSNILYYKRN

SEQ ID NO: 12813 - protein, 104 aa, Zea mays
  VARIANT 3: note = Ancestral polymorphism is A, Derived polymorphism is T
  VARIANT 21..104: note = Derived polymorphism lacks residues 21 to 104
  VARIANT 40: note = Ancestral polymorphism is R, Derived polymorphism is G
MVAMAKREQELEEIRAMTTEQMEEEVVDLRGELFLLRLKRSARQEFKNSEFSRMRKRIAPMLTVKREREIEQGINKRLSRKLDRKWKQSIVVRPPPSLRGNKEE

SEQ ID NO: 12814 - protein, 103 aa, Zea mays
  VARIANT 68: note = Ancestral polymorphism is P, Derived polymorphism is H
MAKTYPGRFKIYYVLNQVCVTFFRKFEAHCFQRHLTYTVFLLVHPPENWNGGVGFVSKEMIQSHCPAPAEDIQILRCGPPPMNKAMAAHLDELNYTKEMQFQF

SEQ ID NO: 12815 - protein, 296 aa, Zea mays
  VARIANT 5: note = Ancestral polymorphism is C, Derived polymorphism is G
MAKSCTLLFGTVLVVLLLLVSPIACSRKLAKPTNKHRPRHKPAAVRARSNHTATPSVSDAYGSGGWLSAGATYYGAPDGDGSDGGACGYQTAVGQRPFSSMIAAGSPSLFKEGKGCGACYEVKCDSNAACSGKPATVVITDECPGGVCLAEAAHFDMSGTSMGAMAKPGMADRLRASGILKVQYKRVPCKYSGVNIAFRVDQGSNPFYFEVLVEFEDGDGDLSAVDLMEAGCGTWTPMVQNWGALWRYNSNSGKALSAPFSLRLTSDSGKVLVASNVIPASWKAGGTYRSLVNYYP

SEQ ID NO: 12816 - protein, 258 aa, Zea mays
  VARIANT 20: note = Ancestral polymorphism is A, Derived polymorphism is T
MRLRCCPQAPPNKIKPLPRTISAGARRLCSRRRRAGALLHVAAPDSRPLETVCADSTGQGTKPRFSRPPGSSICVLLSLFSIVDDAMYRDDDKFCLVEMEVRDCELDQYGLVSSDVYVDYLENGRQHCNMGCASASRSIITSPISFLFLLGSYLAREVFASRLGIGRDSIARTGNALALSEQKLNYYTPLKRGARFVVMVRVVQIKGARMVLEHFVETLPPERKLVLEATATVVFLDKDYRPTRVFPEVASKMRLHFF

SEQ ID NO: 12817 - protein, 443 aa, Zea mays
  VARIANT 223: note = Ancestral polymorphism is L, Derived polymorphism is P
MDMGSGSSPVITDPISISPPLLGGLTSNLMPFSVMSGGCSSSPSMSASSRRKIEEVLVNGLLDAMKSSSPRKKHNLAFGQDNSPDEDPAYTAWLSKCPSALASFKQIVANAQGRRIAVFLDYDGTLSPIVDDPDKAFMSPVMRAAVRNVAKYFPTAIVSGRSRKKVFEFVKLTELYYAGSHGMDIVTSAAAHATEKCKEANLFQPACEFLPMINEDWKVVAGLVKQVLEAFPRLKVTNGRMVLEVRPVIDWDKGKAVEFLLRSLGLSDSEDVVPIYIGDDRTDEDAFKVLRERSCGYGILVSQVPKDTEAFYSLRDPSEVMGFLNSLVFGDPSFEKSGKKARNVGEKSVMEDLRPAKIEVPLSQGKESGRHYEMAEGMDVEKNIEDDKGYIDNPDIGDKKGVTMEGDHVEGIRRSSRLESNDEMKIADKATSRAMAKDAFINK

SEQ ID NO: 12818 - protein, 243 aa, Zea mays
  VARIANT 111: note = Ancestral polymorphism is L, Derived polymorphism is F
  VARIANT 69..243: note = Derived polymorphism lacks residues 69 to 243
MPRPPPPGRGTPGARRPIRDFFATWLATLRSPLLPLLRRALSTSSSSGSWDDPLSSAAAAVEAHFQAHWSALDAAARQDPTRVIAAGDWRSPLELPFLWLGDVHPSLLTSLLRTLSPSPRLLAAVDRVDRRIRTAVPAVSDRLRQAQEAFVAAEATGAADVEAFLAELKGVALEANRLRRGVLSDLVAAAGGYQAALYLEALSRFVLSMHDPEASLGSMRWASKWLRQCETEQNQDDEWPVGR

SEQ ID NO: 12819 - protein, 293 aa, Zea mays
  VARIANT 234: note = Ancestral polymorphism is R, Derived polymorphism is H
  VARIANT 197: note = Ancestral polymorphism is Y, Derived polymorphism is C
  VARIANT 193: note = Ancestral polymorphism is P, Derived polymorphism is L
MPEKPPPLRRRPTAAGSWVRSLHCKSMAADDVAARVAAAPKKLLPRAGCGGSSGDTLNHVVVSSKPSRPKPKPKPKPSPEPKTTNKPKPVPVPPSPPPGPLGPVPALTELPAGHSSRQVVEIIFLSSWSSPPPGAPTSSSSTFPGAVVEMLFRVHNPARAVARFEDYRAAVRARAGGASRSAADGNEMMRFTPAPPYGSSAAAAAAAGEDGPRVRTFDGSGGAHASARGPATGRRAMFLCRVIAGRVAEGAGAHAAAAAGKEHFDSVRVGRGGELVVFDRRAVLPCFLIIYKL

SEQ ID NO: 12820 - protein, 1136 aa, Zea mays
  VARIANT 43..1136: note = Derived polymorphism lacks residues 43 to 1136
MPTKTPPSSRARAHLILRFSSSPPTKRPSPPQASAPPPRCQPYSSSRHTLSLSCPDTLFLFFSFLFFFFLLPGAATVAVAPPWIFHQFSGSWIGESGALNSPPPDPCSLIAAMSNTLLRVYPSDLKMPFELRKQNSACLELVNKTDRWVAFKVKTTNPRKYSVRSASGVVPPRGSCGITITMQAPKEMPPDYHCKDKFLVQSIAVEEGTTQKDIVPDMFSKAPGKLVEEFKLRVVYVPANPPSPVPEETEEEDGSLDSDVDHEVSTSNSATGQGNTCRSQTSDDEDDSTSKLELERRYAEENKKIQKELFKIACCRPSAAQMIDDEVNFGNIFDASEEVQVTAKFGPKQRPKTRKTALSSRSAAPNPTEETGDRKVGTFSQVNSSKELTSQERTSLMCPSTESVDIIAGSHSILDTPLEDALTVPQGSLSGASAADRTSQYGEHNDDPSKLATHQENLVVSDINVPPNSSCSKAIDDIVEFGDMCDVQIEEERVTKFQPKVQTKLLKEIAKSRKTNQKVETSTVDVVTQNGKGNNIQTRLHGDPVQDPKSHESVQIPDSEGLLATDNSKGCNLANLNNLLEESVQEETIAKFRSDLQPNLGKASSQVAAIKINVVAVAPIVGVCDSNNDMYKEPKDQETITGPVAWSPQAVHADVDLDNHNEPINPPIDGTQSMFGEVPGTAFTGREKGKSKSVSFALSDVSGIASPIDTNSEMGNIGDSCSDKLTDENLSNSSRHIAEKHSITKDQYSNEQDHEREPLDHAVQQQPKSDVGERASSMKRRCRKKVQKVGTPNHTVDDYFGEDCVEPSLAEEDNDTGDHYTTGNKHKARKKSRGGVEESQQQKAQKNKSKVSSRGRKRTLKDESTEKPEKKLTHRIRQRIPKEVKALLETPREQIKPMKLCASHLRLLQEARERVDPKGIPSGPSSNTRNFQLDDMDDLGYRDEEARFFDNDITEEHVQNATKLNYHSYMNKPARGKWSKSDTDLFYEGLRQFGIDFAMIQQLFPDKTRHQVRQKFKSEERKNPLLVHDAIVHRSGDNLYFKKVIKQLNIEDVVLPDIKSTQKQDGASSERGPGNENVLDDLNEEENSSNWLNEEHDVQMADVEEEHGEQMDDVEEERDLGNDGGDDDLGDVFDWY

SEQ ID NO: 12821 - protein, 136 aa, Zea mays
  VARIANT 28..136: note = Derived polymorphism lacks residues 28 to 136
MASPVVADLPRRPLLLGRHSPHSLPVGCAGEGVRACVRAGGWTGICCWVGRGMALFAVSGARLGVVRPGGSTRSGGERRSAVDLPSLLFRRKDAFSRTVLSCAGAPGKVLVPGGGSDDLLSSAEPVVDTQPEELQI

SEQ ID NO: 12822 - protein, 192 aa, Zea mays
  VARIANT 34: note = Ancestral polymorphism is C, Derived polymorphism is S
  VARIANT 77..192: note = Derived polymorphism lacks residues 77 to 192
  VARIANT 96..192: note = Derived polymorphism lacks residues 96 to 192
  VARIANT 161..192: note = Derived polymorphism lacks residues 161 to 192
  VARIANT 170..192: note = Derived polymorphism lacks residues 170 to 192
MDLSNLFRRKGTNVLALLSKVASDVLDLTEFLHCEISTSTKFDDISSEEKTVAKPRDDRSSRDQTECAAKLVPLLLQKGVLRTNCIDCLDRTNVAQFSYGLAALGRQLHALGLAEAHKIELHDPLVDDLMDFYERMGDTLAIQYGGSAAHNKDRQMVDNAWMTVPTFMDWNTKNRGLLDYSMDFSKIREMCK

SEQ ID NO: 12823 - protein, 128 aa, Zea mays
  VARIANT 1: note = Ancestral polymorphism is M, Derived polymorphism is I
  VARIANT 115: note = Ancestral polymorphism is N, Derived polymorphism is D
MASSKAFFLVALNLVLFTVANACGGGCPTPTPPTPTPPSPSTGGKCPKHALKFAACANVLGLVSAEVGHPPAEPCCSILGGLADLEAAVCLCTAIKANVLGITVDIPVKLSLIINYCGKNLPSGFICA

SEQ ID NO: 12824 - protein, 706 aa, Zea mays
  VARIANT 97..706: note = Derived polymorphism lacks residues 97 to 706
  VARIANT 300: note = Ancestral polymorphism is R, Derived polymorphism is W
  VARIANT 404: note = Ancestral polymorphism is G, Derived polymorphism is D
  VARIANT 566: note = Ancestral polymorphism is R, Derived polymorphism is G
MRAALFGAQRNGAADPIGGGKTLFWPEGKAKTLLEPWSVLDCTRSPSNSTSTLSSSLGSGAEDSTGVAVVSDRSAAAEATKWGAPGEHGGGGGKEDWAGGCELPPIPTGLDMGVVVADSWDAMLGNAAAAAQDQTFLNWFIGAAGDLDQSGPPLPVHHQPLLDNVGFGFPAADPLGFTLDPHLGGVASDMSSPGAVSQTTNSGGGGNKASSAFGLLSPESASFQPPPLPVLFHEGIDTKPPLDTQSPGLLHQYQHQPTPATTFLMSIPSFPSYNQQSPLVHPPAKRHQSIGGDLYLARTRLLPPPPTGQGHAFPPLNGPAPFQLQPSPPLPHGAMKRTAAEAAQQQLLDELAAAAKAAEAGNSIGARAILARLNHQLPPLGKPFLRSASYLKEALLALAEGHHGGCHLKSPLDVALKLAAYKTFSDHSPVLQFTNFTATQALLDEIGGSTSSCIHVIDFDLGVGGQWASFLQELAHCRGAGGAALPFVKLTAFVSAASHHPLELCLARDNIAQFAVDLGIPFEFSAISADMINPAEFISATDDEDVVVVLPTGCSARAPPLPAILGLVKQLAPKIVIAIDHGADRADLPFSQYFLNCFQSCMFLLDSLDAAGIDADSACKIEKFLIQPRIEDSVLGRGKVDNPIAWRSAFAAARFVPVPPSNWAEAEADCLLKRVQVHGFHVEKCGVGLTLYWQHGELVTVSAWRC

SEQ ID NO: 12825 - protein, 131 aa, Zea mays
  VARIANT 13..131: note = Derived polymorphism lacks residues 13 to 131
  VARIANT 53: note = Ancestral polymorphism is R, Derived polymorphism is C
  VARIANT 56: note = Ancestral polymorphism is E, Derived polymorphism is K
  VARIANT 62: note = Ancestral polymorphism is V, Derived polymorphism is I
  VARIANT 67: note = Ancestral polymorphism is S, Derived polymorphism is F
  VARIANT 81: note = Ancestral polymorphism is R, Derived polymorphism is H
  VARIANT 113: note = Ancestral polymorphism is R, Derived polymorphism is H
MRRDAMPPPTAPSASSSSSSLFSGGEQLFESGPSTLVFLPLLLIQGGGMDLSRVGEKLLSSVRSVRSLGLLPPTPVAPPSRPEEFDPIKYILQSIPDEGSDATYFDEQDDILRKAVETYKGKNWKKDRYIL

SEQ ID NO: 12826 - protein, 183 aa, Zea mays
  VARIANT 105..183: note = Derived polymorphism lacks residues 105 to 183
MEGGVGRRMEGAGKAVGGWVGRRMEGAGKAVGGDCGRMALMAASANLHCIAYGDPEQNRAPKPFVDAYNNFLSSSRDKCRNRKVNESRLAEDLEQTWEVLAEPIQTVMRIYGIPEPYEKLKELTRGQAVTKDNMQQIINGLDIPEEVRSKLSKLTPHSYTGPAEDLARDIMKWVDLESGFQIK

SEQ ID NO: 12827 - protein, 177 aa, Zea mays
  VARIANT 96: note = Ancestral polymorphism is R, Derived polymorphism is M
  VARIANT 97: note = Ancestral polymorphism is R, Derived polymorphism is I
  VARIANT 119: note = Ancestral polymorphism is D, Derived polymorphism is N
  VARIANT 151: note = Ancestral polymorphism is E, Derived polymorphism is G
MTSFLTKKNCQAQVSEADMDAMWKHPDVYKEWIKSGERRGNVRFSHDAKNMPYLSRVEVKNFSSRMAAVDYSICAQSEVFVTTQGGNFPHFLMGHRRYLYGGHSKTIKPDKRRLAVLFNNPRIGWTALKRHLLNMRAHSDVKGIEMKRPNESIYTFPCPDCMCRLNRTEHSKSKQSR

SEQ ID NO: 12828 - protein, 79 aa, Zea mays
  VARIANT 50: note = Ancestral polymorphism is P, Derived polymorphism is S
  VARIANT 44: note = Ancestral polymorphism is P, Derived polymorphism is S
  VARIANT 41: note = Ancestral polymorphism is S, Derived polymorphism is N
  VARIANT 6: note = Ancestral polymorphism is S, Derived polymorphism is P
MTLFDSSMQFFYLMPLGNGQPQMKAVLFWTVIKIKECDIYSYNPDSDADPVLEKGAIWSFNYYFYNRKLNRVVSFRCYC

SEQ ID NO: 12829 - protein, 534 aa, Zea mays
  VARIANT 344: note = Ancestral polymorphism is G, Derived polymorphism is C
MEVSTWVMLVAAAAAYMAWFWRLSRGLSGPRVWPVLGSLPGLVQHAEDMHEWIVGNLRRTGGTYQTCIFAVPGVARRGGLVTVTCDPRNLEHVLKARFDNYPKGPFWHAVFRDLLGDGIFNSDGDTWVAQRKTAALEFTTRTLRTAMSRWVSRSIHLRLLPILDEAATEKTHVDLQDLLLRLTFDNICGLAFGKDPETLAPGLPENAFATAFDRATEATLNRFIFPECLWRCKKWLGLGMESTLARSVAHVDQYLAAVIKARKLELAGNGKCDAPAHDDLLSRFMRKGSYSDESLQHVALNFILAGRDTSSVALSWFFWLVSTHPDVERQIVLELCAALAASRGSHDPALWLASPLTFEELDRLVYLKAALSETLRLYPSVPEDSKHVVADDYLPDGTFVPAGSSVTYSIYSAGRMKTVWGEDCLEFRPERWLSADGTRFEPHDSYRFVAFNAGPRICLGKDLAYLQMKNIAGSVLLRHRLAVARGHRVEQKMSLTLFMKHGLRMEVHPRDLAPVIDELRGAGAARPAMAPCCA

SEQ ID NO: 12830 - protein, 265 aa, Zea mays
  VARIANT 238: note = Ancestral polymorphism is A, Derived polymorphism is V
MASSARDIMFRPLKTLTISPALASGVIRQRYQLQQHAPVSGTSKGKAKLKAGQPLKRSTIGAKKGAPSAAGGGGGRGRREAIERIIQISESCLNASTPLRHLPLKERLREAKREELGLVSKERQRELDIAKAKSKAKSKGPGGDDGDRVLMGPPGLDYISLGLVDEEAIPKYELTVEDGRRLAKEYSRVLMRRHRARQTAESMLLTLKKEAIDALPEKLRAAAMVPDMTPFPANRYMATLTPPIEGYIEKVREAAKKHSVKEKLR

SEQ ID NO: 12831 - protein, 194 aa, Zea mays
  VARIANT 84..194: note = Derived polymorphism lacks residues 84 to 194
MAEPRRTRPSTFRCAAATVLALLVVVVVIVLLWLFLHPSKLYFSVDHAGTTGFNFTAAGGLAGAFDLTLRASNPNERASVSYRWVDVGVWYNGTYLAGAHAPGFFQRPGDETRLDVVARAAPDAWVLPRGVEEGMKKERTAGKLAVDVHVVAKVRFRYGVVRTRKYTVRASCPAVPAEFVPPTSFDRVNCHVHI

SEQ ID NO: 12832 - protein, 541 aa, Zea mays
  VARIANT 29..541: note = Derived polymorphism lacks residues 29 to 541
MAMSMAMSKVFTSRHSEHLHHRLVAASSQAAAPRLPLLPRSPGLAAVTVAYRPRLRPASPRSTSSESDLSPTPPSERTMTAWDLASLWVGLVVGVPSYYLAGSLVDLGMSALQGVATVAFANLIVLVTLVLTAAPAVTHGLPFPVLARAAFGVRGAHVPAVIRALIGCGWFGIESWIGGRAIFLLLPSRLKSYQPLLAPVPGLGVAPLEFACFLAFWAAQLGVIMHGMEGIRKLEKLSAPVLIVLTSALLAWAYTSAGGFGRILSLPPRLTGAEFWKVFFPSLTANISFWATVAINIPDFARYARSQADQVLGQAGLPVFMGMFTFAGLAITSATEAIFGHVISDPIELLGRIGGPATTFLAIFGIGLATITTNIAANVVAPANALVSMSPRRFTFAKGAFVTALLGIAFQPWRLLSSSESFVYTWLLGYSALMGPIGGVVLADHYIVRRTALDVDALYSEDSGSPYYFQGGFNVASMVAMAAGVAPIVPGFLHKVGVLPSVPSAFVTSYNNAWFVSFFVAGAVYCLLCNRRGKQEREHYS

SEQ ID NO: 12833 - protein, 311 aa, Zea mays
  VARIANT 219..311: note = Derived polymorphism lacks residues 219 to 311
  VARIANT 202: note = Ancestral polymorphism is R, Derived polymorphism is S
  VARIANT 164..311: note = Derived polymorphism lacks residues 164 to 311
  VARIANT 148: note = Ancestral polymorphism is G, Derived polymorphism is D
  VARIANT 130: note = Ancestral polymorphism is P, Derived polymorphism is L
  VARIANT 109: note = Ancestral polymorphism is A, Derived polymorphism is V
  VARIANT 86: note = Ancestral polymorphism is F, Derived polymorphism is S
  VARIANT 76..311: note = Derived polymorphism lacks residues 76 to 311
  VARIANT 70: note = Ancestral polymorphism is P, Derived polymorphism is A
  VARIANT 43: note = Ancestral polymorphism is G, Derived polymorphism is D
  VARIANT 40: note = Ancestral polymorphism is G, Derived polymorphism is E
MEKMLAVRNKLNFKIKLKLMNTKDVFLSVKVVCQNVESVGFFGWKFYAAELVLALEYLHSLGIVYLDLKPENVLIQDSGHIMLVDFDLSTRLPAPPQEPDAPVTSPKPALLVAAPSPSRGSARNPDYVAPEIIAGRGHDFTVDWWGLGVVLYEMLYGRTPFRGQSRRETFYRVLTKQPELVGEQTPLRDLIARLLEKDPEKRIGARGVKAHPFFCGVDWDRILQVARPPFIPTPPPQDEGEDGDEALDVEKVVCEVFASNDAEGGKAWPVADGGRVGGGDGDGMETGSLGDGDAVSFGIEMPEKRDLRGEL

SEQ ID NO: 12834 - protein, 126 aa, Zea mays
  VARIANT 95: note = Ancestral polymorphism is V, Derived polymorphism is L
  VARIANT 43: note = Ancestral polymorphism is E, Derived polymorphism is A
  VARIANT 31: note = Ancestral polymorphism is T, Derived polymorphism is A
  VARIANT 14: note = Ancestral polymorphism is S, Derived polymorphism is C
MELEAAAAPATTCSWRDGRKLVRCPRLQLDTKTATAIEQSTGASIADSAAAAEGAMRVKIVLSKQQLKQVAAAVAGGGSAAFAALPPALEQLVSLLRRQHAKKQAAAGRRRGRWSPALQSIPEECF

SEQ ID NO: 12835 - protein, 129 aa, Zea mays
  VARIANT 38: note = Ancestral polymorphism is Y, Derived polymorphism is S
MFHNLIGERDSHRHITMEGITEVLAALERIEQQAELTYDQLLMLEANLVFGAFASYDRHRDMRMDIDDMSYEELLALEERIGSVSTALSEEQFTKCLKRSIYTQVALEVNKSTVDDMKCSICQVSGNFT

SEQ ID NO: 12836 - protein, 966 aa, Zea mays
  VARIANT 364..966: note = Derived polymorphism lacks residues 364 to 966
  VARIANT 631..966: note = Derived polymorphism lacks residues 631 to 966
MDQARSKSGLRSHGSGKASSRPGSGTLGSPEEQPMLSDRREVVVKVDGNGNGHAPFSFHGADAGGGGKAGNATSSTHSTATTTPAESRPRSSEANSPRSPPKVWREGSYEFWNNDGGGAGAAATEAFSFKNRPPPQAPQSSSPSMSPTQPPRPEGGGVDPPTRLIGSFLRRQAASGGEVSLDLDLEMEELGRTAQLRSHPSFSSSLERDGRVSFQEPQKSHSTSSCSSDSDTDDGRKRRGDDGEVVRCTSSSTAAGTGPLLRVKTRSRLMDPPPQSQPAPAPAPAPASVPAASPVIDEERKSSGLRTPTKSGRLFSGLMHGNKSGPVGGKSGPMDDDEDDPFVDEDIPDDFKRGKFDALTVLQWLGLFLIVAALACSLSIKILSTKKVLGLHLWKWELLVFVLICGRLVSGWVIRLAVFGVERNFLLRKRVLYFVYGVRSAVQNALWLGLVLASWHFLFDKNVQQETNSPVLPYVTKILFCFLVATLIRLVKTLLLKVLASSFHVSTYFDRIQEALFNQYVIETLSGPPLVDENHVLAEVHELQRAGATIPKELRDAVPTKTVSGQRNIQLSGVMPKGEGSKQLSKEKGEGISIDALHKLNQKNISAWNMKRLMRIVRFGTLTTMDEQIQQATGEGDESATQIRSEYEAKIAAKKIFHNVAKPGSKYIYLSDLIRFMRQEEAVKAMNLFEGAQEHNRVSKRSLKNWVVNAFRERKALALTLNDTKTAVNKLNQMVNVVVGIIVFVLWLLILGIATTHFFVFLSSQLLLAVFVFGNTLKTVFEAIVFLFVMHPFDVGDRCEIEGVQAVVEEMNIMTTVFLRYDNLKIYYPNSVLATKPIMNFYRSPDMGEAIDFSIHVSTPVEKLALMKERILRYIDNKKEHWYPGAMVVLRDVDDTNKLKVSIWLRHTLNFQDMGMRFVRRELVLQEMIKVLKDLEIEYRMLPLDVNVRNAPPIQSTRMPTTWSYS

SEQ ID NO: 12837 - protein, 343 aa, Zea mays
  VARIANT 1: note = Ancestral polymorphism is M, Derived polymorphism is I
MALSSLFITLPIPNVPSPKPRRMLTSRASSDAPAASASFDLRRYWTSLIADVESELDAAMPMQPPESIHYAMRYAVLPGAGKEGAAKRAPPVLCVAACELLGAPRAAALPAAAALEMLHAASLVLVHDDLPCFDAAPTRRGRPSTHAAYGTDMAVLAGDALFPLAYTHVISHTPSPDPVPHAVLLRVLAELARAVGSTGMAAGQFLDLAGATALGEAEVMQVLTKKFGEMAECSAACGAMLGGAGPDEEAELRRYGRTIGVLYELVDDIRSASGNGKMRSNASVLRSLGMDRALGIVEELKAQAKTTADRFAEKYGDRVLPLYSFVDYAVERGFELQDAAATP

SEQ ID NO: 12838 - protein, 182 aa, Zea mays
  VARIANT 40: note = Ancestral polymorphism is C, Derived polymorphism is F
MCAATAPHARNARCDRSAANRTATSATIASQAMISATFSCIKRYFPRIKIIHTSKKVMGQIYIHVMNWFLMVMCIIIVATFRSTNDIANAYGECLPSSRRLKCLTLECYTFYYTDYPINQSNHVPLIDHNINVARLTPLGEPPSPRAAHVATAVGTMVVIQGGIGPAGLSAEDLHVLNLKQQ

SEQ ID NO: 12839 - protein, 233 aa, Zea mays
  VARIANT 140: note = Ancestral polymorphism is A, Derived polymorphism is T
  VARIANT 69..233: note = Derived polymorphism lacks residues 69 to 233
  VARIANT 13: note = Ancestral polymorphism is G, Derived polymorphism is D
  VARIANT 8: note = Ancestral polymorphism is G, Derived polymorphism is D
  VARIANT 4: note = Ancestral polymorphism is G, Derived polymorphism is V
MGEVMIIGILDAGITTIGQINANSKAKGMPPPPVKWKDRCDNNQACNNKLIGFKTFVDTSDTCGNSLLQRASVLGIEYDKAFAVAPKAHLVMYHVCDEECHPKEVRAGMDSAVDDDVDVISMSFNGTEDNMVFHDDVVTAPWYNVVAQCLLYDLTVGEFIPYLCVMSLDADRKCKIVEPTHASCAEIGEIATKDLNYPSIMIFTGNDVWQVEAKQSVTKPYMAQCKWPGPLKI

SEQ ID NO: 12840 - protein, 209 aa, Zea mays
  VARIANT 117: note = Ancestral polymorphism is P, Derived polymorphism is L
  VARIANT 81: note = Ancestral polymorphism is R, Derived polymorphism is C
  VARIANT 23: note = Ancestral polymorphism is I, Derived polymorphism is V
  VARIANT 15: note = Ancestral polymorphism is L, Derived polymorphism is Q
MAVTVEKGSMGEPALLLERSRAITLHGRDRKGRAVVRIVGNYFPARALGGRAEEALRSYLRERILPEIGDREFVVVYMHSRVDRGHNFPGVGAIRGAYETLPAAAKERLRAVYFVHPALQSRIFFATFGRFLFSSGLYEKLRYMSRLEYVWAHIDKEQLEVPDCVREHDDELERRPLMDYGIEATETRCMYDAASMDTSASLHSLRCVS

SEQ ID NO: 12841 - protein, 92 aa, Zea mays
  VARIANT 51: note = Ancestral polymorphism is C, Derived polymorphism is R
MHGLSFLSFQAGVQSIMKHHQRLGFKDANACCGRAGSCNGKAGCTPNATLRDNRHEYLFWDLLHPTHAAAIYNGSIHFAAPINFRQLVEDRY

SEQ ID NO: 12842 - protein, 705 aa, Zea mays
  VARIANT 8..705: note = Derived polymorphism lacks residues 8 to 705
MLMPWPWGSDGLAATTVFLSSAPPRAALKPYHSTTITPAPPQSTLTALAPSQRNLESPARDMADGAGSASGLVEKLAELSTGGAGQNPPPAGEGGEELQLSKNAKKREEKRKKLEEERRLKEEEKKNKARIIYQFMLLFLPLIAVPVMCYISEPWINLAAAAAAASGKPQKASAADDDDMDPTQYYENRLKTLDSLKAAGVNPYPHKFPVGISVVEYIEKYKTLNNGEKLTDATECLAGRIMNKRTSSSKLFFYDLYGGGMKVQVMADARTSELDEAEFSKYHSSVKRGDIVGICGYPGKSNRGELSLFPKKFVVLSPCLHMMPRQKGEGSSVPVSWTPGMGRNIENYVLRDQETRYRQRYLDIMVNHEVRHIFKTRSKVVSFIRKFLDDREFLEVETPMMNMIAGGAAARPFITHHNELNMRLFMRIAPELYLKELVVGGLDRVYEIGKQFRNEGIDLTHNPEFTTCEFYMAYADYNDLMELTETMLSGMVKELTGGYKIKYHANGVTNSPIEIDFTPPFRRIDMIKDLEAMANLNIPKDLASDEANRYLIEACAKYDVKCPPPQTTSRLLDKLVGHFLEETCVNPTFIINHPEIMSPLAKWHRSRPGLTERFELFVNKHEVCNAYTELNDPVVQRQRFEEQLKDRQSGDDEAMALDETFCAALEYGLPPTGGWGLGIDRLTMLLTDSQNIKEVLLFPAMKPQE

SEQ ID NO: 12843 - protein, 349 aa, Zea mays
  VARIANT 16..349: note = Derived polymorphism lacks residues 16 to 349
  VARIANT 30: note = Ancestral polymorphism is I, Derived polymorphism is N
  VARIANT 34: note = Ancestral polymorphism is L, Derived polymorphism is S
  VARIANT 147..349: note = Derived polymorphism lacks residues 147 to 349
MASSSAAESSSRLSDRGTLATPDIVCGLKIQRLLGSARFGASLCPWGVLSWASGGFYAARRSALGLRFMVLLMHVLFVGAVFILDPTLDWRIHGEPWYIGLYGVLVLLTLVQYFYTAGSCPGYVIDVMRAGSMMHATFVNTAALSKQSNSRNGNINSPTSRAQLQKLSTMTPTSSWAQMVMDLYPPGSSSSNLFNNHHCLLGIGLALTAGLFRWYIFEETILCIWTAALCIESLCLDVDKAWWKDFVGVILLAALILILIFLLLLWLFHSYIALTNQTTYEIARRKRIFYLRGVPERVLPFSKGICRNLYDFCCSSQKGYILEAVPPSEELEARAARYTCRDVICCRCC

SEQ ID NO: 12844 - protein, 258 aa, Zea mays
  VARIANT 59: note = Ancestral polymorphism is R, Derived polymorphism is L
  VARIANT 96..258: note = Derived polymorphism lacks residues 96 to 258
  VARIANT 158: note = Ancestral polymorphism is R, Derived polymorphism is P
  VARIANT 235..258: note = Derived polymorphism lacks residues 235 to 258
MVVGFRRTISFPAPRSPAPPAGPSAANNKSVAYRARSASLPCRFHPLVLQLDDDVADLRALVGRLASRASAEAVAEAAARLGRVLASLSGLLHHPQAQDPLRRLGPSPFAERLLDDFLRLADAHGSFRDALVALAALQAEARAALRREDPARLASAARALRRAARDLPRVASSARAVAARPPPADLPSDAAAIAAAVVDAAAAVASASAAVFSGVSSLSVAAATARVEVDATPCWMSSPARFSAPSATPRHAVVTTTS

SEQ ID NO: 12845 - protein, 145 aa, Zea mays
  VARIANT 32: note = Ancestral polymorphism is G, Derived polymorphism is D
  VARIANT 39: note = Ancestral polymorphism is R, Derived polymorphism is Q
  VARIANT 47..145: note = Derived polymorphism lacks residues 47 to 145
  VARIANT 85..145: note = Derived polymorphism lacks residues 85 to 145
  VARIANT 106: note = Ancestral polymorphism is V, Derived polymorphism is E
  VARIANT 117: note = Ancestral polymorphism is P, Derived polymorphism is L
  VARIANT 131..145: note = Derived polymorphism lacks residues 131 to 145
MGRVDLALCPGDSARWEIGSVVGRLHCVVRDGGNVLVFRLDDRRGGWELATAVSVCEILQRPWQPETTFELSDSEDDDEEEATGQAELDHTGAVIAVANRYSRSRVRVPRDDVRLLPFQCGDVEVVLLSGWRVVAFETVTRRRHG

SEQ ID NO: 12846 - protein, 144 aa, Zea mays
  VARIANT 117..144: note = Derived polymorphism lacks residues 117 to 144
  VARIANT 81..144: note = Derived polymorphism lacks residues 81 to 144
  VARIANT 77: note = Ancestral polymorphism is G, Derived polymorphism is E
MPIGSLFVSRLARSSHALPAAAAAAISQAPRPQHIASPIFSGLGAAARDFSSRALWKGAFVDAFLARIKKNRENMNGKKIWSRRSSILPEFVGSTVLIYNGKSHVRCKITEGKVGHKFGEFAFTRRRRPHRTITGKGNQGKGRK

SEQ ID NO: 12847 - protein, 174 aa, Zea mays
  VARIANT 85: note = Ancestral polymorphism is I, Derived polymorphism is T
  VARIANT 113..174: note = Derived polymorphism lacks residues 113 to 174
MKGKADTSKKDEGRLRAGGAAGKRKKAAASGKPKRPPSAFFVFMSEFRQEYQALHPGNKSVATVSHLAPCTPLSLYFFSCAFAGILLVRGCGSGEQGSRGKVACYVRSSLFGWEKQPYVDQAGQKKQDYEKTKANFDKKESTSSKKAKTEDEDGSKSEVDDEDGSSDEENDDDE

SEQ ID NO: 12848 - protein, 269 aa, Zea mays
  VARIANT 217: note = Ancestral polymorphism is A, Derived polymorphism is P
  VARIANT 216: note = Ancestral polymorphism is I, Derived polymorphism is T
MATLSSCSRLSSGTGAAAIRRQPKPTRAGVLFTSRRGSSASVRTAAAAATAAPAAVEQQNTGVSVSLPTWAEFELGRAPVYWKTSNGLPSSPGEGLTLFYNPAASKMAPNDVFGVAFNGGFNQPIMCGGEPRQMTLQVRGKADPPIYTIRIRVPQHATSLIFSFTNGAEWDGPYTLKFRVPKPWQKKPLSFFNEGLADELNREGACDLAIYPDENIAITSCAMDGYLDEGGDRCKLDIVSGCTDPSSDMFDPLATVDDGSCPLESDSEE

SEQ ID NO: 12849 - protein, 352 aa, Zea mays
  VARIANT 267: note = Ancestral polymorphism is W, Derived polymorphism is R
MAAMGWSDLPSELLTDIAGRINELADIARFRSVCSSWRSAARDAVAAPPPQPPWLLLPSSPSRLFFCPREDRIYPNLRLPHPAAEVHHRRPRPHLYASPHGWALAIDPTDLAASLVHPFTGATRPLPPLPFFFAETEDLAWDWSPHGVMASSGEGLLFCAADPTTAASWSPIRALYDCNASSINYAGGKFFVFEEDVCRTTIVDAVTLAIAAVIPAPAVELPAEARVAVAGDELFLLVKSKWMYLFSDDVDFSKAFHVNHRSVNSAWQELTGIGERALFVDSHHGFAVPTAGFGNLESNTIYSVSSKKVNYSVSAFSLETRTSKKLACRLNDQEMAMRGEMPSWIVPRLDEV

SEQ ID NO: 12850 - protein, 215 aa, Zea mays
  VARIANT 101: note = Ancestral polymorphism is R, Derived polymorphism is H
  VARIANT 160: note = Ancestral polymorphism is A, Derived polymorphism is V
MCSHHATAALNCSPHRARAAIHASPPHPSIHGGRRNPSLPHRARSLGPASLAPHHTVVVFLPMPPPFSFPVRRVLPLLSIAGQLSFSPTGFTSANEPRLHRRLLGPAGSSSPTRSHPIHQPGSRVPLPLRTLSSSSFTAAGTSFEKRSIDLVDHGRPIGAVVFMQRGVLKVCLRTTDSIVNTSEIAKAYGGGGKRSSSSFTLRMDEFNIWTSVNS

SEQ ID NO: 12851 - protein, 105 aa, Zea mays
  VARIANT 18: note = Ancestral polymorphism is D, Derived polymorphism is G
  VARIANT 22: note = Ancestral polymorphism is P, Derived polymorphism is L
  VARIANT 23..105: note = Derived polymorphism lacks residues 23 to 105
  VARIANT 41: note = Ancestral polymorphism is L, Derived polymorphism is M
  VARIANT 55: note = Ancestral polymorphism is E, Derived polymorphism is K
  VARIANT 79: note = Ancestral polymorphism is V, Derived polymorphism is I
  VARIANT 89: note = Ancestral polymorphism is A, Derived polymorphism is S
  VARIANT 103: note = Ancestral polymorphism is E, Derived polymorphism is A
MVSTGEAAAESLIKYDEDHGSLWIHESVGKSNVYDDRIFALATVLSSVLVYNLPKTIREADISRLSFAVEIVEEFYVRVKGQDVAFEPAKLLWLIQRDFLRLESS

SEQ ID NO: 12852 - protein, 346 aa, Zea mays
  VARIANT 127..346: note = Derived polymorphism lacks residues 127 to 346
MGGAGGGGRNGAATRRYNRSKVPRLRWTSELHRNFVRAVDCLGGQDKATPKLILQLMDVGGLTIAHVKSHLQMYRSSGQDIRRREVQPRRLGHLVEHYSFAIDEEGGPKEFVCCPHMKRMIKIPNLWHTHRLLPARVNRAEAGPEAAATATATHESVQGNSDMGAPGTRRCGDDYTRAIPIPMGSSSSRSRRITEGLAWQWQSSGAASAARAATAASTLRELGFWVRGTEPFKVRQTGRPMANRLSPVARQLSSKSKEIKCGDDGRFLFGTATRDEAARRHSPSRRPDSIDPKAVAAVSWSSEGGACALPPPLSSTGLSARSGPSGSCVFARQRVNLDLSLSICGS

SEQ ID NO: 12853 - protein, 415 aa, Zea mays
  VARIANT 309: note = Ancestral polymorphism is L, Derived polymorphism is P
  VARIANT 106: note = Ancestral polymorphism is D, Derived polymorphism is Y
MAAPEPEAKLEAVTPSRSYELPPESESDAPASTGTQELKPWEQHAAVINLPRYDYRASGSLLLRSHSGFLITCPIKREKSATKEAIPILEEYHANCCVSEHAEPCDVKNAIKKRKLCSEASGSLEEAVTNGNSSSVSESIGSTGNTSSPQSKVNDNVDRASNLSLVKLSRSGLLFFKFPSGGVHVVEMLTEILHSLRSGKLKSPQWCHRIFPIQETCILSEEDLHATVSKLFLDFSRSKTNEDKPIKFAVAYNRRGIDETEKNSNEGSNQQTLMDREQCFKVVAAAVKSVAENSVVDLRSPEVLTSDILQLQHVYFLFQGICPRVREDPFRLRYSLRCSRFPGYLLDLRWLGCLFSQPNSSRPNLAFVSGLWCLMQKQEKRSEIRWRLVNQSICNGKLPMQFFTCLFVPEYHRLN

SEQ ID NO: 12854 - protein, 165 aa, Zea mays
  VARIANT 45: note = Ancestral polymorphism is L, Derived polymorphism is I
  VARIANT 23: note = Ancestral polymorphism is A, Derived polymorphism is S
MKLLLVDNKITNARDLINVLEEAIRGAYPILIIAEDIEQEALATLVVNKLRGSLKIAAIKAPGFGERKTQYLDDIAILTGATVIRDEVGLSLDKADKSVLGTAAKVVLTKGSTTIVGDGSTQEEVTKRVAQIKNLIEAAEQEYKKEKLNERIAKLAGGVAVIQLM

SEQ ID NO: 12855 - protein, 698 aa, Zea mays
  VARIANT 258..698: note = Ancestral polymorphism lacks residues 258 to 698
MENEVLRLPRILRIIPCCRAQCVGAAGGPPTSSAISIPLCFLSLSLSLSPPPPLSLVESFACRGRSGMEVFGCGTHNDVVDAEYAEVDPTGRYMRYNLILGRGAFKTVYKAFDEVEGIEVAWNQINIDEVMQCPDNLDRLYTEVHLLKSLKHENVMKFYYSWIDDQSKKINVITELFTSGSLRHYRQKHPRVNLKAIKNWARQILHGLDYLHSHQPPIIHRDLKCDNIFVNGNHGEVKIGDLGLATVMQTPRILNLLSINLLLSNVLQSRDKKTRPTGGTPEFMAPELYDENYDERVDIYSFGMCLLEIFTLEYPYSECTNPAQIFKKVSTGVKPAALARISDLQVKQFIEKCLVPASERSSAKELLQDTFLCPDNTHEPAVTKFISPAPKKTVDISLASLHMDVDTLESSHTDSGKENGSVAPHTPVLEFTRTNKNTELKLKGEKLDNNSVSLVLRIADFSGHARNIHFLFYLDSDTAMSVAAEMVEQLELADCDVTFIADFIDLLIVNLIPGWRPVNDAAANSYRRSESELAVNSHQNISKLVPDYALIDGVMRPKDVNASTSCLDSVSSATNLGGSQGSEGSVISVQLAESSKSVSDYGAEDYGTMDCGGYKDGISTLDCSHVLDNGSRSIFHIDQASPFLELASCGSSTSTDNQDVMNGELVFIEAQYKHLVDELTRMREEAREGARKNWLPDT

SEQ ID NO: 12856 - protein, 794 aa, Zea mays
  VARIANT 32: note = Ancestral polymorphism is V, Derived polymorphism is L
  VARIANT 82..794: note = Derived polymorphism lacks residues 82 to 794
  VARIANT 100..794: note = Ancestral polymorphism lacks residues 100 to 794
  VARIANT 106..794: note = Derived polymorphism lacks residues 106 to 794
MAEALGALCRAGGWSYGAIWRPDRRDPRLLTVGECHCEDEARKVVDKMVNQVHVVGEGYGKMIFFMFDSTDVLRVFLVDISWCLQNVLCSIEDVLQTTCRQCHVFYCSLIGRTLISGEHQWISDDIPFSFSQISDEDNLGLCQTIAVVPMPAFGVAQFGSMQKVSESLQFLDQVKGATFLMESLSWSPSTKDAQKDAFMYNPQFQLDSSTTREGLPRTKAEPENSRLENAISIDSLKNFAITSNGLNPHVVAMPVNSKSISTVKLIQSDSNLRYNNISENAQQFKSAKQPDSSWASAATCFSNLTNLQRIERGLSCTPNKLRHCLQSEKSSGFLDSYSSIVSTDAELKCTLFDNATPFVQSDVIQEVGTSGSTRACGLHELPNEIWAEIASGEMKPVIKEVNENNGFLESTAFDPVMNDWWGDTALLAGNTSHLSATTMNSVSGQASSEQLSIEDRGLFSESVFEELLGFDGNVGPVMDSTEPLAGFVSGCHLPRYNLQGSLSVCKAQVPPLILPSGSCTSENVVMGSSKEAPVSLQNLSMDDCGSLNTASSKISQVKKPEGEKVVKKRARPGESTRPRPKDRQQIQERVKELREIVPNSAKCSIDALLDRTIKHMLFLQSVTKYAEKIKQADEPNMISKDNGSVLNDNSHGVVLKDNPSGGSNGGATWAYEVAGQTMVCPIIVEDLAPPGQMLVEMLCEERGFFLEIADTIRGFGLTILKGLMELRDGKIMARFLVEANKNVTRMDIFLSLVQLLQQNSRNRSSDQLVKVMNNGIPSFVDHQQSPASIPVWPC

SEQ ID NO: 12857 - protein, 1099 aa, Zea mays
  VARIANT 22: note = Ancestral polymorphism is I, Derived polymorphism is S
MAITPQTMVLLSLLLSLSSLPIALALAEAGAESEDTAALLAFKAAAVGSSSGTSGAVLASWNGSGAGPCTWDGVKCSRIGRVVALRLRSLGLSGTLSPAVGNLSSLRELDLSSNWLRGEIPASLGRLRRLRTLDLSVNTLSGAVPGNLTACTSLRYLNLGSNRLSGHVPAGLGGALARLEVLWLTNNSVTGALPASLANLTSLRQLGLGLNALDGPIPPELGRNMARLEYVDLCHNHLRGEIPAPLYNVSSLASLDVGQNALHGGIPAGIHVQLPRLRYLALFENHFSGAIPPTISNLTQLVELELSENRFSGLVPRDLGRLQDLWKLLLDDNMLEAGDKMEGWEFMESLANCSKLNLFGLGGNDFTGDLPASVAKLSTTLEWLYLENLAISGSIPSEIGNLVGLKVLVLTDTDISGAIPDSIGRMENLVELHLDNNSLSGPVPSSVGNLTKLMKLSASGNSLGGSIPRNLGKLTDLTSLDLSSNHLNGSIPEETFQLQSLSLLLDLSHNSLSGPLPPNVGRLANLNTLRLSGNQLSGQLPAGIRDCVVLEELLLDSNSFQGSIPEALGDIKGLRVLNLTMNGFSGAIPDALGSIRSMQQLYVARNSLSGPIPADLQNLTSLSDLDLSFNDLQGEVPDRGFFRNLPRSSVAGNENLCGGMPRLRLHPCPTSASGKNSRSKRWPPLKHVEMALATVGAVVFLASLLAAATQLVVCRSRKQRRQQTKRQPLGAPAATGERYERVSYKELSEGTKGFSDANLLGRGSYGTVYRCVLSRLTDDGGRTVAASAAAVAVKVFDLERSGSTRSFVAECEALRSARHRCLVRTITCCSSVDRQGQEFKALVFELMPNGNLSRWLHPSPNEADPESTLSLIQRLDIAVDVVDALDYLHNHCRPPIVHCDLKPSNVLLAQDMSARVGDFGLSRILSDSDSACRAKAADPNSSSVIGIRGSVGYVPPEYGEGSGVSTLGDVYSLGILLLEMFTGRSPTDDAFGDSLDLRGFSEAGFPGRILEIADPNLWAHLPDTVTRNRVRECLLAVIRLALSCSKRQPKDRTPVRDAATEMRAIRDEAYLMMLAGSVVVRMEGEVVGGAVAPSLTSQS

SEQ ID NO: 12858 - protein, 291 aa, Zea mays
  VARIANT 51: note = Ancestral polymorphism is C, Derived polymorphism is R
  VARIANT 76: note = Ancestral polymorphism is C, Derived polymorphism is R
MATGDDAVGTRKGGAGTGGAAGGGGTPTTQTQQQQQQTPPPPEQGVSCPRCDSPNTKFCYYNNYSLSQPRHFCKTCRRYWTKGGALRNVPVGGGCRKNKRSRSAAAARLSLNLPLEAAADQQAARLGFLGAAAHPVLSSSSIGGGGPAADYHQPQQQRLATMLLGAPPSSAAAAHADDDDGAARAAAHVGGGAFLQVAPGPSPGMEATGTVPPPVATSSWFMDSSCYDVLPSSPAAHANTAAAAAAVGASDCNVVNSGGGDNATSRNSSNCCGPGSAIPPWGDMSTFAMLP

SEQ ID NO: 12859 - protein, 376 aa, Zea mays
  VARIANT 315: note = Ancestral polymorphism is A, Derived polymorphism is D
MACLFQLGAYLGDEVIDCYINLIKTKQQLKCRSGGRVHIENALQFNFLKRDSDVKTKTDELYLITDMTQICSAERRVLLHLDHDMVFIPINIRGMHWYLTVINARNIEIQVLDSLGTTFDRNDLTDSIKGQQRQINMVSQRKELKDHSSSCGLFILNYIEYWTGDELSDSFTQDDMSHFRKKKLAAILLSSYMNKRRGYLIYKYDKEVHTGSPSDVEILDSPTNHKKRKLLHVLDNSEVLREDEDGLITQADLQRWFVDEWDKRTHTKVSMDGCTDDFLMSGLFTKDMPVTKADLIDVLCDYIMAIQDDRTLESAVFAFRLMMVQSLVNFLLATIFIGFASINGCTSMPHAPYASTMFGKTLAEVAVKKYKSLWES

SEQ ID NO: 12860 - protein, 429 aa, Zea mays
  VARIANT 218: note = Ancestral polymorphism is E, Derived polymorphism is D
  VARIANT 43: note = Ancestral polymorphism is P, Derived polymorphism is L
MEPLLCAAVWAVTLAVAMAWAYRYGNIFKTSIVGRSVVVSADLLNYYVFQQEGKLFESWYPDTFTEIFGRDNVGSLHGFLYKYLKTLVLRLYGQENLRAVLLAETHRACRASLASWATRPSVELKDAISTMIFDLTAKKLISYEPSKSSEDLRKNFVAFIRGLISFPVDIPGTAYHECMQGRKKAMKVLRTMMRERMPHPGRQNEDFFDVLIEELRREKPVMTEAIALDLMFVLLFASFETTALALTLGIKLLAQNPRVLRALTEEHEAIVSSRKDRDAGLTWAEYKSMTFTSQVTLEIVRLANIVPGIFRKALQDIEFKGYTIPAGWGVMVCPPAVHLNPEIYEDPLAFNPWRWQDKVEITGGTKHFMAFGGGLRFCVGTDLSKVLMATFIHCLVTKYSWRTIRGGNIVRTPGLSFPDGFHVQLFPKN

SEQ ID NO: 12861 - protein, 414 aa, Zea mays
  VARIANT 31: note = Ancestral polymorphism is L, Derived polymorphism is H
MGVRSAATKLHIPPSAARRPTFLPFVAVTLLCSASYLVGVWQHGGFASPSDRTAVSIATAVACTNTAATPKRRTRSRASSSSSGPPPLDFSTRHAAAALDAGTASSGGSSSSSSSAAPRRRRYPACPAKYSEYTPCEDVERSLRFPRDRLVYRERHCPASERERLRCLVPVPAGYDKMEACITPLPEVSSARDVAGGAVKKWPQRLTAVPPRVSRGTIKGVTARSFAQDTALWRKRVRHYKSVISQFEQKGRYRNVLDMNARLGGFAAALASAGDPLWVMNMVPTVGNTTTLGAIYERGLIGSYQDWCEGMSTYPRTYDLIHADSVFTLYRNRCQMDRILLEMDRILRPRGTVIIREDVDLLVKVKSLADGMRWESQIVDHEDGPLVREKILLVVKTYWTAHEAMTKISSRTVK

SEQ ID NO: 12862 - protein, 242 aa, Zea mays
  VARIANT 209: note = Ancestral polymorphism is S, Derived polymorphism is L
  VARIANT 178: note = Ancestral polymorphism is R, Derived polymorphism is C
  VARIANT 166: note = Ancestral polymorphism is P, Derived polymorphism is S
  VARIANT 162..242: note = Derived polymorphism lacks residues 162 to 242
  VARIANT 145..242: note = Derived polymorphism lacks residues 145 to 242
  VARIANT 51..242: note = Derived polymorphism lacks residues 51 to 242
  VARIANT 16: note = Ancestral polymorphism is P, Derived polymorphism is L
MAPPQSQTATATSTTPSRLLRASCSRALLRLRESRTLESRLLCAATRAARQIRKPRLPITPFHPWRRHAGSNPNLDIKHISIAGTIGNLTLRAYEEDCEFADPAGSLRGLRRFKRNCTNFGSLLEKSNMKLTKWEDLEDKSIGHWRPIMSGDWSLVEVSQNQGLIPAGPSMLLLSLVRRLFLCVFCSGPDTVFTVVPLFQQSGTRNTTSVLNGGRHVENWNVRKMALLRQIFRPSRWVWEKR

SEQ ID NO: 12863 - protein, 113 aa, Zea mays
  VARIANT 90: note = Ancestral polymorphism is P, Derived polymorphism is L
  VARIANT 65: note = Ancestral polymorphism is P, Derived polymorphism is L
  VARIANT 37: note = Ancestral polymorphism is T, Derived polymorphism is M
  VARIANT 23..113: note = Derived polymorphism lacks residues 23 to 113
MACKTKSLLLALCVAALISAQSESHGLGDFTSGEATTTPEMQTFFKPQAAAALPEALDASMVAKPEATALPAAAATTTGATAPSATPRRPVSVVAGVAVVAVAGIADRPDAVA

SEQ ID NO: 12864 - protein, 278 aa, Zea mays
  VARIANT 100: note = Ancestral polymorphism is G, Derived polymorphism is D
  VARIANT 113: note = Ancestral polymorphism is R, Derived polymorphism is W
  VARIANT 118: note = Ancestral polymorphism is G, Derived polymorphism is D
MAEKQPPAPHSPSPAVQVQPAGPAAGGHSHHQAASASASGPASPHSPSPVVQQGDGTSSARAAAITAPPMATTTATSSGEPSPRSSGKHAFYRGIRCRSGKWVSEIREPRKARRIWLGTYPMAEMAAAAYDVAARALRGADAVLNFPGAIASRAAPASASPEDIRAAAAAAAAAAQLEYSHQGRTANPPPPPASPPSPAAAAAQDWHQQHDAAASYTPQQEAGTDEFMDEEAIFEMPQLLRNMAAGMMMSPPRLSPDTSDESPDPSEAGESLWSYRDP

SEQ ID NO: 12865 - protein, 231 aa, Zea mays
  VARIANT 72: note = Ancestral polymorphism is V, Derived polymorphism is A
MDAAGSFSDYSSGTPSPVAGGGGGDDFGSSSYMTVSSAPPKRRAGRTKFKETRHPVYKGVRRRNPGRWVCEVREPHGKQRIWLGTFETAEMAARAHDVAALALRGRAACLNFADSPRLLRVPPTGSGHDEIRRAAAVAADQFRPAPDQGNVAAEEEAADTPPPDALPSVTMQSVDDDPYCIIDDRLDFGMQGYLDMAQGMLIDPPPMAGSSTSGGGGDDDDDDGEVKLWSY

SEQ ID NO: 12866 - protein, 117 aa, Zea mays
  VARIANT 17: note = Ancestral polymorphism is I, Derived polymorphism is V
MSVNGAERDEQKWKNIIFEAGFSDYKTILVLGVRFIIEDGRVLNASLDTILGPSNLLDPNASFAQMWQKMIVSPIVSTPVFSKVPEKKKTEWNSKFGGRSSGIHIYLVRLNVSLKLK

SEQ ID NO: 12867 - protein, 1109 aa, Zea mays
  VARIANT 270..1109: note = Derived polymorphism lacks residues 270 to 1109
  VARIANT 608: note = Ancestral polymorphism is T, Derived polymorphism is M
MALSYLEAVLCFMILMFIFETYLDIRQHRALKLPTLPKPLLGVISDEKFERSRAYSLDKSYFHFVHEFVTILMDTTILYYRSVPWFWKKSGELVTNVGLNAENEIIHTLAFLAGAMVWSKITDLSFSIYSTFVIEARHGFNKQTIWLFIRDMIKGVLLFMILGPPIVAAIIYIVQIGGPYLDIYLFGFMFALALLMMTIYPIVIAPLFNKFTPLPEGVLREKIEKLAASLKFPLKKLFVVDGSTRSSHSNAYMYGFFKNKRIVLYDTLIQQCTNEDEIVSVIAHELGHWKLNHIVYSFVAVQGYAGKVRLKLRLGVVIIKLYPQLLMFLQFGGYTLLLMFLQFGGYTLVRNSKDLFQSFGFEDQPIITGLIIFQHTRIPIQHLLSFCLNLVSRAFEFQVAMLSLCTPSSPPPPPSPHGTVITPTSSVALLRGAAERRDTALTSALHAALLKSGALRSRQAPLAAANSLLHAYLQCGLLSRALRLLDEMPRRDAATYAPLISAHCRLGAPLDALRAFLDMLAWGCSDEEGVDDVVRPNEFTAAAVVQACGLARDERLARMVHGYLVAGGFCDDPFVLGSLVNMYAKVGDVASARRLLLGLPCRDVVSWTAIVSGCVLNAMLEEALGVFLMMLEDGVLPNNVTMLSVIQACALMGASELFGPVHALVVLLELEHDASVVNSLIMMYAKNGFVEEAIRLFKGFYLKTGSVCSNEDVLAAVLYGCTISGSVKNGEGLHAHTIKMGAFPSISVENSLMGMYARFEQIDAALLVFEGMEVKDIVSWNTIISCLAKTDRVNEAMDIFSVLHAAAGGGLAPDFVTVLSMLQACSNAGLLHQGQMLHGYVMKSGFVYDVSICNALISMYAKLGRIDFAEMIFERMDIKDLVSWNSMINAYGMHGDGHSALRVFHQLKDAGTPAPNAITFVSVISACSHSGLVSEGHKCFESMGRDHGIEPSMDHYACVVDLLGRSGRFAEAEQFIRDMPVRPDSTIWGPLLAACQLHGNVDLAEKAAKELSALEPESDIWRVSLSNTYASVGRWRDAAKIRSEMRRVGLRKETGWSFVDVGGVEGFKFVSADTRHHDAEKIYSVWHSMNRHMADLAADVHKLNPISAI

SEQ ID NO: 12868 - protein, 237 aa, Zea mays
  VARIANT 55: note = Ancestral polymorphism is I, Derived polymorphism is V
MDDTNNKDRKTREKELLAKEAELNRREKEIKRREDAAARAGVVLEEKNWPPFFPIIHNDIGNEIPVHLQSTLYVAFASLLGLVVCLFWNIICVTAAWAKGSGPKIWFLAIIYFILGCPGAYYLWYRPLYRAMRNESALKFGWFFLFYLVHIAFCVYAAVSPSILFVGKSLTGIFPAISLIGDSVIVGIFYFIGFALFCLESLLSMCVIQRVYLYFRGSGKEAEMRREAARSAARAAF

SEQ ID NO: 12869 - protein, 647 aa, Zea mays
  VARIANT 125: note = Ancestral polymorphism is G, Derived polymorphism is S
  VARIANT 132: note = Ancestral polymorphism is S, Derived polymorphism is F
MRPPALRLSALLLFLCLYAAPARSQNATTVTAAPASVEGFNCSVNRTYPCQAYALYRAGFAGVPLNLAAIGDLFAASRFMVAHANNLSTAAAPATGQPLLVPLQCGCPSGSPNSYAPMQYQIASGDTYWIISTTKLQNLTQYQAVERVNPTLVPTNLDVGTMVTFPIFCQCPAAADNATALVTYVMQPGDTYSTIAAAFSVDAQSLVSLNGPEPRTQQFAEILVPLRRQVPGWLPPIVLRNNASATPAAPPPSASPNATVVRNDRNGVVTGLAVGLGVVGALWLLQMLLLACLCRRLRANGRRGDAVLSGDGVEGGVFAKGSSAAAAGGGERFLVSDMSEWLDKYRVFTVEELERGTGGFDDAHLVNGSVYKANIDGLVFAVKKMKWDACEELKILQKVNHSNLVKLEGFCIDSATGDCYLVYEYVENGSLDLWLLDRDHARRLNWRARLHIALDLAHGLQYIHEHTWPRVVHKDMKSSNVLLDARMRAKIANFGLAKTGHNAITTHIVGTQGYIAPEYLADGLVTTKIDVFAYGVVLLELVSGREAADESGEPLWADAEDRVFRGRDERLEARVAAWMDPALAEQTCPLGSVATVVSVARACLHKDPSKRPSMVDVAYTLSKADEHFADYSGESVSVDGSGEIAAR

SEQ ID NO: 12870 - protein, 277 aa, Zea mays
  VARIANT 44: note = Ancestral polymorphism is A, Derived polymorphism is T
  VARIANT 155..277: note = Derived polymorphism lacks residues 155 to 277
MGRGRVELKRIENKINRQVTFSKRRNGLLKKAYELSVLCDAEVALIIFSSRGKLYEFGSAGITKTLERYQHCCYNAQDSNGALSETQSWYQEMSKLRAKFEALQRTQRLALAWGGTWPTECEGVAAARETARMCFVTGKTEKDTTYDGASGRAPQKAVLVHRTLMSKIFATFSWTAQERHLGEMNRQLKHKLEAEGCSNYRTLQHAAWPAPGSTMVEHDGATYHVHPTTAQSVAMDCEPTLQIGYPPHHQFLPSEAANNIPRSPPGGENNFMLGWVL

SEQ ID NO: 12871 - protein, 154 aa, Zea mays
  VARIANT 119: note = Ancestral polymorphism is A, Derived polymorphism is T
  VARIANT 59: note = Ancestral polymorphism is R, Derived polymorphism is Q
  VARIANT 31: note = Ancestral polymorphism is L, Derived polymorphism is Q
  VARIANT 24: note = Ancestral polymorphism is S, Derived polymorphism is G
MGFPPVCCCAPIPKPVVAFCNLLGAIKDAVLLTLAAVGFPHDAARGSADAHQPEEVKTRLPAVEYAQLLAEQQPSPATHAACIVCLDTLEAADEVRRLGNCAHAFHRACIDRWIDLGRTTCPLCRSDLLPSPRGRAGLLGLGRLASRLTRVRVW

SEQ ID NO: 12872 - protein, 68 aa, Zea mays
  VARIANT 1: note = Ancestral polymorphism is M, Derived polymorphism is I
  VARIANT 13: note = Ancestral polymorphism is E, Derived polymorphism is Q
  VARIANT 64: note = Ancestral polymorphism is P, Derived polymorphism is R
MILVAIVAELLEEYTALVARVLEQLLHGAPFPRRMRFLMLRSLPFATPPLPPPPPAHALHVGAPSPPL

SEQ ID NO: 12873 - protein, 242 aa, Zea mays
  VARIANT 194: note = Ancestral polymorphism is G, Derived polymorphism is W
  VARIANT 50: note = Ancestral polymorphism is I, Derived polymorphism is V
MQDLKKKERELMAKEAELNRREQEIKRREEALAKAGVLIEPKNWPPFFPVIHVDISNDIPVHLQRVQYVSFASLLGLVICLFWNILCVTAAWITGNDPRIWFLAVIYFITGCPGAYFLWYRPLYRAMRFTSGTIYDAFTRKDSAFSYGWFFLFYFFHIAFCIYAAVSPPFFYVGRSLAGIFQSIDEIGRHAGVGIMYFMGFALFVLESLLSIWVFQIVYRFFRGKGSEAQMRPDAASRAPPF

SEQ ID NO: 12874 - protein, 220 aa, Zea mays
  VARIANT 119: note = Ancestral polymorphism is A, Derived polymorphism is S
  VARIANT 128: note = Ancestral polymorphism is A, Derived polymorphism is T
MAYLAPATAASSLRTPIYVAASSRRRSFLPAAVKAIASSAHPILSSLRMAASAAVLFAATSPALACTPSVPPPPLTPLTVTVSHDDAIPDASRLFEKLIIETACLARVGRADEARSRLSTAGCGESYARLLAAQVLFVDGKLDEAIAAFEELAREDPADYRPLFCQGVLYLALGREAESESMLERCREVGGDALIIDPSVMITPNVETEFDGEKPEPAKV

SEQ ID NO: 12875 - protein, 181 aa, Zea mays
  VARIANT 67: note = Ancestral polymorphism is S, Derived polymorphism is F
MEAYFLFHSGRAHEFAYAEQEEDIGSPSDSEPPSTSTSRESAGSSAELDDDATSSGSGSGSDRFEMSALMTQLPPFKRGLSRFFDGKSQSFASLAAVGSLEDLPKPARKRLKPSRSCGGALDAHRGRLLSPRRHYCTKPTARTRKAAARSGTLSVLAAGAPRMPPAVARAEGVAAKVLIVS

SEQ ID NO: 12876 - protein, 83 aa, Zea mays
  VARIANT 43..83: note = Derived polymorphism lacks residues 43 to 83
  VARIANT 40: note = Ancestral polymorphism is E, Derived polymorphism is D
  VARIANT 35: note = Ancestral polymorphism is H, Derived polymorphism is N
  VARIANT 33..83: note = Ancestral polymorphism lacks residues 33 to 83
  VARIANT 22: note = Ancestral polymorphism is G, Derived polymorphism is D
  VARIANT 19..83: note = Derived polymorphism lacks residues 19 to 83
  VARIANT 5: note = Ancestral polymorphism is I, Derived polymorphism is S
MIMQILFPTHQIHMNKPSQLLGEHYRNSMKIIRFNVSDLEMRQHMIKTSFVSLLTRNLAMDLKKLLDNDQLPLHQLLRWLRPL

SEQ ID NO: 12877 - protein, 503 aa, Zea mays
  VARIANT 54: note = Ancestral polymorphism is G, Derived polymorphism is D
MDRAPPRGAPRDAVGQRWLGVFAFQAALSTAASALYLTVFSSGRRHPLLGVPSGLLVALAPFLACAATGPLALAFLLSASPHPRPPPLPRRALATSLLAAAGALSVGAAAAMLPEDAGWAAVAGLGFRGAVLGTIFAAHYFVRRRWLLQFPVVQRPLFYGLKMGLLPSGNRALKLSIHAFLLFHFLVFFLPWQFRKGGSVGSQILTEISILIVTAGVSFCLEINYHFVQVAHTRRCSFAPPQSTAAAETNPTEFILETLEQSDPQSLIQYLAYQDLCVVSECNLEPWRRAAFFEESGETYRRIVTACLKPLEEFTSKIAEALEGFSSDQPELMLQQSRLFSAFDDSQICTWCARTLAGLTARSRKEDRYGVAQLTGCNAAVMTTLLSALVAIETCLGKKTNPQPVRSLGPENIRWTNLSTGRKGNGVAIASTQKSGLHKKAYIMADVLRTSVYHILSAFIDDLQANAKPSSLENWISEGRKPVYGSQAVLVQKLILFIEYRAV

SEQ ID NO: 12878 - protein, 449 aa, Zea mays
  VARIANT 187: note = Ancestral polymorphism is S, Derived polymorphism is F
  VARIANT 399: note = Ancestral polymorphism is F, Derived polymorphism is I
MPPVRRVRRLHPAASPYPTDRRAEAKSDHASDGAPPAPATLLPDDVLFAIFSHSSGAADVARCAATCRRWGSVVAARAAAICRALPVPPPPATFLPHLALGVFFPQHKNARAGARLRFVPTAAALSSSYSRRLLAGPITTGSAVVDLELDLDHARPVASRNGRVVLQLRRAGCLTLCVWNPSTGAVSVLPPLSGEDYPGTDYACAILTSEDLATGPLSTSPGFFRVLVVYERRRRSFTTLRCYSSDTGGWGAEAKKPGDKISGRVLRQLRPAVVLGGVAYWSMRRAAFGVRLDGGTSLSSPATMDVCSVPYQLKLLRLNDHMVGVSPEDGRMRFIVMGFFARKLLAIDLFTSRLRQASGDQIDDDGIMVNVQEIKLPRNCVPNNVKLRWFGEKSGTIIITAGETGSSTSDVFAFNLFTGSVEKLAQGVSNHECRNLYGYEVIPQHSLRP

SEQ ID NO: 12879 - protein, 189 aa, Zea mays
  VARIANT 86: note = Ancestral polymorphism is C, Derived polymorphism is F
MPGKESAPPFDSPTPRWPPPPPLTTPRWPRLLCLLCCVSHSRRCPPPQPAPPPPRGRRLPSSLPHRFPTPFHRASPGSAPKTPPRCPRFLPPTPVACLTPRHGFGMVNPSLRPRIPQPMPPSSPPPLCTTLPPQPAAEVQRQVAKWRRQSPISSTVGSRCQIQVSSHAHQRPDPRRRRPSQPPPPGHDA

SEQ ID NO: 12880 - protein, 74 aa, Zea mays
  VARIANT 53: note = Ancestral polymorphism is F, Derived polymorphism is I
  VARIANT 45: note = Ancestral polymorphism is K, Derived polymorphism is N
  VARIANT 40: note = Ancestral polymorphism is Q, Derived polymorphism is R
  VARIANT 39: note = Ancestral polymorphism is H, Derived polymorphism is Y
  VARIANT 33: note = Ancestral polymorphism is S, Derived polymorphism is T
MKTIFVNFVDLCKTMLRQPEHVMIFLLAEMGTSGLLDGHQRLVIKERFVPKKFEAILRRHITYYLLAQRQPVTR

SEQ ID NO: 12881 - protein, 276 aa, Zea mays
  VARIANT 56: note = Ancestral polymorphism is D, Derived polymorphism is E
  VARIANT 205..276: note = Derived polymorphism lacks residues 205 to 276
MATRSKIYFTMEFVRGGELFARVAKGRLKEDTARRYFQQLISAVGFCHAHDIFHHDLKPENLLVDERGDLKISDFGLSAVTDQFHPDGLLHTLCGTPSYVALEVFACRGTKHIRLLRDALRPPIFAQRLLAAYARSGSLASRHRSRALTIPSPPPSSDLTPPHVSTARADILVHGGWRGWVHHAEAFEALPKEHAANHGKFVALQQSIQSYLGVCGPFLPSPPSHWDLMAVDDGVVMVFVWPMNRIDVERHDGYNKCVPPNGSFAPAPWMLWTLSG

SEQ ID NO: 12882 - protein, 249 aa, Zea mays
  VARIANT 5: note = Ancestral polymorphism is T, Derived polymorphism is A
  VARIANT 27: note = Ancestral polymorphism is R, Derived polymorphism is Q
  VARIANT 36: note = Ancestral polymorphism is I, Derived polymorphism is K
  VARIANT 42: note = Ancestral polymorphism is G, Derived polymorphism is S
  VARIANT 48: note = Ancestral polymorphism is D, Derived polymorphism is N
  VARIANT 53: note = Ancestral polymorphism is I, Derived polymorphism is V
  VARIANT 72: note = Ancestral polymorphism is E, Derived polymorphism is K
  VARIANT 80..249: note = Derived polymorphism lacks residues 80 to 249
  VARIANT 114: note = Ancestral polymorphism is G, Derived polymorphism is W
  VARIANT 154: note = Ancestral polymorphism is E, Derived polymorphism is K
MASLTPGILLKVLKNINSDVKVCGEYRSILLQVISIVPAITGSELWPDHGFFIKVSDSSHSTYVSLSKEDNELILSNKLQLGQFIYVEKRKVVIKEQKTVVASRYMLGVSSNNGKITSLNSSIDSDKSNGGSTISEPNKKFVAPKVRQEAKPQERPNNTSTGNTKSVSTKQEISKDTLKNGGASPSPNGCVVVKKQMPKESKKESATERRSPPKLYKSSPTPAMTSPTKLDPAAKQNGPFASAVNQLSI

SEQ ID NO: 12883 - protein, 506 aa, Zea mays
  VARIANT 438: note = Ancestral polymorphism is T, Derived polymorphism is A
  VARIANT 451: note = Ancestral polymorphism is R, Derived polymorphism is L
MEPAAAAWVPFNFQLANWTALFPGEIYGSWMQTRAPDNSSGSGRQLFEYYAAATQHCPIEEEAQDQSFEVALDLHNLEIDNNDAICVFEKVARNFEADIRRTKEKIHRYPECIRDLGDYYTVPRIVAIGPYHHGKQPLGKAEEVKWVAAYHCIVESGCSPQAMYDAVASAADNARTLYDKDVMAGIGYDDFRVMMFFDACFLVQYIVWFTGLENETDPSSWHNFLHLNRSGINHDVWLLENQLPWSVVEAVMRLRHVNLRKYVEDWRGTLQDRRDLIEKPFVWEDNYDPPHLLGLLRHYAVGRSEKIIDRDLSKEFDSLSFSASAMELAEIGITFRANETAKLVDMGLKKDVLFAELSLAPLSLNHARASRLVNMAAFEICTVPSFIDAKVEDSAVCSYLLLLCMLVHREEDVHELRRQGILQGGAGLTDKQALKFFASLQSLPDGQCCTLTMLEIENYRIHKKMQTKVYKKRKTIFKVLSITVAAITIFGTLLSISAQLSNVSKG

SEQ ID NO: 12884 - protein, 286 aa, Zea mays
  VARIANT 183: note = Ancestral polymorphism is R, Derived polymorphism is G
MTNGFLFREYIGAQFTGVQFSDVPINSKLAFNFILAFAIDYTPVNQHPTPAPTNGVFSPFWDTGNLSPAAVAAIKAAHPNVAVMAGLGGDSVQDIVKAVFTPTSIDSWVANAVTSLTGIINTYGLDGVDVDYEHFSRGADVNTFVECIGRLLTQLKKNMPWITTSIAPFEDPVVQKYYQPLWGKYSGVIDYVNFQFYGYGDNTDVATYVQFYDQQSANYPGGKVLASFMTGNTTGLISPDLGISAAKELQRQNKLPGLFIWSADSSKRSSYGFKYEIEGQQIIANH

SEQ ID NO: 12885 - protein, 347 aa, Zea mays
  VARIANT 116..347: note = Derived polymorphism lacks residues 116 to 347
  VARIANT 134..347: note = Derived polymorphism lacks residues 134 to 347
MACAGAAQKVSAVLYHYPCPDGAFAALAAHLYFSGAAHPVRFFPNTVYDPIRSDSLPLEEIKDVYLLDFVGPPGFVEDIAPKVERITILDHHKTAFESLCVNATLGQNVTKVIDMQRSGATIAFDFFRNKLLTEVSTSRGNESGKDVAKVKYVPDNKAETVHKLFKFIEDGDLWRWKIPNSKAFSSGLKDLDIEFNVNANNKLFDQLLELDPEHVISHGQATLLEKQRLIDDCLEKSYEISLGCGQFGSCLAVDADAISNLRSELGNQLASKSRDFNLRGIGAVVYKVPELNNDQILKVSLRSLEQEDTTCISQEYGGGGHRNASSFILSVTEFDRWKVGSSRPKGA

SEQ ID NO: 12886 - protein, 467 aa, Zea mays
  VARIANT 11: note = Ancestral polymorphism is R, Derived polymorphism is C
MATGETAVDRCKDPLGPRDMDLSGEEHVPKARKPYTITKQREKWTEDEHRRFLEALQMHGRAWRHIQEHIGTKTAVQIRSHAQKFFTKVVGADDDRQGLPTPFLMSELRRVCAKVVRESSSGSNASAGAAPAIQVPPPRPKRKPAHPYPRKVDGAAKKPAPELKLMEKLPPRDRDEGSPTSVLASARTASRAEVLLGSAFANSSSASRSRGLSASGSDERGDGGGSLVSSVAGEHGCASPRTRAPYTKVLVEANEVSDLGPEAPVLKLFGKKVVVKDLKTDYSPAAASVAKASRDRNPIGAAGASSWSPWPGSVQVQQLMYFVPQHDGLAAQPVAPWFGYSGSVPCAVFYPQAVASAQEHQQASEPLDHKRAQTERSLTGSNMASSAASAAQNSDTAQSHHGPGQENTGDGCAALRAAIPRLAKCASSASCSGRGFVPYKRCAAESEAPRPVAPGEEDDGELTRLCL

SEQ ID NO: 12887 - protein, 178 aa, Zea mays
  VARIANT 19..178: note = Derived polymorphism lacks residues 19 to 178
  VARIANT 25: note = Ancestral polymorphism is G, Derived polymorphism is R
  VARIANT 35: note = Ancestral polymorphism is R, Derived polymorphism is Q
  VARIANT 89..178: note = Derived polymorphism lacks residues 89 to 178
  VARIANT 103: note = Ancestral polymorphism is Q, Derived polymorphism is H
  VARIANT 109: note = Ancestral polymorphism is V, Derived polymorphism is F
  VARIANT 110: note = Ancestral polymorphism is K, Derived polymorphism is M
  VARIANT 124: note = Ancestral polymorphism is G, Derived polymorphism is E
  VARIANT 144..178: note = Derived polymorphism lacks residues 144 to 178
  VARIANT 146: note = Ancestral polymorphism is D, Derived polymorphism is Y
  VARIANT 149: note = Ancestral polymorphism is Q, Derived polymorphism is R
MDGGLEDEQEDPSFLKPPQHPSHYGHRHCCRFQRRKIVKEGPKCPKLATIFHRQPVCELGIPPENITANQLLFGTLGEYAGFDPTEPTSRSGGKAKAVQQIKQKMVSFVKCMLGLDAVVWDIIGSSLLEKVVYLLTELDVNITWEDILQDKHNKGIFDMELEDLAEDEHNLGRTSVET

SEQ ID NO: 12888 - protein, 152 aa, Zea mays
  VARIANT 2..152: note = Derived polymorphism lacks residues 2 to 152
MEFTSSYFHAFGNPDLAAVVSGDGGSAQAHRPRRSTDGAKAEDGRSPTTTTARRAPSMFCVPDTEAEEPNGFLDECTLCRKALCGDIFMYRGDTPFCSDDCRREQIDMDRIRHRRKKQQALIAQQQQQQQAAAAAAMAQRDRRTQRQLQPQH

SEQ ID NO: 12889 - protein, 114 aa, Zea mays
  VARIANT 90: note = Ancestral polymorphism is H, Derived polymorphism is Y
  VARIANT 26: note = Ancestral polymorphism is R, Derived polymorphism is H
MMASSSSFSSFFGIEPLDGGDGDAYRRAMDACSLCGKRLAGDRDIFMYRGDTPFCSEECRHHQMARDDFGAALKTEPRPARRGERRRRRHEAPAAAAAEPARVPLAPNVPAVVI

SEQ ID NO: 12890 - protein, 331 aa, Zea mays
  VARIANT 282: note = Ancestral polymorphism is C, Derived polymorphism is Y
MDMPKPPQLAGVSPAAVYFSGGGASGNNRRKRAREAMAPPPAVKEDYVNLFALQQQQQQQQQQSMPFANMALFQNQNRVSSSPSPAATALVSTGLRLAFDEQQQHLLQQQESKQTNALRYSSPPSLFASVSDELAAQAKQHEEEVDRFVREQGEQLRRAVADRLRRHNRAILVKADQSAARRLREKAAEAEREARRGAELEERLARLRGEAAAWQAKALSEQAAAVALHAQLQQAAAAARASVEELTAAAAAGDAGPAESSASAFVDPRRAGPPPDHACLACRLRPASVVLLPCRHLSLCGECFAAGDADAAMPCPVCLCVRTGSVEAILC

SEQ ID NO: 12891 - protein, 178 aa, Zea mays
  VARIANT 6: note = Ancestral polymorphism is G, Derived polymorphism is R
  VARIANT 16: note = Ancestral polymorphism is Q, Derived polymorphism is E
  VARIANT 149: note = Ancestral polymorphism is C, Derived polymorphism is Y
  VARIANT 169: note = Ancestral polymorphism is G, Derived polymorphism is V
MGLAMGRLLGWKKEAQIALLGLGGAGKTAILHKLKLGHAITTGPTIGFNSETLEYNGISFRVWDVGGQGELRPLLRHYLYGVQGVVFVVDSSDREWILRAKDLLNIILDEDQFRNRDLALLVFANKQDRPNVMSAAEIADEFGLPSRLCNRRWHIQSSSAISGEGLHEGMAWLCTNIR

SEQ ID NO: 12892 - protein, 519 aa, Zea mays
  VARIANT 50: note = Ancestral polymorphism is T, Derived polymorphism is K
  VARIANT 166: note = Ancestral polymorphism is G, Derived polymorphism is R
  VARIANT 212..519: note = Derived polymorphism lacks residues 212 to 519
MAYTTSPSTSTSTAAAVAWAFAAATCVKLLLVPTYRSTDFDVHRYWLALTHALPVRQWYTDTSSQWTLDYPPFFAYFSRLLSLPAPLVDATLVSIPVRDATPFAHLIYLRLTVAFSDLLLLGSVLLLARDAQRKQRPFLALALVVWSPALLAVDHVHFQYNGFLIGLLLLSLHFLEQGWDLIGGVVFACLLCSKHLFLVAAPVYFMYLFRHYCCGRGVVKGLGRLVLMGSGVAAVFAAAFVPFVYYGQMQQLISRLFPFGRGLCHAYWAPNFWVFYIILDKILAFLLRRLGFNIAIPEASFTGGLVGDSSPFAVLPKVTPIATFLLVILAMAPCLIKAFSNPQPKHIIRWVSYACTCGFMFGWHVHEKASLHFTIPLALIAMDSLNDARHYFLLSIVSCYSLFPLLFENQEYLIKVLLLLTYAALMWVGFTVHFAAKSDLEGKKISRSGSTVKKNGIIGWIGLSYLLGIAGIELWSQVFHHHVFGDRLPFLPLIMVSFYCGLGMMYSWVWQLVHIVRHT

SEQ ID NO: 12893 - protein, 261 aa, Zea mays
  VARIANT 157: note = Ancestral polymorphism is T, Derived polymorphism is I
  VARIANT 163..261: note = Derived polymorphism lacks residues 163 to 261
MALATNSAAAAAAVSGGAASQSRRAVAFLPLKRRTISAIHAADPSKNNGPVVPAAAGAKSSSSAVATPEKKPAALGNWAVDSWRSKKALQLPEYSNAEELDAVLKTIETFPPVVFAGEARHLEERMAEAAMGRAFVLQGSDCAESFKEFHANNICDTFRILLQMGVVLMFGGQVPVVKDMTHNPPWQELVAKDLHGNECSPDSETNFVIFVTYFEIDPAQCRGDWRLNLEVLLKDVTLIQRVAHGELELNSSLDMIGKYLY

SEQ ID NO: 12894 - protein, 348 aa, Zea mays
  VARIANT 278: note = Ancestral polymorphism is C, Derived polymorphism is G
MGQIVKFGRTLSQIGVSRFDPKSIDALAGNGTLDMCKDDNGNNMLNLNEEIKKRVEEIRVKTKINKKLPKAKAVFLFYIDTCNALQMIVSPVAEWLKGKLMNIMQKGYVKREDKRLQTAQINAALSVAKLSTVVAGTIGNFTFGSNNLSGIAMTERREDTDMKMHAAIMSAAALVAASCAEVAKSAGATREQVSSVINMGMETRALGDLLTLTTSAAACLRGVEGLKMRISNCSLEGRMNNQKDATLFVRTPKGRFHKRIVSVHCKYDNIILTLGKKGHFKSSEKYVIFHEQGEGEEFRYPTDKQSYCAMNLSTSGGTIQLLFEDNEQYNSWRAFISYHMNQGRMLSY

SEQ ID NO: 12895 - protein, 251 aa, Zea mays
  VARIANT 6: note = Ancestral polymorphism is T, Derived polymorphism is I
  VARIANT 7: note = Ancestral polymorphism is G, Derived polymorphism is V
  VARIANT 9: note = Ancestral polymorphism is S, Derived polymorphism is F
  VARIANT 42: note = Ancestral polymorphism is K, Derived polymorphism is Q
  VARIANT 46: note = Ancestral polymorphism is P, Derived polymorphism is L
  VARIANT 47: note = Ancestral polymorphism is G, Derived polymorphism is R
  VARIANT 51..251: note = Derived polymorphism lacks residues 51 to 251
  VARIANT 82: note = Ancestral polymorphism is A, Derived polymorphism is V
  VARIANT 158..251: note = Derived polymorphism lacks residues 158 to 251
MFWRMTGLSAASPVSSPSSEGGTQSAEPQSVSAGGGTGRGGKRRGPGSWLQSIRRLPRGALRWGRNAAASAREPSIPPRGVAVDLSPHGSGGAHAERKPSFRRSCEWTASRGPSRGSLPLQPPRHSWDGSMVGRAFACSFACLEEREPPDGATRSNAEEAVGETRAAAAESTNGGHSTDAGGDADERRLSGRRSCDTGTEMAVSSAGRRRSNRWSRVWDRSITSPLKEFREERGACPRALPLGIEEGDPEG

SEQ ID NO: 12896 - protein, 160 aa, Zea mays
  VARIANT 28: note = Ancestral polymorphism is S, Derived polymorphism is L
  VARIANT 45: note = Ancestral polymorphism is C, Derived polymorphism is Y
  VARIANT 72..160: note = Derived polymorphism lacks residues 72 to 160
  VARIANT 105: note = Ancestral polymorphism is R, Derived polymorphism is C
  VARIANT 112: note = Ancestral polymorphism is S, Derived polymorphism is L
  VARIANT 129..160: note = Derived polymorphism lacks residues 129 to 160
MARAAVDAPPANGGTCCHATKGPGYAMSLETIEKGPREKLVYVTCVYNGTGINKLDYLATMDLDPDSPTYSQVIHRLPITHIGDELHHSGWNSCSSCHGDPSAKRRFLILPSLLWEKPGHSPLFGYDFWYQPRYKTMISSSWGAPAAFRTCFRCNARAFT

SEQ ID NO: 12897 - protein, 599 aa, Zea mays
  VARIANT 273: note = Ancestral polymorphism is G, Derived polymorphism is D
  VARIANT 276: note = Ancestral polymorphism is A, Derived polymorphism is V
  VARIANT 321: note = Ancestral polymorphism is A, Derived polymorphism is V
  VARIANT 470..599: note = Derived polymorphism lacks residues 470 to 599
MGSGASRLLTACACSRPPPAPADDGPCLDDALGHSFCYAASSAAAAAAGHSSSFRHAISGAALSANSSVPVPIYQSSVAGGMPPQYHSAFHTSSSFSSAPLQLSNLSSGPLFLSGPIDRGAQLSGPLDQAVPFSGPLPAKPTKPARPSSSRGFSRRFRKPSFGSLRRSISEKNRPCVVPLRREDGVQWAHGRAGEDRVHVVVSEDQRWLFVGIYDGFNGPEAPDFLVANLYRFLLRELRGIFYKEADPESKRLWQFLADGEDEDSELDFSGSGRFALSLARLKEQRHPLWAHAAAAGDGQSGREWGVKRLTAAPAVRDHRAVLSALARALATTESAYLDMTSQSMGSHPELAVTGACLLVVLLRDDDVYVMNLGDSRAIVAQRRDDEDCLIGSIPVEDIGVGLEIETRIPGYSAIGLEALQLSTDHSTSVEEEVQRIRREHPDDDQCVVNDRVKGRLTVTRAFGAGYLKQARFNDGLLEMFRNEYIGDTPYISCTPTLCHHKLSIRDQFLVLSSDGLYQYLSNEEVVLHVENFMERFPEGDPAQSLIEELLSRAAKKAGMDFYELLDIPQGDRRKYHDDVTIMVISLEGRIWKSSGTYV

SEQ ID NO: 12898 - protein, 425 aa, Zea mays
  VARIANT 217: note = Ancestral polymorphism is E, Derived polymorphism is D
  VARIANT 224: note = Ancestral polymorphism is D, Derived polymorphism is N
MEEEPPHLFLCPISMELMDDPVTVSTGVTYDRRSIERWIFGCGRTTCPATMQSLANLDLTPNHTLKRVIGSWLDRGSPSTSASASPSASSLSSPAHELATPLSRILEAERLRSALAGLDETPFKVTALKNMRACMAGDVAMQCEFVSSGGIQAAGRVMAQALAESGAGGDFSAFTACEEAAAVLALLPLADAASVGLLLAPEHMRPLMALLQRGSAEARLHAMDIVTKISNAGAGDWTARVEVDDVLKSLLELLADEVSARLSSRALDVLLDVVELSRVGPTKAVEVGAVHVLVELLANADDRHDAERILLLLKRLCKCPEGRTAFAEHDLSVAAVAKTMLRVSELATQLAVKVLWLVSVVAPSEKVLEDMVLTGAVAKLLGLLHVESPPATKQKTVRMVRINGVFWRQYPCFPTDLRDYLRLLD

SEQ ID NO: 12899 - protein, 447 aa, Zea mays
  VARIANT 200..447: note = Derived polymorphism lacks residues 200 to 447
  VARIANT 217: note = Ancestral polymorphism is P, Derived polymorphism is L
  VARIANT 236: note = Ancestral polymorphism is I, Derived polymorphism is T
MASPASASLKEAVGSLDRDGFVGLLSNLIGETAHLQNDPPTYRPQEERVAQHVVDVLRPVSADTGGGPLLVRKISYAEGRSNVIVEYPGTVPGRVVSFVGMHMDVVPANGSEWDFDPFSLTFDSEDKDKLRGRGTTDCLGHVALVAQLMRRLGEVKPPLKHSVIAVFIANEENSSVTGIGVDGLVKDGLLDKLKTGPLFWIDTADKQPCIGTGGMIPWHLKATGKLFHSGLAHKAINAMEMNMEALKVIQKRFYTDFPPHEKEKVYKFATPSTMKPTKWSYPGGGLNQIPGECTISGDVRLTPFYSTSHVMEKLKEYVEDINERFETVLDTRGPVSKYILPDENLQGRLEITFDGDVMNGVACNLESRGYHALCKATKEIVGHVEPYSITGSLPLIRELQDEGFDVQTAGYGLLKTYHAKNEYCLFSDMAQGFQVFLSIISQLEEEV

SEQ ID NO: 12900 - protein, 1465 aa, Zea mays
  VARIANT 195..1465: note = Derived polymorphism lacks residues 195 to 1465
MTRAAAEAAGEVVVEEDLPPSCDPQTQARWYQLEALERALAGNTLVFLETGAGKTLIAVLLLRRFAHRIRSSPPPSFAVFLVPTVVLVNQQAGVIKEHTDLRVAQFYGDMGVDFWNADTWRGRIDGAEVLVMTPQILLDNLRHSIFRLRDIPLLIFDECHRATGNSPYACILKLQVLRLRQPVAHLYQFRRSYDCMCTGEFYHPQLNSRPSDSIPTIFGMTASLIARNLALDKYSEEISEFENLMNAKVYTVASESALLQYIPIATTKIVEYDDYIVTSELYSHTIRCLNKLETKHLEILKGKLHGSPLENSEKRIKKLNAMFLYCISDLGVWLAAKAAEILQSNKESCVSFWGEELDEKLEGFVRNYVRDVYSDLSEIILKMTKRGVQRNCILVSCFFNCIKYDLLIFLSYFIFISVYTGHIGEDFAEDLQDGLLTSKVYFLIKSLMGYRHMQDLRCIVFVERVITSIVLEALLSTINQMSGWSVRYMASGRNCGLQHQSRNKHVEIVDSFRSGKVHLIIATQILEEGLDVPSCNLIIRFDQAATVRSFIQSRGRARMQHSDYVLLVRRHVFQFCRGDVNALSKTQKFLKSGQIMREESQRLESTCCQPLLNTLCNEEFYGVESTGAIVTLNSSIQLINFFCSKLPSDEYFKPLPRFKIDKALGTCTLHLPMSSPVQTIYAEGKVSIIKKVVCLKACRELHAVGALTDYLLPESSVPCEDEPDIVVDKYKNGQPDYFPEQLVDNWSSFSRRGFYYCYMVSLEGCSKTTPAEIVLAVKCDMGSDFISNSFKLWGVQDYLSFTMRYVGIIHLNQEQVIAARRFQTTILSLLISNDLSEVSNYIKNLLEMPASPGAVYLLLPVVSGKIDWRSIKFSASEMPEATNMDMRHCYPCKDTGIVQTKDGTFCSCMLRNSIVCTPHNGMFYAVCGFLDLNANSLLHRSDGSFLSYKTYFKERYNLDLRCEDQALLEARKLVEVRNFLHKCNYKKEKERSGKSVVELPPELCIVVMSPMSAITLRSFTFIPSIMYRIQCMLLSMNLKMQLGPSMQQFDIPALKILEALTTKNCQEEFSQESLETLGDSFLKYITTQHFFVKYKHQHEGMLTKMKKNVISNAALCQLACSNNLVGYIRSEAFNPKTWIVPGVGYDICDRSLRKLKSKRIADSVEALIGAYLSTAGEQAAYIFLKSLGMDIEFHKMPIERVITIKAEEFINVKSLELLLDYSFNDPSLLMEALTHGSYQIAGTTPCYQRLEFLGDAVLDHIFTDYFYHQYPECTPELLTDLRSASVNNSCYAHAAVKAGLHKHVLHSSSALHKRMADYLDKFEQSFSGPSHGWEAGISLPKVLGDVVESIAGAIYIDAKHDKGVVWRSMKRILEPLVTPDTLQNDPVKELQEFCDSKGYTLEYTVTRDNGVSSVVAEVRTEGTTYKATRTGFSKLDAKKLAASSVLRDLKAADTKQYSANGISCT

SEQ ID NO: 12901 - protein, 735 aa, Zea mays
  VARIANT 489..735: note = Derived polymorphism lacks residues 489 to 735
MDGPASPSAAAETDTRGGEAPSKAKRGNAEEKYQHGQPVYFPEELMDNWVSFSLRGLYYCYNISLQGSCNTTADPTDIILAVKCDMGPDFFRYSFNLGGTDITIKYLYKIHLNQEQVLFARRFQITVLSLLINSNSSEVSNAIKYFREWQVDLGVVYLLLPTASGKIDWCGIKFSTSSAYDVTDKNMRHCHSCKDADILQTMDDPCCRCILQNSVVYAPRERKFYIITGLDLNANQPLDLNNRSAVSCKSKPLLVASGLFTVQNFLYKCYGKRKEPTSVKLPPELCKIVMAPVSANTLFSFSFVPSIMYRIQCLLLSAKLKIQLGPRMQQFNITAMKILEALTTKECQEKFSMESLETLGDSFIKYVTGQNLFNKYKHREDMLTSMREEKGYIRGELFNPQKWTIPGFGYDSRGNNKVFFRATNNMYSLKKISIKSKRIADTVEALTGAYLSTCGELAAVHFIKALGMDVELHSKMQVERTITTKSEELIDAESLQTMLKYVFYDTSLLVEALTHSSYNITGITACNERLEFLGDAVLDYILTYYFYRKYPNCTPALLTNLRKASVNNCCYAHAAVKAGLHKHILHSSSKQMVNDLENSGRSFSGPSHGWEAGISLPEDLADLFEAIAGAIYVDSGNDKEVVWSAIRRLLEPLATPGTMEPDPVSELKELCEHKHYPKPSYSPTRDSVAGVTRVVAQVTAARTVYSGTGTGRNQDVAEVLAAKALLKKIKAAARG

SEQ ID NO: 12902 - protein, 366 aa, Zea mays
  VARIANT 265: note = Ancestral polymorphism is P, Derived polymorphism is A
  VARIANT 292: note = Ancestral polymorphism is D, Derived polymorphism is N
  VARIANT 305: note = Ancestral polymorphism is N, Derived polymorphism is T
MSALVDALCAPPSDTALVYDTFNAANFLFDAAAFCDGAGIVAAPASAHQAPVEAQAATTSAAPTTTARARKRRRRPRSCKSREETETQRMTHIAVERNRRRQMNEYLAALRSIMPEAYVQRGDQASIVGGAIEFVKELEQQVQCLEAQKRKLLVHQRVAAAKPADATPMRASSSGARACCADSAAAAATTSNCSSGLTTEDAAADHALPPPPFAQFFTYPQYVWCHSAARDPAEEEDGRRSGVADVEVTLVETHASVRVMTARRPGQLLSLVTGLQALRLAVLHLSVVTALDALVLYTTSVKVHNCTKKVSFDSFLRFFFVVDGVEEGCGLATADDIAAAVHHVLCIIDAEATEQQLLAAAGPQPQ

SEQ ID NO: 12903 - protein, 405 aa, Zea mays
  VARIANT 231..405: note = Derived polymorphism lacks residues 231 to 405
  VARIANT 229..405: note = Derived polymorphism lacks residues 229 to 405
MAAVASSPPATIAGPQPTWLPYEPTRDCSQGLCSMYCPQWCYFVFPPPPPAFDIAGPGGGGGDDDSSGPTFSPLVIAIIGLLASAFLLVSYYTVISKYCGTFSSLRNMVFGSRRGRGRGRGGGGGGGGGGDSGAQVPWGAMPPDGLDETLINKITICKYKRGDGFVDSTDCSVCLGEFRDGESLRLLPKCSHAFHLPCIDTWLKSHSSCPLCRCNIAFVTVGVGAVSPEPEPERRAPREDRDWRRDNPELVLTVGGPSSDPVRGAPQSQSQNAVSGSGGDDGQDALARKDCPERSEEGSGNAEIKEDCALPAVRAASSLSDTHREGRMSIADVLQASLEDELTMARESGLLAGSSGRCPCHGEHSKDGGRSGRAMPDAASKRLPAVGRSCFSSRSGRGKDSILPM

SEQ ID NO: 12904 - protein, 252 aa, Zea mays
  VARIANT 172: note = Ancestral polymorphism is K, Derived polymorphism is N
  VARIANT 101..252: note = Derived polymorphism lacks residues 101 to 252
MAIDHAARLGLTSRGATGGGGCGDDVDAENRRWPPWLKPLLCTSFFVQCRIHADAHKSECNMYCLDCMDGALCSLCLARHRDHHSIQIRRSSYHDVIRVSEIHKVLDIAGVQTYIINSARVVFLNERPQPRPGKGVTNTCEVCERSLLDCFRFCSLGCKIVGTARGYRPKKKHGGGGGGGNKRKRAALKDVRSDSEESCTSTSGASSDKSSVVQSFSPSTPPPASASYRRPGNKRRKGVPHRSPFGSLIVEF

SEQ ID NO: 12905 - protein, 141 aa, Zea mays
  VARIANT 107: note = Ancestral polymorphism is R, Derived polymorphism is C
MNCYGSWTEQARSLSASVDHRGDTNVSYSELDYYKVLEVDYDASDDTIKLSYRRLALMWHPDKHKGNSNATTKFQEINEAYKVLSDPAKRLEYDVSGCYEIDQYTLREYLTKFKGMILTCNGLGIDHSSKWARHLRELKPH

SEQ ID NO: 12906 - protein, 740 aa, Zea mays
  VARIANT 105..740: note = Derived polymorphism lacks residues 105 to 740
MTPRPHQPAGHLLRGRETLTGARIPLYSMAEQDGDAGQMPPDSVPVVGVGDQNTNQHQPFFSMCQPLRTVSYSNSWDGTCVAAANENDHTGISGTLDREDDSCSRHSINKEVSLVQGVMKMEQSMDGVDVPHGGASEQPEPLGTQQPDSFDEVDLWDVQDNKQALPLNSNQCNFNIGETCDAEDMHFPLSASYRRQPKCVGAGLSNMGNTCFLNATLQCITHTVPLFLKLCSNDHFTPCSYNEDGFCSFCALKEHVDESIRRSGSVIAPTKFRDSLRKLSLDFTPGQQEDAHEFLRCLLDNLHECTLDPKSKSKGSSFEEESIVKEIFGGQLKSHLSCCECGHSSETFEPFLDLSLEIDQVDHLVDALQSFTKVEQVGDSENKLTCESCNARVCKNKQLTLYRAPDVIAFHLKRFTTLDNSVKKIDKYVAYPLEVDLKPFHSNPETVGELKYDLYGVVEHSGLPNYGHYVCTIRSSPSTWYLMNDSNVDSITDSSALNQEAYILFYVRQGKFPWFSSLLEGKVVLQAENTCGTSPVSVLENIDVNCSTSSGGGSSSSSGDKLEKNEASQLEETKKDETSQYKTSFLPDEPSKSSFGASNSNNAMDEDNPPRVSFQNSVASCSRSVETTNLEKPSTPRCSQRLASHDEFSVFEFEDFDEEKETLLPKLKFPSKVKKANSASRAMKGRCIDQNAVRLMRSMTSTRRKGLIDCIAQQTAKHESNRCPASDPLDKKKRKLVLQY

SEQ ID NO: 12907 - protein, 306 aa, Zea mays
  VARIANT 90: note = Ancestral polymorphism is P, Derived polymorphism is A
MSSGATSSSSPPLAEAGDGYWEGREEAVARLKAMAARAHWEDELSAERLETNNQVQEDEMLALQAIYGDDMVILEDKAGFRSFQIFVWYPIPNGTKVFLNLHPNGTMVGTDNDESKDGGELIYACSLKHLPPVEKHQKYSLPEKQLLKEQREIDELISVCEALRDSKQCPSCKMAISKTEGCNKMICRNCGKFFCYRCNQAIRGYEHFWDGNCVLFEHQNQVQIYGRLEESDDEEHFDDEDLEETEPELVWGCPCPVCGRWNGKLDTNNHILCMGCRGHYCALCRRRVMKSSEHYGPRGCQQHTDP

SEQ ID NO: 12908 - protein, 139 aa, Zea mays
  VARIANT 53: note = Ancestral polymorphism is C, Derived polymorphism is Y
  VARIANT 50: note = Ancestral polymorphism is C, Derived polymorphism is R
  VARIANT 43: note = Ancestral polymorphism is A, Derived polymorphism is T
  VARIANT 14: note = Ancestral polymorphism is R, Derived polymorphism is C
  VARIANT 13: note = Ancestral polymorphism is L, Derived polymorphism is I
  VARIANT 10: note = Ancestral polymorphism is V, Derived polymorphism is I
  VARIANT 1: note = Ancestral polymorphism is M, Derived polymorphism is I
MLMRMLQVVVACLRVPAVAALKDQHVAVAVREPVTSSTYDGAAAGRVHRCTICHKEFSTGQALGGHKRKHYDGGAAAAETSEVGSSGNGISAPRAFDLNLPVVPEFAFRCGGKPSKMWEEDEEVQSPLAFKKPFLLMTA

SEQ ID NO: 12909 - protein, 337 aa, Zea mays
  VARIANT 74: note = Ancestral polymorphism is C, Derived polymorphism is R
MTKQWLVFAWALLAAASSVARASPPPLQVGFYEHSCPQAEDIVRNAVRRAVARDPGLAAGLIRMHFHDCFVRGCDASILLDSAPGQQHDTEKYSPANFQSLRGFEVIDEAKAVVEEHCPRTVSCADIVAFAARDGAYLAGGIDYRVPAGRRDGRVSVKDEVLEDGNLPFPEFTVAELIENFRRKGLSADDMVTLSGAHSIGRSHCSSITDRLYSFQGEPGRTDPALHPAYAADLKRRCPPSTDGDMEDRTTVPLDTVTPNAFDNQYFKNVLEHKVPFTSDQTLLDSPWTAGLVAFHAAVGQAWEAKFAKAMVKMGAIEVLTGYEGEIRQKCSMVNYY

SEQ ID NO: 12910 - protein, 92 aa, Zea mays
  VARIANT 1: note = Ancestral polymorphism is M, Derived polymorphism is I
  VARIANT 8: note = Ancestral polymorphism is G, Derived polymorphism is R
  VARIANT 12: note = Ancestral polymorphism is I, Derived polymorphism is M
  VARIANT 33: note = Ancestral polymorphism is I, Derived polymorphism is V
  VARIANT 36: note = Ancestral polymorphism is A, Derived polymorphism is S
  VARIANT 68: note = Ancestral polymorphism is S, Derived polymorphism is L
  VARIANT 69: note = Ancestral polymorphism is L, Derived polymorphism is F
  VARIANT 76: note = Ancestral polymorphism is V, Derived polymorphism is F
MMAKGGAGSGMIWATAEDLARRRPVVLSLYRQVLRALNSPALPLGHAARLAKKAECRAIFVFGAEERSLHNIRDLVEAARHTLGLLNRGRLP

SEQ ID NO: 12911 - protein, 345 aa, Zea mays
  VARIANT 25: note = Ancestral polymorphism is A, Derived polymorphism is S
  VARIANT 26: note = Ancestral polymorphism is A, Derived polymorphism is V
  VARIANT 32: note = Ancestral polymorphism is P, Derived polymorphism is S
  VARIANT 34: note = Ancestral polymorphism is V, Derived polymorphism is E
  VARIANT 259: note = Ancestral polymorphism is M, Derived polymorphism is R
MAAKARVSLTAVLAAAAWACLSVVAASAFDVPTVAFEEGFSPLFGDGNLVRSSDDRSVRLLLDRRSGSGFISSDYYLHGFFSASIKLPKDYTAGVVVAFYLSNGDVYEKTHDELDFEFLGSRWGGQWRVQTNVYGNGSTSRGREERYLLPFDPTVEAHSYSILWAPTHIIFYVDDTPIREVIRHPDMGGDFPAKPMAVYATIWDGSAWATDGGKYKVNYKYAPFASDFSELAVVGSRADPVLRVPRRDGAAHQDLLALMTADYAVVTPRKRAAMRAFRARQMTYTVCYDAVRYADGPFPECDNSDEERESFSAWGESKTVVMRPRARGRRRGRKAGRGRAGVSSS

SEQ ID NO: 12912 - protein, 424 aa, Zea mays
  VARIANT 28: note = Ancestral polymorphism is R, Derived polymorphism is S
  VARIANT 29: note = Ancestral polymorphism is K, Derived polymorphism is Q
  VARIANT 30: note = Ancestral polymorphism is R, Derived polymorphism is T
  VARIANT 33: note = Ancestral polymorphism is R, Derived polymorphism is S
  VARIANT 209..424: note = Derived polymorphism lacks residues 209 to 424
  VARIANT 330..424: note = Derived polymorphism lacks residues 330 to 424
MGVCSCAVPFSSGETSRFVNAPFRSKRRKRSRSLREGETARRRGSGMGKGAELWDDSALVDAFDRAMFSMKEMHCKSKRATPSEDGKTELAAATAEEEPITAGAADVCGEEDANCDSTHCDLSELQQQPYEDRQTIEHAPLQETDPGKETHVSEAKTLSTDASTNAGGNWSSSQQTGQYNELLRQYYELEEKSRNILEQLQQTNYSNYQASGYASTAQQQQVPVYSATVPDPYSSTTQSSCCNWNVPLVSVSCCSAGQPSGGSACTPPTAGCSVSLTCDQCPGATTAYPSVSNFMQVPTMVSTNDDQVDKAAMMTAEAAFNFMRSTISGQPSTQGSKSDTGKEESTNMGMNPNLDSDLAALLNSWYAAGFYTCSTCSCPHILGWYAFTCLHYRISTSCCNLQRIPDRSVVGHGRLEIDVREEAG

SEQ ID NO: 12913 - protein, 406 aa, Zea mays
  VARIANT 257: note = Ancestral polymorphism is T, Derived polymorphism is S
MPIFSTNSEFSAAKMSDNLMDKVSAFGERLKITGTEVSKKMTAGMSSMSFKMKELFQGQTPADKIVEGATSEDLDGPDWNSNLEICDMINTEKVDSVELIRGIKKRIMLKDARVQYLSLVLLETIVKNCDKAFSEVAAERVLDEMVRLIDDPQTVVNNRNKALMLIEAWGESGDELRYLPVYEETYKSLKSRGVRFPGRDNESLAPIFTPARSVAEADVDASLPQQVFEDVHVHTYTAEETKEAFDVARNSVELLSTVLSSSPEQDALQDDLTTTLVQQCYQSQHTIQMIIETVGDNEAVLFEALSVNDEIQKVLSKYEEMKQPRASEHAEHVPVVIPIAAEHEDLNAVGNEDALVRKPAAARATSGGDDDILDDLDEMIFGKKGGSSSQEGPKKPDPKKDDLISF

SEQ ID NO: 12914 - protein, 405 aa, Zea mays
  VARIANT 278: note = Ancestral polymorphism is V, Derived polymorphism is M
MAICSAHTTTSLRSPCTTVSNAGLRQKQVIFVTSNRRSGGGRRHGGARSFQVSCSVDKPVVIGLAADSGCGKSTFMRRLTSVFGGAAEPPKGGNPDSNTLISDTTTVICLDDYHSLDRNGRKEKGVTALDPRANNFDLMYEQVKAIKEGQAVEKPIYNHVTGLLDPPELIAPPKIFVIEGLHPMFDERVRDLLDFSIYLDISDEVKFAWKIQRDMAERGHSLESIKASIEARKPDFDAFIDPQKQYADAVIEVLPTQLIPDDNEGKVLRVKLIMKEGVKNFNPVYLFDEGSTISWVPCGRKLTCSYPGIKFSYGPDTYFGNEVSVLEMDGQFDRLDELIYVESHLSNLSTKFYGEVTQQMLKHADFPGSNNGTGLFQTIIGLKIRDLYEQIVAERAGVPAEAAKV

SEQ ID NO: 12915 - protein, 596 aa, Zea mays
  VARIANT 516: note = Ancestral polymorphism is W, Derived polymorphism is R
  VARIANT 434..596: note = Derived polymorphism lacks residues 434 to 596
  VARIANT 429: note = Ancestral polymorphism is L, Derived polymorphism is H
  VARIANT 423: note = Ancestral polymorphism is P, Derived polymorphism is L
  VARIANT 404..596: note = Derived polymorphism lacks residues 404 to 596
  VARIANT 335..596: note = Derived polymorphism lacks residues 335 to 596
  VARIANT 292..596: note = Derived polymorphism lacks residues 292 to 596
  VARIANT 265..596: note = Derived polymorphism lacks residues 265 to 596
  VARIANT 259..596: note = Derived polymorphism lacks residues 259 to 596
  VARIANT 132..596: note = Derived polymorphism lacks residues 132 to 596
  VARIANT 83: note = Ancestral polymorphism is R, Derived polymorphism is T
  VARIANT 40..596: note = Derived polymorphism lacks residues 40 to 596
MDVDSRMATESGSDACDGSGSGSETPTVSPSPSAFRSSSWFYLRVGCDQSHEQVDPEALDRSFLMRVMAARSPNVRLQKAIDRKNQRFIVRILILTQLDAEMLALCAAEASESSTARVECPSERKKALTTPQSKVVRPRQELFHNVKHQTESLAAAARKGTVVKSLFMSTTPKKEPVQTPVADKSKGAVSEVCSKLRKLNLACREVPSRYISQPQPKNTKTAKKSEETTVAKSEKRGLESKTNAKKKILGRSVKRANAGPDGENRNGCSTAADENSLAETAGSHQERKVVLQELRIEVDASRRGNLDDNKENVSSALSEEALDNSSHYGSENILLENNENVPLKENVALKVAKLQKKVHQEQAGKLKKTTNPRVLWDGGQYDPALWASKVGNSWRTTDDITDTWKSMTDIADKNNKWASYAGPGGWNVLCGAVQYTVTLLLNLCFSVDPDMLEVGNGGMTLAEYRSHFSIWALMKRVDQRVLKNKNCSSLKMMIDPLGVQGRKNLGQGKYGCCEVWAGPLSGNRLVVALWNRCSDTANVTMKLPAVGLDGYAAYYVRDLWKHETLSENVVGTFGAQVDVHDTKMYIFSPATIVASV

SEQ ID NO: 12916 - protein, 221 aa, Zea mays
  VARIANT 71: note = Ancestral polymorphism is S, Derived polymorphism is F
  VARIANT 132: note = Ancestral polymorphism is A, Derived polymorphism is S
MGQAFRKLFDSFFGTSEMRVVMLGLDAAGKTTILYKLHIGEVLSTVPTIGRAPAITFKTNFPCKFVCDDMSLVLSLGFNVEKVQYKNVMFTVWDVGGQEKLRPLWRHYFNNTDGLIYVVDSLDRERIGKAKAEFQAIIKDPLMLNSVILVLANKQDMKGAMTPMEVCEGLGLYDLKNRIWHIQGSCALKGDGLYEGLDWLASTLKELQASGRLPSGGTSLF

SEQ ID NO: 12917 - protein, 166 aa, Zea mays
  VARIANT 59: note = Ancestral polymorphism is V, Derived polymorphism is I
  VARIANT 68: note = Ancestral polymorphism is R, Derived polymorphism is L
MPPKLDPSQVVEVFVRVTGGEVGAASSLAPKIGPLGLSPKKIGEDIAKETAKDWKGLRVTVKLTVQNRQAKVSVVPSAAALVIKALKEPERDRKKVKNIKHSGNISLDDVIEIARTMRPRSMAKEMSGCVKEILGTCVSVGCTVDGKDPKDLQQEIDDGEVEIPSA

SEQ ID NO: 12918 - protein, 313 aa, Zea mays
  VARIANT 110..313: note = Derived polymorphism lacks residues 110 to 313
  VARIANT 285: note = Ancestral polymorphism is W, Derived polymorphism is G
MRLSLDLLREEPRRCAPAAVAGGGLPPLHAIAELGIPSAKCYGDRFIPHRSAMDMDMAHYLLTEPRKDKENAAGMVASPSKEAYRRLLRGSCSTTGHGSSPSGTSCQNPRTCLSPMSLPPTMRTAVLLPALARLLMSRTLRGVLEARVGSLAWNNSILSTGGMDGKIVNNDVRIRNHVVQTYKGHSQEVCGLKWSGSGQQLASEGNDDLVHIWDVLMASSLPSAGHNQWLHRLEDHVAAVKALAWWQRSVHQILAHTHCSCMVKLQSPDGCTVASAAADETLRFWNVFGAPETPKPAAKASHTGTFNSFNHIR

SEQ ID NO: 12919 - protein, 279 aa, Zea mays
  VARIANT 154: note = Ancestral polymorphism is Q, Derived polymorphism is R
MNMFDGMERAGYGGGAGPMGGVVLSRDPKPRLRWTPDLHERFVEAVTKLGGADKATPKSVLRLMGMKGLTLYHLKSHLQKYRLGKQTKKDTGLDAGRGAFAAQGINFSTPVPPPSIPSTASDNTGETPLADALKYQIEVQRKLHEQLEVQKKLQMRIEAQGKYLQTILEKAQSNLSYHATGAANLEATRSQLTDFNLALSGFMDNVTQACEQNNGELVKAMSEDGLRANNLDFQPYHGVHDGDDVKCATDEGLLLLDLNIRGGYGHRISTDLKMNQHMR

SEQ ID NO: 12920 - protein, 525 aa, Zea mays
  VARIANT 24..525: note = Derived polymorphism lacks residues 24 to 525
MGDARSEVPLAVLQDRQDSTATPQLPADAGSGTGQQEKHAAPADVTPPMGECRTEYRGLPDANGEDAGTVPAALRKVSIVPLVFLIFYEVSGGPFGIEDSVGAAGPLLAIVGFLVLPVIWSIPEALITAELGTMFPENGGYVVWVASALGPYWGFQQGWVKWLSGVIDNALYPVLFLDYLKSAVPALGGGPPRAFAVLGLTAVLTLLNYRGLTVVGWVAICLGVFSILPFFVMGLISLPRLRPARWLVVDLHNVDWNLYLNTLFWNLNYWDSISTLSGEVDNPGKTLPKALFYAVIFVVVGYLYPLLAGTGAVPLDRGQWSDGYFSDLAKLLGGAWLMWWVQAAAALSNMGMFVAEMSSDSYQLLGMAERGMLPAFFARRSRHGTPLVGILFSASGVLLLSSLSFEEIVAAENFLYCFGMLLEFIAFVLLRVRRPDAPRPYRVPLGTAGCVAMLVPPTALIVVVLALSTLKVALVSLGAVAIGLVLQPALRFVETKGLLRFAVNTDLPDIGVGQSSASAEEPVTP

SEQ ID NO: 12921 - protein, 425 aa, Zea mays
  VARIANT 207..425: note = Derived polymorphism lacks residues 207 to 425
MLACIACSAKDGGDQDGSRAATPHGRDAGKSLTSQLKDMVLKFSGSGRQYKAAAASPSFRGNRFHRNSRLAAYTGVIDDSGFTSDGATEGYGYMRTTTHATGATAGTKVGRGFPQHVRSPSASWIPSIGEEDDEEDEEVVVVEEDRVPREWTAQVEPGVQITFVSTAGGAGNDIKRIRFSRDMFNKWEAQRWWGENYDRVVELYNVQTFSRQQGVSTPTSSIDDATQRDSSFYSRAGSTRDSPVILPPTAVGREQPIARATSCRATAAAASTARAACNPSSSAVPDPSDHVWAHHFNLLNSAPAPAPAAPHLDPSRATTSSLDEASVSVSNASDLEATEWVEQDEPGVSITIREFGDGTRELRRVRFRQVNPGEVRRGEGQGVVGPEQEPNTRAVPVTSDSELAVGCAVHALDGSQATNPWTIVA

SEQ ID NO: 12922 - protein, 233 aa, Zea mays
  VARIANT 200: note = Ancestral polymorphism is W, Derived polymorphism is S
  VARIANT 196..233: note = Derived polymorphism lacks residues 196 to 233
  VARIANT 178: note = Ancestral polymorphism is A, Derived polymorphism is V
  VARIANT 154: note = Ancestral polymorphism is L, Derived polymorphism is H
  VARIANT 145: note = Ancestral polymorphism is K, Derived polymorphism is N
  VARIANT 126..233: note = Derived polymorphism lacks residues 126 to 233
  VARIANT 75: note = Ancestral polymorphism is G, Derived polymorphism is R
MAKALVFLVSGASCGPPKVPLDWLDAKATWYGKPTGAGLDDNGGGYGYKDVNKPPFNSMGACGNIPIFKDGLGCRPCFKIKCNKPAECSSKPMVVHITDMNYEPIAVYHFDLAGTAFSAIAKKDEEEKPCKAGIVDMQFRRVKCKYGSKITFHLEKGCNPNYLALLVKYVDGDGDIVVVDVKEKGSDTCEPLKHSWGAIWRKDSDKLLKGPLTVRLIAEGGTNTIYDDVIPAN

SEQ ID NO: 12923 - protein, 270 aa, Zea mays
  VARIANT 207: note = Ancestral polymorphism is D, Derived polymorphism is V
MAVNVRTMWSSMRAQVAMVVALVFLVSGAWCGPPKVPPGKNITATYGKDWLDAKATWYGKPTGAGPDDNGGGCGYKDVNKPPFNSMGACGNIPIFKDGLGCGSCFEIKCDKPVECSGKPVVVHITDMNYEPIAAYHFDLAGTAFGAMAKKGEEEKLRKAGIIDMQFRRVKCKYDSKVTFHLEKGCGPNYLALLVKYVDGDGDIVAVDVKEKGSDTYEPLKHSWGAIWRKDSDKPLKGPLTVRLTTEGGTKSVYDDVIPANWKANTAYTAK

SEQ ID NO: 12924 - protein, 458 aa, Zea mays
  VARIANT 94: note = Ancestral polymorphism is F, Derived polymorphism is S
MGACGNIPIFKDGLGCGSCFEIKCDKPVECSGKPVVVHITDMNYEPIAAYHFDLAGTAFGAMAKKGEEEKLRKAGIIDMQFRRVKCKYDSKVTFHLEKGCGPNYLALLVKYVDGDGDIVAVDVKEKGSDTYEPLKHSWGAIWRKDSDKPLKGPLTVRLTTEGGTKSVYDDAYPLIHRSIVPFTNPRQNMAVNVRTMWSSMRAHVAMAVALVFLVSGAWCGPPKVPPGKNITATYGKDWLDAKATWYGKPTGAGPDDNGGGCGYKDVNKPPFNSMGACGNIPIFKDGLGCGSCFEIKCDKPVECSGKPVVVHITDMNYEPIAAYHFDLAGTAFGAMAKKGEEEKLRKAGIIDMQFRRVKCKYDSKVTFHLEKGCGPNYLALLVKYVDGDGDIVAVDVKEKGSDTYEPLKHSWGAIWRKDSDKPLKGPLTVRLTTEGGTKSVYDDVIPANWKANTAYTAK

SEQ ID NO: 12925 - protein, 753 aa, Zea mays
  VARIANT 516: note = Ancestral polymorphism is L, Derived polymorphism is F
  VARIANT 435: note = Ancestral polymorphism is D, Derived polymorphism is A
  VARIANT 419..753: note = Derived polymorphism lacks residues 419 to 753
  VARIANT 231: note = Ancestral polymorphism is D, Derived polymorphism is Y
MWRLKIGERPSNPLLRSPNGFLGREVWEFDPAAGTPEERAEVDRLRQEYTRNRFTRRQCSDLLMRMQESTYAKQNLHNTNLPAIKIDQDSDVTEETILITLRRALNQYSSLQGPAGHWPGDYGGISFILPLMIFALHVTRSMDEVLSIEHIREICRYIYNMQNEDGGWGTHTLGPSSMFGTCVNYATLRILGEVLDGENDALSKGRSWILSHGSATAAPQWAKIYLSFSLDKQNILAMNIFGIVNIWLWSEINAIHCCFQQKMIGVYDWAGNNAIIPELWMLPHFLPIHPGRFWCFCRMVYMPMAYIYGKKFVGPITTTILEIRNELYNIPYNKINWNKACNSCAKEDLIYEPSWLQSIAMAYLNKFIEPLSNLWPMNKLRERAMSDLMEHIHYEDETSNYVGLCPINKALNMICCWIEKPNSNEFRQHLPRIHDFLWLGEDGMKSKVIKNIPDYKSYYRERTKGSWTLSNGENFWPIADTTAEALKAILLLSNIPSELVGDPIKQERLYDAVDCLLSFVNKDGTLSSAECKRTTSWVEFINPSESFRNIIVDYPYPECTSSLIQALVLFRGKHPIYRRDEIDKIIKSGASFIEKVQRKDGSWYGSWAVCFTYATFFAIKGLVAAGRTYRNSLAIRKACNFLLSKQLGTGGWGENYLGCQIEEYVDSGSPHGVNTAQAMLALLYAGQVEQDPAPLYRAAKELINMQMENGEFPQQEIVGNFNSSLFFNYPNYRNLFPIWALGEFRRRLVAKKG

SEQ ID NO: 12926 - protein, 193 aa, Zea mays
  VARIANT 114: note = Ancestral polymorphism is A, Derived polymorphism is T
  VARIANT 45: note = Ancestral polymorphism is G, Derived polymorphism is R
  VARIANT 21..193: note = Derived polymorphism lacks residues 21 to 193
  VARIANT 15: note = Ancestral polymorphism is A, Derived polymorphism is V
  VARIANT 14: note = Ancestral polymorphism is T, Derived polymorphism is M
MVRSSQSPPGKNITATYGKDWLDAKATWYGKPTGAGPDDNGGGCGYKDVNKPPFNSMGACGNIPIFKDGLGCGSCFEIKCDKLVECSGKPVVVHITDMNYEPIAAYHFDLAGTTFGAMAKKGEEEKLRKAGIIDMQFRRVKCKYGSKVTFHLEKGCGPNYLALLVKYVDGDGDIVAVDIKEKGSDTYEPLKHS

SEQ ID NO: 12927 - protein, 253 aa, Zea mays
  VARIANT 178: note = Ancestral polymorphism is K, Derived polymorphism is N
  VARIANT 150..253: note = Derived polymorphism lacks residues 150 to 253
  VARIANT 33..253: note = Derived polymorphism lacks residues 33 to 253
MAMALAFLVSGAWCGPPKVPPGKNITATYGKDWLDAKATWYGKPTGAGPDDNGGGCGYKDVNKPPFNSMGACGNIPIFKDGLGCGSCFEIKCDKPVECSGKPVVVHITDMNYEPIAAYHFDLAGTAFGAMAKNGEEEKLRKAGIIDMQFRRVKCKYGSKVTFHLEKGCGPNYLALLVNYVDGDGDIVAVDVKEKGSDTYEPLKHSWGAIWRKDSDKPLKGPLTVRLTTEGGTKTVYDDVIPANWKANTAYTAK

SEQ ID NO: 12928 - protein, 159 aa, Zea mays
  VARIANT 16: note = Ancestral polymorphism is A, Derived polymorphism is V
  VARIANT 22: note = Ancestral polymorphism is A, Derived polymorphism is D
  VARIANT 25: note = Ancestral polymorphism is G, Derived polymorphism is V
  VARIANT 37: note = Ancestral polymorphism is A, Derived polymorphism is D
  VARIANT 66: note = Ancestral polymorphism is C, Derived polymorphism is S
  VARIANT 81: note = Ancestral polymorphism is A, Derived polymorphism is E
  VARIANT 84: note = Ancestral polymorphism is N, Derived polymorphism is K
MWSSMQAHVAMVVALAFLVSGDWCGPPKVPPGKNITATYGSDWLDAKATWYGKPTGAGPDDNGGGCGYKDVNKPPFNSMGACSNIPIFKDGLGCGSCFEIKCDKPAECSGKPAVVYITDMNYEPIAAYQFDLAGTAFGTMAKKGEEEKLRKASIIDMQF

SEQ ID NO: 12929 - protein, 408 aa, Zea mays
  VARIANT 131: note = Ancestral polymorphism is G, Derived polymorphism is D
  VARIANT 130: note = Ancestral polymorphism is D, Derived polymorphism is A
MAMPYASLSPAGAADHRSSTATASLVPFCRSTPLSAGGGLGEEDAQASARWPAARPVVPFTPAQYQELEQQALIYKYLVAGVPVPPDLVVPIRRGLDSLATRFYGQPTLGYGPYLGRKLDPEPGRCRRTDGKKWRCSKEAAPDSKYCERHMHRGRNRSRKPVETQLAPQSQPPAAAAVSAAPPLAAAAAATTNGSGFQNHSLYPAIAGSTGGGGGVGGSGNISSPFSSSMGGSSQLHMDSAASYSYAALGGGTAKDLRYNAYGIRSLADEHNQLIAEAIDSSIESQWRLPSSSFPLSSYPHLGALGDLGGQNSTVSSLPKMEKQQPPSSFLGNDTGAGMAMGSASAKQEGQTLRHFFDEWPKARDSWPGLSDETASLASFPPATQLSMSIPMASSDFSVASSQSPNDD

SEQ ID NO: 12930 - protein, 250 aa, Zea mays
  VARIANT 19: note = Ancestral polymorphism is G, Derived polymorphism is S
  VARIANT 53: note = Ancestral polymorphism is N, Derived polymorphism is D
  VARIANT 55: note = Ancestral polymorphism is L, Derived polymorphism is P
  VARIANT 57: note = Ancestral polymorphism is W, Derived polymorphism is C
  VARIANT 65: note = Ancestral polymorphism is V, Derived polymorphism is I
MSSHRSAAHVLSGVRPKAGLAHRLQLPSRSCLTGIGCRTRVRGVPQAYEVLGDGPGWAAWLVNRVVASFDEVGMRAELAAWPRGPRFTFVESRGLIVFIIGATNRPDIIDPALLRPERLDQLIYIPLPNEQSRLQIFKVCLRKSPVAKDVDLNALAKYTQGFNGADITEICQRACKYAIRENIEKFFIFFIFRDNDNEDTQAREHSDEEMDSDEEHESFVIQSKNYVMRTKQLKLEYIEMAIMWCGVTHD

SEQ ID NO: 12931 - protein, 352 aa, Zea mays
  VARIANT 172: note = Ancestral polymorphism is A, Derived polymorphism is G
  VARIANT 230: note = Ancestral polymorphism is I, Derived polymorphism is T
MAHAALLHCSQSSRSLAACRRGSHYRAPSHVPRHSRRLRRAVVSLRPMASSTAQAPATAPPGLKEGIAGLYDESSGLWENIWGDHMHHGFYDSSEAASMADHRRAQIRMIEEALAFAGVPASDDPEKTPKTIVDVGCGIGGSSRYLAKKYGAQCTGITLSPVQAERGNALAAAQGLSDQVTLQVADALEQPFPDGQFDLVWSMESGEHMPDKRKFVSELARVAAPGGTIIIVTWCHRNLDPSETSLKPDELSLLRRICDAYYLPDWCSPSDYVNIAKSLSLEDIKTADWSENVAPFWPAVIKSALTWKGFTSLLTTGWKTIRGAMVMPLMIQGYKKGLIKFTIITCRKPGAA

SEQ ID NO: 12932 - protein, 191 aa, Zea mays
  VARIANT 133..191: note = Derived polymorphism lacks residues 133 to 191
MQTEIDIEATPNNDVINDTINDETEADNNVEIEDIIIDADDSFQPDIFDPRYWDSLDSKQIDILAQKGPRRDLSIQKGQRDKYSRRFSSLFYNRILPNGELCDRDWLVYSKELDRVFCFGCKLFPKGHRKAERSFSKLKLLKSYLRSTMIQQRLTDLATIALESELLDKIEYDHIVEEFISRNTRRMKLFK

SEQ ID NO: 12933 - protein, 325 aa, Zea mays
  VARIANT 16: note = Ancestral polymorphism is L, Derived polymorphism is R
MAAALLLLLVPPVGLLAALAFLTRPHARIALKDSHVFITGGSSGIGLAMATAAAREGARVSILARNLARLEEARAAIQRDSGRDDVGVHAADVRDADAVARALQEAGPVDVLVCNHGVFVPQELERQDMDEIKWMVDINLMGTFHLIKAALPAMKARTRETRLPGSIAIMSSQAGQVGIYGYTAYSASKFALRGLGEALQHEVVGDNIHVSLIFPPDTETPGLEEEHKRRPELTNIIAGLSGGMKADDVAKKALDGIKSAKFIVPCNFEGTMLAVATAGLSPQSSALMAFIEVIGTGLMRFAALCFQWNWFSTIESYYAKNKKSQ

SEQ ID NO: 12934 - protein, 215 aa, Zea mays
  VARIANT 48..215: note = Derived polymorphism lacks residues 48 to 215
  VARIANT 59: note = Ancestral polymorphism is A, Derived polymorphism is T
  VARIANT 61: note = Ancestral polymorphism is A, Derived polymorphism is V
  VARIANT 65: note = Ancestral polymorphism is V, Derived polymorphism is I
  VARIANT 87: note = Ancestral polymorphism is R, Derived polymorphism is S
  VARIANT 88: note = Ancestral polymorphism is N, Derived polymorphism is T
  VARIANT 116: note = Ancestral polymorphism is A, Derived polymorphism is T
  VARIANT 119: note = Ancestral polymorphism is T, Derived polymorphism is I
  VARIANT 120: note = Ancestral polymorphism is G, Derived polymorphism is C
  VARIANT 127: note = Ancestral polymorphism is A, Derived polymorphism is E
  VARIANT 130: note = Ancestral polymorphism is T, Derived polymorphism is I
  VARIANT 165: note = Ancestral polymorphism is C, Derived polymorphism is Y
  VARIANT 186: note = Ancestral polymorphism is C, Derived polymorphism is Y
MKESFSIHGSINQKLVEANVSFIINHLVWMRLSLDSKSPPSVFALPGQSLEVTRILTHAGAELVVPQLIPSLAESHQATVKSPLLWRTLAALISLTIRTTSTSWGDVSLLSKILAALATGVIAIVVANPTDLVKVRLQADGKANTVKRSYSGALNDGLWDVYNDCAMGMCAELRANNDALTREEQCNIFAFLVYAGGGNRGRRSGTGEFGRAFKL

SEQ ID NO: 12935 - protein, 246 aa, Zea mays
  VARIANT 71..246: note = Derived polymorphism lacks residues 71 to 246
  VARIANT 39: note = Ancestral polymorphism is G, Derived polymorphism is E
MTWRAALPLPVWTAAKPFTLLGTCETDQETERVLIAARGHAQQQPDQQRCIPDPEYSRSASEDEEPHRTPQQGIRATSGTDGSRFTSLPQRRSRSRDMQSQQQLQGSEAVQAPGRKKLKRPAGPSGREEPDDGGGGDDDEPPRRSRNTKDAQTSTSAVRGLLRDFFEQQLRLDAQRQETMERRARERLFFEDQWRQSMQRIEQERLMLEQAWAEREEQRRMREEDRAERRDALLTTLLTRLLQGDL

SEQ ID NO: 12936 - protein, 411 aa, Zea mays
  VARIANT 21: note = Ancestral polymorphism is V, Derived polymorphism is A
MADGSLYAWWCCALGWALALVAADGFLVDITYVESAVAKGAVCLDGSAPAYHLARGSGSGENSWLVHFEGGGWCNNVTTCLQRKRTRLGSSKEMATQIAFSGILSDTPDDNPASNAEFLCKPWKPDFYNWNKVKVRYCDGSSFTGDVEEVDPATKLHYRGARIWQAVMDDLLAKGMDKAENALISGCSAGGLTSILHCDRFHDLLPPAARVKCLSDAGFFINEKDVAGVGYIAAFFNDVVTTHGSAKNLPPSCTSTLPPGTCFFPQNEVKQIQTPLFILNAAYDSWQVRNILVPGVADPHGKWHSCKHDIDQCSASQLRVLQGFRGDFLKEVAELGNSDSRGLFINSCFVHCQSEIQELWFSSDSPVLGNTTVANAVGDWFFDRSSFQKIDCPYPCDSTCHNRIYDDSSQA

SEQ ID NO: 12937 - protein, 541 aa, Zea mays
  VARIANT 148: note = Ancestral polymorphism is A, Derived polymorphism is V
MRMKTLACCRRRPQDFSIDMDQEPDRVVTYNGLETCIINSSTYDDDSGISATTGGDGCITTDSLDDEVSSCSSKDASGSSFTSHSLSKQEEHSLDELGTPMAIHLLPFKGKKTITYTLSASDIENMKEKFAKLLLGDDTSGGARGVCVALALSNGIINLSATVFGELWKLEPLCEDKKIRWRKEMDWLLSPTTYMVELVPTKQSGADGCTFEIMTPKARSDVHVNLPALQKLDMMLIEVMDSMIDTEFWYEESGSRADGRGKITGPRKSKKWWLPSPRVPEQGLSQFQRKRLVFQAKLVHQILKAAKSINEQVLSHMPIPAAVMDALPKSGRASLGEDLYQAITTDYIPVEEIFVSLSLKTEHSVLETINRLEGAVFAWNQRILEERSKRSPGRHSWSFMKDSSSEVDKMSACIERVDALVQLLKSRYPNLPPTFIDVLKVQYNVDVGHAIVEAYARVLVGVAFSILSRVAEILLEDDLIKKPNTPMTTLKFDLSSDVYLAGITETPPGHIRRSLMDQISMVDGRYDAVVGKKKEVKQLRW

SEQ ID NO: 12938 - protein, 124 aa, Zea mays
  VARIANT 25..124: note = Derived polymorphism lacks residues 25 to 124
  VARIANT 32: note = Ancestral polymorphism is M, Derived polymorphism is I
  VARIANT 55: note = Ancestral polymorphism is S, Derived polymorphism is L
MGLMTNRYFGNYGIIRDIVHNHILQTIALFAMEPPVSLDGEDIRDEKGEGSQINSESDMNRVGQSRCARYPNMHRNRKREGNVQFGKFGQRDEYPNLIYRDVPYHFLKDSKNHPSNRRAYRWCN

SEQ ID NO: 12939 - protein, 419 aa, Zea mays
  VARIANT 63: note = Ancestral polymorphism is S, Derived polymorphism is F
  VARIANT 89..419: note = Derived polymorphism lacks residues 89 to 419
  VARIANT 149: note = Ancestral polymorphism is V, Derived polymorphism is D
  VARIANT 153: note = Ancestral polymorphism is G, Derived polymorphism is D
  VARIANT 179..419: note = Derived polymorphism lacks residues 179 to 419
MIATHLSPGLKQYRFPSPLHSTSHNHHLPVHLPLPRRHRNFAKPAAAVPDLLASVESVASAASVLAAIVLVHESGHFLAAASRGIHVSQFSIGFGPALARFRLGPVEYALRAIPLGGYVGFPDDDPESGFAPDDPDLLRNRPVPDRLLVVSAGVAANLAFAFLIVYAQALTVGVPVQAQLPGVLVPEVLPGSAAARAGLLPGDIILAVPGAAPDPSVPVLVDLIKASPSREVPLTVSRAAPGAVDRRSVELTVVPDTSADGSGRIGVQLSPNVRVTRVRPQNLADATVLAVREFTLLTGTVFDGLRQTLLNFSQSADKVSGPVAIIAVGAEVARSSADGLFQFAAVINLNLAAINLLPLPALDGGTLALILLEAARGGRKIPREVEQGIMSSGILVVLMVGMFLIVRDTLNLDFIKEIL

SEQ ID NO: 12940 - protein, 470 aa, Zea mays
  VARIANT 22: note = Ancestral polymorphism is R, Derived polymorphism is G
  VARIANT 83: note = Ancestral polymorphism is G, Derived polymorphism is D
  VARIANT 238: note = Ancestral polymorphism is A, Derived polymorphism is G
  VARIANT 243: note = Ancestral polymorphism is A, Derived polymorphism is D
  VARIANT 335: note = Ancestral polymorphism is M, Derived polymorphism is T
MGAFLLFVCLLAPVVVLACAVRGRKRRASSAAAGGKALPLPPGSMGWPYVGETFQLYSSKNPNVFFARKQNRYGPIFKTHILGCPCVMVSSPEAARFVLVTQAHLFKPTFPASKERMLGPQAIFFQQGDYHAHLRRLVSRAFSPEAIRGSVPAIEAIALRSLESWDGRLVNTFQEMKLYALNVALLSIFGEEEMRYIEELKQCYLTLEKGYNSMPVNLPGTLFHKAMKARKRLGAVVAHIIEARREGERQRGSDLLASFLDDREALTDAQIADNVIGVIFAARDTTASVLTWMVKFLGDHPAVLKAVIEEQQEIARSKGSSGEPLTWADTRRMRTTSRVIQETMRVASILSFTFREAVEDVEYQGYLIPKGWKVMPLFRNIHHSPDHFPCPEKFDPSRFEVAPKPNTFLPFGNGTHSCPGNELAKLEMLVLFHHLATKYRWSTSKSESGVQFGPFALPLNGLPMTFVRKD

SEQ ID NO: 12941 - protein, 104 aa, Zea mays
  VARIANT 1: note = Ancestral polymorphism is M, Derived polymorphism is I
  VARIANT 9: note = Ancestral polymorphism is A, Derived polymorphism is V
  VARIANT 22: note = Ancestral polymorphism is G, Derived polymorphism is R
  VARIANT 25: note = Ancestral polymorphism is R, Derived polymorphism is H
  VARIANT 75: note = Ancestral polymorphism is G, Derived polymorphism is D
MVGSQLINAGNHVVAKYALSVGVNRVVFCVIRGLLAKSPPSRSSPSSNIAARTTSLCHSATCYLTWNLLVSFILGLTPLTRFGAMLNLKPVVMSWTRGLQICFV

SEQ ID NO: 12942 - protein, 393 aa, Zea mays
  VARIANT 243..393: note = Derived polymorphism lacks residues 243 to 393
MAARERDGEGRRAHLTMVGVQLVYAGYHVIAKQALNVGVNRVVFCVFRDLLALSVLAPLAFFQHRISSVQARPPPLTRRLVGSFFLLGLTGVFGNQLLFLLGLSYTNPTYAAAIQPSIPAFTFILALIMGTETVSLISNEGRAKIGGTVVCVLGAVLMVLYRGPAVFGSSELELDVYSHGVIADMTQPEPAGPLISLFMAFGLENWHIGVLCLIGNCLCMATYLALQAPILVKYPSSLSLTAYSYFFGVVLMVISGVFATNDKHDWSLTQSEVAAVVYAGVMASALNYVLLTWSNKILGPAMVALYSPLQPVVSALLSMIFLGSPIYLGSIFGGLLIIFGLYLVTWARHREKLASIGVPYVTCVSESLDGPSHVAKTVPFISLSRLWDVPHES

SEQ ID NO: 12943 - protein, 372 aa, Zea mays
  VARIANT 222: note = Ancestral polymorphism is V, Derived polymorphism is D
  VARIANT 263: note = Ancestral polymorphism is A, Derived polymorphism is T
  VARIANT 267: note = Ancestral polymorphism is G, Derived polymorphism is R
MMAAAAISGSSGHLVVSSPRFRQPLTLPSRSGRPIAAAASAVARGGVAVAAVSSPAVSAVAGKDAKQAPKDFLHINDFDKDTIMNILNRAIEVKAAIKSGDRSFQPFNGKSMAMIFAKPSMRTRVSFEAGFFLLGGHAIYLGPDDIQMGKREETRDVARVLSGYNDIIMARVFAHQDILDLAKYAAVPVINGLTDYNHPCQIMADALTMLEHVGRIENTKVVYVGDGNNIVHSWLLLAAVLPFHFVCACPKGFEPDAKTVEIARSAGISKIEITNDPREAVKGADVVYTDVWASMGQKEEADYRKQKFQGFTVDEALMEIAGPQAYLMHCLPAERGVEVTDGAIEAPNSIVFPQAENRMHAQNAIMLHVLGA

SEQ ID NO: 12944 - protein, 317 aa, Zea mays
  VARIANT 146: note = Ancestral polymorphism is L, Derived polymorphism is P
  VARIANT 141: note = Ancestral polymorphism is A, Derived polymorphism is D
MLAVLGIRKYHTDPAWSAGQQQQHRARGRSATPHSPVASSRFRHRGSAPAIQIKSDPCSGNKGIVSSWVVGTAMAGPAVLNERILSSMSQKHVAAHPWHDLEIGPGAPEFFNCVSLPFTSKFTNMVGVLNSDITDGYQLKAFSFILTLSLAWCVIEVVEIPRGSKVKYELDKASGLIKVDRVLYSSVVYPHNYGFIPRTLCEDNDPLDVLILMQEQVVPGCFLRARAIGLMPMIDQGEKDDKIIAVCADDPEFRHYTDITDLPPHRLQEIRRFFEDYKKNENKEVAVNEFLPAKDAINAIKYSMDLYGSYVIESLRK

SEQ ID NO: 12945 - protein, 310 aa, Zea mays
  VARIANT 266: note = Ancestral polymorphism is D, Derived polymorphism is Y
  VARIANT 220: note = Ancestral polymorphism is P, Derived polymorphism is S
  VARIANT 209: note = Ancestral polymorphism is P, Derived polymorphism is T
  VARIANT 152: note = Ancestral polymorphism is T, Derived polymorphism is I
MSREAARTRSRVLVVGATGRLGGSIARASLAAGHPTFALVRPHHFARPDSPVLGPLVAAGATLLQGSLEDYSSLLEAVCQVDVVICAVSTKQVLEQKPLIRAIKEAGCVKRFIPAEFGADPTKVQICGMDYGFYEKKIEIRHSIESEGIPHTYICCNFFMRYLLPSLVQPGLDAPPRDEIKIFGEGNTKGVFVKENDVAKFTICTIEDPRTLNKTLYLRPPGNVFSMNELADLWESKLKKSLKRLYVTEEQLLKEIHDAPFPLKMDLIFIYSAFVKGDHTYFEIDLSMEGTQLYPHVNYTTVNEYLDTLV

SEQ ID NO: 12946 - protein, 437 aa, Zea mays
  VARIANT 98..437: note = Derived polymorphism lacks residues 98 to 437
  VARIANT 148..437: note = Derived polymorphism lacks residues 148 to 437
MSLKSIVRELKEMRDGIGSMSRRGGSGSDGRAAGHARSGSRHSWPSLWAEQQQPQRQGQGQGLGQEGPRHQHQGRWADLPPELLLDVIQRVESSEATWPARRQVVACAAVCRSWREVTKDVVKTLEECGRITFPISLKQPGPRELPVQCFVRRERATSTYLLYLGLSPSMNVENDKLLLAARKVRRATRTSFVISLVSDDFSRSSSTYVGKLKPNFLGTKFTIFDSQPPPDAVALPNNRPSKRQSKQVSPRLPLGNYNVATVTYELTVLRNRGPRRMQCTMHSIPAECIQEGGKAPTPTGTVQSLDEPVPTLPSTTKGKEVAVQFSSTSLSADLSGPVSGNEAPLVLKNKAPRWHEQLQCWCLNFRGRVTVASVKNFQLVASVDPSLNVPAAEQEKVILQFGKIGKDIFTMDYRYPLSAFQAFAICLTSFDTKPACE

SEQ ID NO: 12947 - protein, 180 aa, Zea mays
  VARIANT 52: note = Ancestral polymorphism is G, Derived polymorphism is A
METVEEDVEEYSWREVVLPHLVPVVPGAQPELERETGERRRGRDLLVAVDFGPNSKHAFDWALGHIARMADTVHLVHAVSSVQNEIVYDKSRELMEDLAVEAFKTLLVRTKARIVEGDAGKVICREADRLKPAAVILGTRGRGLIQSVLQGSVSEYCFHNCKAAPIIIVPGKEAGEQSVL

SEQ ID NO: 12948 - protein, 384 aa, Zea mays
  VARIANT 169: note = Ancestral polymorphism is S, Derived polymorphism is R
MARCQGTVESLCQGLLDLDDDKFGAMCSAFGYLQEWPDLGAAMCGANLAVPPAVATPSAGDGNDSSSCSVSGGLRKRRPDAYLDAKGGANGMNKRPRGKQQPSGLSEIAAAPGKGKQERPKAGTKKKAEAAAAAAAAGQKTDYIHVRARRGQATDSHSLAERVRRERISERMRYLQELVPGCSKVTGKAGMLDEIINYVQSLQKQVEVPTHRHRPASSSPLLPASQLVIPRSLTAGSPCAQFLSMKIAASNPVVSFDIVEDLFGRQLKQACGPAAGQLEPSCLQMSMSPMQQVVHPSAAAGSTGFGPLDMVLSNLYAPAAASCPVSAAPSVSVAAGPSTIEPCLNVNGTAAAWDIGSQNLFSGFDAQFQSVESGCLLDNLKMEM

SEQ ID NO: 12949 - protein, 619 aa, Zea mays
  VARIANT 37..619: note = Derived polymorphism lacks residues 37 to 619
MLRRLRLRSPVCAVAGAAAAMASLTNVAYADGLFRRQSPPSNPGDEDNLGASAFGRDPETLERMARALREINNSPLAKQVFGLMRKQEETRLTELEAEKVQYAIYEKLRDMERMEKKAEDYRNSLQQEAQVKAQALRFEDELARKRMQTEHAAQRQQDAELVKMQEASALRREEARRATEQKILEEMIRTEKEKAEIDQEVNRAKALAEAEARVHEEKQSEEVTKRMMLERMKGEKEKWLAAINTTFSHIEGGFKALLTDRSKLIMGIGGVTALAAGVYTTREGARVTWSYINRILGQPSLIRESSMPKFPLPMSRLLKPSSASLSGGAGFENVILHPSLKRRIEHLARATANTKSHGAPFRNMLFYGPPGTGKTLVAREMARKSVSSVDLFVLAPSSIYRNTGLDYAMMTGGDVAPLGSEAVTKIHQIFDWAKKSKKGMLVFIDEADAFLCERNSTHMSEAQRSALNALLFRTGDQSRDIVLVLATNRPGDLDAAITDRIDEVIEFPLPGEEERFQLLKLYLHQYILKEEGKGSWGALFKKQQRKIQVNGISDDLLREAARRIDGFSGREIAKLVASVQAAVYGRPGCTLDPQLFSEVVDYKVTEHHQRIMLASEGMA

SEQ ID NO: 12950 - protein, 151 aa, Zea mays
  VARIANT 95: note = Ancestral polymorphism is R, Derived polymorphism is G
  VARIANT 94..151: note = Derived polymorphism lacks residues 94 to 151
  VARIANT 86: note = Ancestral polymorphism is R, Derived polymorphism is C
  VARIANT 81: note = Ancestral polymorphism is D, Derived polymorphism is H
  VARIANT 78: note = Ancestral polymorphism is A, Derived polymorphism is T
  VARIANT 74: note = Ancestral polymorphism is Q, Derived polymorphism is E
  VARIANT 43: note = Ancestral polymorphism is A, Derived polymorphism is S
  VARIANT 42: note = Ancestral polymorphism is R, Derived polymorphism is C
  VARIANT 41: note = Ancestral polymorphism is R, Derived polymorphism is C
  VARIANT 39: note = Ancestral polymorphism is R, Derived polymorphism is C
  VARIANT 28: note = Ancestral polymorphism is V, Derived polymorphism is I
MTVVAVESDEPRTESSLERGTIIYNLLVTLPFPSGLISRLRRAFLLYRFTNDLVSRSSLHMLQLLVLLHVSASQNATAHNDVHVMRTDIKEQKQRWSFILYGASRIHLLQKHHKSCLGHYTSASHSATWHFQSEVLEERQIQLPAYLGSGR

SEQ ID NO: 12951 - protein, 328 aa, Zea mays
  VARIANT 272: note = Ancestral polymorphism is D, Derived polymorphism is V
  VARIANT 139: note = Ancestral polymorphism is R, Derived polymorphism is G
  VARIANT 38: note = Ancestral polymorphism is A, Derived polymorphism is V
MVNFIEAQKPVLSRLMKMAGLRPIEMELEPGTTMHVWAPKHHVGKKGTTISPLEPTAAKKKKKNRKSPESRPNVVLIHGFAAEGNVTWQFNFGVLVSRYNLYIPDLMFFGKSSTSSADRSPDFQAECVAGALARLGVARCDVVGFSYGGMVAFKLAEARPGLVRSLCVSGSVVAMTDAVNRETMERLGAGSSAELLMPDTLKGLKALLSVSMYRKMWFPDRFYKDYLKVMFTNRKERMELLQGLITSNTDAKIPVFQQKIMLLWGEEDKIFDIELARKMKEQLGDNCFLYGIRKAGHLLHVERPCAYNRQLQRWFAYVNSTEDHVQAR

SEQ ID NO: 12952 - protein, 459 aa, Zea mays
  VARIANT 305..459: note = Derived polymorphism lacks residues 305 to 459
MEKSPGAAPTSSPEEEVAADGRGHVEDATGQKEQATPVVLKKGPWTAAEDAMLMDHVRHHGEGNWNAVQRVTGLLRCGKSCRLRWTNHLRPNLKKGSFSPDEELLIAQLHAQLGNKWARMAAHLPGRTDNEIKNYWNTRTKRRQRAGLPVHPPPEVQLQLALARRCRYDDFSPLPSPQELSGVQALVGAAASAGYASSRPAPLDLARQLTQTTNQQTETVQFLSPPPFSAPSSPWARPFARNAQYFQLAHSSSPVSPTTPDLSLGYGARSAGADQSRLPPLSPSPCPRVVELPSNQYAQPTPPASAAATALGGGGAALPDHQNAASLEKMLRELHDVIKVDPPALVPASGGAALEWHGGGEFVSGLQALQQHRVDDMDTLFGLLHPPLRRAPETVAAAAAGSTHSGSTSQHSSDDQKPTDVVGLGLDLDLQVAGSTVSSDQEDWGLDAVCQWSSVSRIC

SEQ ID NO: 12953 - protein, 653 aa, Zea mays
  VARIANT 64: note = Ancestral polymorphism is G, Derived polymorphism is E
MDQHDSMADSPRRRHNLLRDKVQLVKRKDSDRYEIVRFHDPLSFEKGFFVVIRACQLLAQHNDGIIFVGVAGPSGAGKTVFTEKVVNFMPDVAVISMDNYNDATRIVDGNFDDPRLTDYDTLLENIHGLKEGRSVQVPIYDFKSSCRTGYRTVDVPSSRIVIIEGIYALSEKLRPVIDLRVSVTGGVHFDLVKRVLRDIQRAGQEPEEIIHQISETVYPMYKAFIEPDLETAHIKIINKFNPFSGFQNPMYILKSPRSLGPEKIKAVLGDDHTESNEETYDIYLLPPGEDPEACQSYLRMRNREGKYNLMFEEWVTDNSFIISPRITFEVSVRLLGGLMALGYTIAAILKRSTRVFSDGKATVKIDWLEQLNRQYIQVQGRDRLYVKSVADQLGLDGSYIPRTYIEQIQLEKLINDVMALPEDLKTKLSIDDELVSSPKEAFSRVSADRRNKLMKSGLSQSYSTHGDKNIVKLSKLTETNRRFGGGRALEPPAINQGAITQLSEQISTLNERMDEFTSRVEELNSKFTVKKHLPSQQNLALPNDACNGSTPTNLFVSHLGNGTLIPHSSSSNQLSKDSPMIEEIMNITRGQRQVIHQLDNLTNLLHEHLVLTRQTNNTASRNRVLDSDTLICPLICLTVASIGYFMFKGLSRG

SEQ ID NO: 12954 - protein, 373 aa, Zea mays
  VARIANT 61..373: note = Derived polymorphism lacks residues 61 to 373
MASSALAHSAARPSAQPTVDSRTRSAFADAPDSVEARRARTAAGTAPWRTISPRATRHNPQMAARQERLVSTAFLSRAPISSTVPTRRTSSDDLVAAAFASPAALTSNSSASLAASILASRPLPPCFTRASDAVEAAASAARPVATRFLFESSMPSEAKIKASTLVAASMPSTPVSSALLQRTDATVSATRPAPGIDSFNSYYDPSLKKAQRALLGSHGVFVVEGDINDGRLLAKLFDVVPFTHVLHLAAQAGVRYAMENPAAYVHSNVAGLVSLLEACKDADPQPTVVWASSSFVYSLNDRVPFSGLRGRGHRGRSQGHGAGDPGPPHPPPSPIRHQHRSRRWKVSGAAASMEGERGGPRRSAINTDPVDGR

SEQ ID NO: 12955 - protein, 1493 aa, Zea mays
  VARIANT 829..1493: note = Derived polymorphism lacks residues 829 to 1493
MLMDPPVMQMDCKLKNDVDKTSSIDYDRKVTISHDDYGWAGSDVKPKDDIVCNPVEVSNACQTGINEVLDSASKNSPLNLGDLPQGAELRNKNGDSSYSNVKLQLNSSAGNNNGLQTDDDNFTKQYFGKKDMHHRQEEMHPSSNTVSLPTSCRLNGDATPSEEEKIAEDRVKVDGNVDAVIKEVETDLVGCHAHQKEFQCTLQDLSEIACSIDLVHNTSSPQGENKKPVSPLNGMGHYVDNNSCNGDTNYKGEELNMGDAGDEDHAIALWVKWRGKWQTGIRCCRVDCPLPTLRAKPTHDRKSYVVVFFPRTKTYSWVDMLLVLPIEECPLPLVNGTHRKWRKLVKDLNIPRRFNMQNLAVFMINLIDELHIEAVVDDARKATTWKEFALEASCCRDYTDLGKMLLKFQNMILPDYISYEWLQNSFKMWNQKCMNAHDAETIEMLCESLHGNKLKELRNASVQPELIPEWNRWKQELIKQYFSLHPAGNVGNFEKNNCYDDPALDQQGSRKRPKLEVRRGEIQISHMGEADYRTPTEDPNQNNLPGNSVMHENVGALGSTDQNNSVTLPGSFGTNENTISSSANAALQNARLDLDSFKSSRQCSAHIEAKGRQCGRWANDGDIYCCVHQSMHFLDHSSREDKALTIEAPLCSGMTNMGRKCKHRAQYGSTFCKKHRLQTNLDAMHPENLLDPSEVLHMGEEPPNKWVEEISKSQAMYSIDLETDKKVQDAVKVKLMTIVSIENSGEKGAMEKADMCVASTSITNTDDTSLCIGIHSHDSIVECQDYAMQHTLYCEKHLPRFLKRARNGKSRLVSKDIFVNLLKGCTSRKDKICLHQACEFLYWFLRNNLSHQHTSLASEHMPQILAEVSKNPDVGEFLLKLISTEREKLANIWGFDTNRSKQIYSENKEGSLVLHKEGTNLSSGPKCKICAHQFSDDEALGLHWTTVHKKEARWLFREGTNGLSLYDSHNIEDANGSQKFICRLCGLKFDLQPDLGRHHKVAHMDSDVVGHSSLGRGKYQLNRGRHYYSAFKKSLRPTSTLKKRSSSGIEKNFKFQSSALTSQIIQSETSSFGKLQDFQCSDVAQTLFSKIQKTRPHPSNLDILSVARTVCCKTSLAAALEVKYGSLPENIFVKAAKLCSDNGIQIDWHQEVFICPKGCKSRYNSNALLPMQLTAVDFPEAPSVDPLNDDEMWAMEEYHYVLDSKHFGWKPKNESVVLYEDISFGREKVPIVCVIDMDAKDSLGMKPEELLSHGSSVPWQGFHYITKRLMDSSLINSENSMPGCACSHPECSPEKCGHVSLFDGVYASLVDINGTPIHGRFAYDENSKIILQKGLLVKLELFRTENKGWAIRAAEPIPQGTFVCEYIGEVVKADKTMKNAESVSSKSGCNYLFDIASQIDRERLRTVGAIEYLIDATRSGNVSRYINHSCSPNLSTRLVLVESKDCQLAHIGLFANQDIAVGEELAYDYRQKLVAGDGCFCHCGGTNCRGRVY

SEQ ID NO: 12956 - protein, 326 aa, Zea mays
  VARIANT 290..326: note = Derived polymorphism lacks residues 290 to 326
  VARIANT 199: note = Ancestral polymorphism is L, Derived polymorphism is H
  VARIANT 182: note = Ancestral polymorphism is A, Derived polymorphism is V
  VARIANT 114: note = Ancestral polymorphism is R, Derived polymorphism is L
MLTVMLPLLIAAAAAAGALALIVATRLLREDAVASLRREIREVLTALVADDEDGDGESASPPPPSVLITGFRAHGKSSLVNTACRALAAEDGPLLLRAEASPPGGGTDGLRRLLRVNAVVAGADGDSAGAGESDAVELLDAPPLPEAFRLKREDVDAAISVGDPECVVFVLRCDAPTKERSAAIKCLPEISAAVRNKGLNLIVVLTFKKATRSIRQAEELLREVSFRARTDCVYFIENYTWSKNGPNLRHPPVIKNEFETHFTVLTIIRQCLEFIKLNRSQSKDKKRNGKQEKAPEPKPKNPRTETKQYRKIKEPSVRLFFNGSET

SEQ ID NO: 12957 - protein, 172 aa, Zea mays
  VARIANT 5: note = Ancestral polymorphism is R, Derived polymorphism is G
  VARIANT 20: note = Ancestral polymorphism is P, Derived polymorphism is R
  VARIANT 33: note = Ancestral polymorphism is S, Derived polymorphism is F
  VARIANT 43: note = Ancestral polymorphism is F, Derived polymorphism is L
  VARIANT 155: note = Ancestral polymorphism is F, Derived polymorphism is I
MAMRRAAQQAARFAMGPHVPHVIAPAERSLHASAASKKIVGVLYKGGEYADRNPSFVGCAEHALGIRGWLESQGHQYVVTDDKDGPNCGKRAVRARAHVTITTEQQAPAPKDHPWRYMPNNAMTPHISGTTIDGQLRYAAGVKDMLERYFKGQDFPVQNYIVKEGKLAGQYQ

SEQ ID NO: 12958 - protein, 417 aa, Zea mays
  VARIANT 260: note = Ancestral polymorphism is A, Derived polymorphism is T
  VARIANT 9: note = Ancestral polymorphism is I, Derived polymorphism is T
MDWSTRFRIRNPSPAASHFAGHRRSQADRVFLRTMASAAPVEEPTAAAEAKGRLTGDSFIRRHLRTLAPYQPILPFEVLSARLGRRPEDIIKLDANENPYGPPPEVAAALGSLKFPYVYPDPESRQLRAALAEDSGLESDYILAGCGADELIDLIMRCVLEPGDKIVDCPPTFTMYEFDASVNGALVIKVPRLPDFSLDVDLIVEVVEQEMPKCIFLTSPNNPDGSVINDEDLLKILDLPILVVLDEAYIEFSSLQSRMAWVKKHDNLIVLRTFSKRAGLAGLRVGYGAFPLSIIEYLWRAKQPYNVSVAAEVSACAALQNPTYLENVKNLLVKERERLFNLLKGIPFLKPFPSHSNFILCEVTSGKDAKKIKEDLAKMGVMIRHYDKKELKGYIRISVGKPEHTDALMKGLNALRL

SEQ ID NO: 12959 - protein, 244 aa, Zea mays
  VARIANT 44: note = Ancestral polymorphism is L, Derived polymorphism is P
  VARIANT 40: note = Ancestral polymorphism is K, Derived polymorphism is N
MSSCAGETGLVVWCCCPCLVLQVTVFLLVRLPRKVVVKTKRIILRRRHRRRPPAPSNAAAGLKMDDLLDLDDDGFGAAFGVGEEDVGGGGGGDGDGDDSANDWKGRWCFAVVRDDGVWEAIIEQEGLFWFGSFWGQREQERSAPEGEDRMGGSFRLPVALERSNAFVSPLHCNHQYHVDFDICHDLYGLIIEEHVPHLPAEVPSYIVSHQVDDELDGVMASSSDAVSRTTRESSTLATTMRPSA

SEQ ID NO: 12960 - protein, 367 aa, Zea mays
  VARIANT 25: note = Ancestral polymorphism is R, Derived polymorphism is C
  VARIANT 29: note = Ancestral polymorphism is Q, Derived polymorphism is K
  VARIANT 126: note = Ancestral polymorphism is P, Derived polymorphism is L
  VARIANT 281: note = Ancestral polymorphism is Q, Derived polymorphism is L
  VARIANT 349..367: note = Derived polymorphism lacks residues 349 to 367
  VARIANT 350: note = Ancestral polymorphism is C, Derived polymorphism is Y
MSPLRRARSTLLLLHYVAASHFLLCAPIQRTAAATLPDPAPLDPALILPSATSVQPTATTIPGGTIPAFPEQSDSLAGSSSACPLAPSPALLPAVRSSCATDDGALPPRLRCCPALAAWLFAAYAPTALAERPPAAAAAAATVDMPLPPDDSETCAGAADRALRAAGAALPRPPGAGGNGTCDVAFCYCGVRLRRLACGSPPAEGGMWSPADAAARELEKDCAQPGVPGCSKCLLALTTIKATNPEGGAGAKAPGKKKEQIDRSTASDRDCELMGLMWVLQRNATRYGAAATTVIQALMAVDEAFAAGVTVAADDTGVAAACSLPVDDDMPLPAEYAQVSRASDAPRLYYFLLVLLSILSFRFVYSL

SEQ ID NO: 12961 - protein, 467 aa, Zea mays
  VARIANT 304..467: note = Derived polymorphism lacks residues 304 to 467
  VARIANT 174..467: note = Derived polymorphism lacks residues 174 to 467
  VARIANT 67..467: note = Derived polymorphism lacks residues 67 to 467
MENHGKLDGWDEVLEEEDELASVCKYPISTSYLSYGTSRRGKSVKKPRFSLRGYDFVPLDVKTDNLCIGEQDGSSAVPSTKASQTMVAERLENVEEQTEDLAPEFALPPKANTLVSELLDNLQRRGGSFVRTPSLLHQHAPSISIREQEVSSGVPPTKASQALMDEPFENDNGQTEELPSELPCSIKRPKFSVAELLEDLQGRSGSYVETASLSHQHTRAKHWKPKFLSSEKKTIAILGDRSIDSEDPLEHVIDGTSSEEEDATQNHLSLVNKDENQQTMADLFQEVFNPTNMDGAMKSMRSTGAGNYGRMQQIMHMEKDWHVEFSRQYSREHSYSGGAVGDLKGTTVQIMSRSLEGKLTVCSCMFQEKGNVCDPCLHLPKTPIYSCGIMFSWNLCFMQDATISNASADGTMDESRTRRTIIFSPKICNNVDLLVGNIIHIFPPWKEVKIQEEHVIICTYFSHHHRT

SEQ ID NO: 12962 - protein, 434 aa, Zea mays
  VARIANT 59..434: note = Derived polymorphism lacks residues 59 to 434
  VARIANT 266: note = Ancestral polymorphism is P, Derived polymorphism is S
  VARIANT 280: note = Ancestral polymorphism is S, Derived polymorphism is L
MAPSLVVSARHAHAVPHRRGRRQRVVVASSGGAGPPPKLVTFLGKGGSGKTTAATIAAQYYASEGFKTCLVVQSQDPTAEHLMGSKIGNSLTECVANLSAIKLETGKLLLEPLDRLKKVDAQVNFTQGILEGIVGEELGVLPGMDSICLVLALQKLLNFFSSGRSNSQSEFDVIVYDCNNTEEILRLIGWILNLVLCSTKVRSYLRYVRDLAEKTDIGRLASPSLLKLIYDSARPNGKISEGRLSTEIWNEIEQLLEKISVWFADPSKLACFLIMDPRTSISVSSALRYWGCTTQAGGQICGAFGYTEDPSEMHREVAQKFVPLSLSFLPFLPNDSSVDWSRALSSLSQNTKEQLRNASTWVYPSVSFDSVQKSVTLFMPGFDKSEIKLYQYRGGSELLIEAGDQRRVIKLPLTMQGKVQGAKFVDRNLVVSIR

SEQ ID NO: 12963 - protein, 157 aa, Zea mays
  VARIANT 7: note = Ancestral polymorphism is R, Derived polymorphism is L
  VARIANT 14: note = Ancestral polymorphism is F, Derived polymorphism is L
  VARIANT 136: note = Ancestral polymorphism is K, Derived polymorphism is T
MSLALSRMMLDRFFPDAAGGARPPTDWKETRDAHVFRMDVPGLAREQVAVELVDGRVLRVRGGGGKQDGDGAAAGHEEEEGGGDGGGDASVRWHCRERAGARAFETQFRVPDDAAADEARAAMADGVLTVTVPKRKGGSGKKRRHGGSGPVCCKFWP

SEQ ID NO: 12964 - protein, 523 aa, Zea mays
  VARIANT 446..523: note = Derived polymorphism lacks residues 446 to 523
  VARIANT 407..523: note = Derived polymorphism lacks residues 407 to 523
  VARIANT 341..523: note = Derived polymorphism lacks residues 341 to 523
  VARIANT 150: note = Ancestral polymorphism is A, Derived polymorphism is V
MKYNTRKDASGGGGGAPFAIPCVDIKSFVASLAFLTLFVVFWQLQPYGSVLTAARTSASPPCTLLPTTAAIDLASPDTTSSTAAKTDQPAAAAAVSATAAGANAAPVWLAKAARPARPEDPNKRVFRPYGSAAALFVQMGAYRGGPRTFAIVGLASKPTHVFGTPYFKCEWLPNPTAGDPSPRPVRTKAYKMLPDWGYGRVYTVVVVNCTFPSNPNARNAGGKLLVHAYYSTASRRHERFVALEEAPGSYDESRFSPPFQYDYLYCGSSLYGNLSASRVREWVAYHARFLGPRSHFVLHDAGGISPEVKAVLDPWVRAGRVTVQDIRAQAEYDGYYYNQFLVVNDCLHRYRHAANWTFFFDVDEYLYLPNGQKLAEVIGQLSGYSQFTIEQNPMSSKLCLQDPSRNYSREWGFEKLVFRNSITKVRRDRKYVIQGRNVYSAGVHMSQNLYGRTTHKTEGLIRYYHYHDSINVMGEPCREFVPMPANGSKTMFEGVPYVYDDNMKRLAGEIKRFEKVTLGSART

SEQ ID NO: 12965 - protein, 151 aa, Zea mays
  VARIANT 16: note = Ancestral polymorphism is H, Derived polymorphism is R
  VARIANT 35: note = Ancestral polymorphism is R, Derived polymorphism is Q
MQASRSRSRSRMGSLHHPRSPEENYVRLQGRRGRRRGFRLCPRNRFFSVRRLRVELLTFLGLVGRYVRLLVRKLSASSSGGGGGCARRTGSRRVLVVTTTTTTAGKKYKAPAPAPIVRSNSFYSQAIADCLEFIKRNSVPAEDYGSLSARR

SEQ ID NO: 12966 - protein, 324 aa, Zea mays
  VARIANT 173: note = Ancestral polymorphism is G, Derived polymorphism is S
MPGMDPGGGGSSRYFHQLLRPQQQQSSPLSPNSHVKMEHHRMSPDKSPVGEAEAGGSGAGADQPSSSAMVPVEGGGSGSGTGGTPTRRPRGRPPGSKNKPKPPIIVTRDSPNALHSHVLEVAAGADVVDCVAEYARRRGRGVCVLSGGGAVVNVALRQPGASPPGSMVATLRGRFEILSLTGTVLPPPAPPGASGLTVFLSGGQGQVIGGSVVGPLVAAGPVVLMAASFANAVYERLPLEGEEEETAAAAAAGAEPQDQVAQSAGPPGQQPTASQSSGVTGGDAAGGGGMSLYNLAGNVGAYQLPGDNFGGWSGGGGGGVRPPF

SEQ ID NO: 12967 - protein, 536 aa, Zea mays
  VARIANT 266: note = Ancestral polymorphism is E, Derived polymorphism is V
MDVRRLGGRIAAALRALGAGGSLSLPIPAWITNALAMISLVLSSCDLLRLCSDRDRRLRFSLGGREFVTVVCQLASIVYLFSLCGTGIPSADPETPARRDQGAGSPDQTRAADAPETLHGGDEEIVAAVVSGALPSHHLESRLGDCRRAASLRREALRRMTGRGVDGLPLDGMDYQAILGQCCEMPIGYVQLPVGVAGPLLLDGKQYHVPMATTEGCLVASVNRGCRAIAASGGAVSVLLRDAMSRAPVVKLPSIKRAAELKAFVETITNFEILSAVFNRSSRFGKLQGIQCALAGRNLYMRFTCSTGDAMGMNMVSKGVEDVLGYLQNDFPDMDLISLSGNYCSDKKAAAVNWIEGRGKSVVCEATVKGGVVQSVLKTSVQKLIELNIVKNLAGSAVAGALGGFNAHASNIVTALFIATGQDPAQNVESSQCITMMEAVNDGSDLHVSVTMPSIEVGTVGGGTCLASQAACLNLLGVRGPNRDSPGANAKLLATIVAGSVLAGELSLLSALAAGQLVKSHMKYNRSSKDVPGAAS

SEQ ID NO: 12968 - protein, 167 aa, Zea mays
  VARIANT 61: note = Ancestral polymorphism is P, Derived polymorphism is S
  VARIANT 75: note = Ancestral polymorphism is A, Derived polymorphism is V
  VARIANT 76: note = Ancestral polymorphism is G, Derived polymorphism is S
  VARIANT 79: note = Ancestral polymorphism is A, Derived polymorphism is V
  VARIANT 82: note = Ancestral polymorphism is H, Derived polymorphism is Q
  VARIANT 102: note = Ancestral polymorphism is R, Derived polymorphism is C
  VARIANT 103: note = Ancestral polymorphism is P, Derived polymorphism is L
  VARIANT 162: note = Ancestral polymorphism is A, Derived polymorphism is S
MASIVQRQPETANRPGGSDTRAFCLAMTNWRGGSVVALRRRWHTQCPAMDPVAGMMKHRGPLEVSARAPVKIILAGEHAVIHGSAAVAAAIDLYTNSSSLLRPAGPGEGGDAGSGAVELDLRDSGLTFSWPCSRLRGALGEEISTNPGAPAPCSPDQLAAIARLLQD

SEQ ID NO: 12969 - protein, 138 aa, Zea mays
  VARIANT 64..138: note = Derived polymorphism lacks residues 64 to 138
  VARIANT 102: note = Ancestral polymorphism is G, Derived polymorphism is R
MSTQGNCETHGAAVPGTKDAGTGKAGQSSGDQQEEKLPKCEQVDYGSEVEGCTDDENPGKRAALVTLVGNEYCGDEDERVQVLTIVKKDEPADDIVDHFNPGTVAGYSEAKGAVGASAATSAVRPAGSRSSSFHGVTR

SEQ ID NO: 12970 - protein, 618 aa, Zea mays
  VARIANT 401..618: note = Derived polymorphism lacks residues 401 to 618
MDSDYGVPRELSEVQKKRTLYQPELPPCLQGTTVRVEYGDAAIAADPAGAHVISHAFPHTYGQPIAHFLRKTAVVPDAKVISEHQAVRVGIVFCGRQSPGGHNVVWGLYEAIKAHNQNSKLIGFLGGSDGLLAQRTLEITDKVIASYKNQGGYDMLGRTKDQIRTTEQVNGAMASCQALKLDALVIIGGVTSNTDAAQLAETFAEAKCATKVVGVPVTLNGDLKNQFVETTVGFDTICKVNAQLISNVCTDALSAEKYYYFIRLMGRKASHVALECALQSHPNMVILGEEVAASKLTIFDITKQICDAVQARAEKDKNHGVILIPEGLVESIPELYALLQEIHGLHGKGVSVENISSQLSPWASALFEFLPPFIRKQLLLHPESDDSAQLSQIETEKLLAQLVETEMNRRLKEGTYKGKKFNAICHFFGYQARGALPSKFDCDYAYVLGHVCYHIIAAGLNSYMATVTNLKNPVNKWRCGATPISSMMTVKRWSRGPSATQIGKPAVHMASVDLKGKAYDVLRQNSSSFLLEDVYRNPGPLQFEGPGADSKPISLCVEDQDYMGRIKKLQEYLEKVKRIVKPGCSQDVLKAALSAMSSVTETLNIMTSSSTGQTPLSH

SEQ ID NO: 12971 - protein, 467 aa, Zea mays
  VARIANT 420..467: note = Derived polymorphism lacks residues 420 to 467
  VARIANT 410: note = Ancestral polymorphism is T, Derived polymorphism is I
MSDPRGRAAGPDRYGDEPHDLPLAEDANGEEAWQTPEKEAVAVSEGAAARSGDTTPDAEQESDDGEEGVGSPDQAEPNASGEGVPPVAATVEPDGIVSGAKVETNSEDAISHDADEEEKDDDDDSTQDASPIAEVNVEGESGAVHRLEVEPDPFLDGDASGTEEEQAAFMVELERFHKEHSLEFKPPKFYGKGLNCLKLWRQVAHLGGHEQVTVCKLWRQVGETFRPPKTCTTVSWSFRIFYEKALLEYEKHKVRTGQLQIPPPGLPQPSGADREVVVNQSSSARVRRDVAARAMQGWHAHRLLANGTYGDNILKDKDSMPSSSRDNLKSFGVLKRKKASSPEYALKSSCSKINKSEEDSMVIDVGEPADWVKINVRQTKDCFEVYALVPGLLREEVHVQSDPAGRLVITGDPEQPDNPWEITPFKKVFSFVDCGASSPVIFLDITRVYVSSVEEIGFHLSRYMMSS

SEQ ID NO: 12972 - protein, 1178 aa, Zea mays
  VARIANT 309..1178: note = Derived polymorphism lacks residues 309 to 1178
  VARIANT 324..1178: note = Derived polymorphism lacks residues 324 to 1178
  VARIANT 1030..1178: note = Derived polymorphism lacks residues 1030 to 1178
MEDYPEELRTPPVSLVSIVGCPELHPSISTALSSQQPPMNTLALPDFAKASILARSVKPRDPLAPPQPPAGILKKDWLLKHRTRVPAAVAALFRADQVSGDPAQWLQACSDLENLKSAIQGKNTKSVVVLVQAQANDELSEDVIVALRKRAEIDSKHLVVLVEHDEAEWNRSLNKLKNVFVELCAAFYKEEGRRIKARIEKKNFASVELSIRYCFKVAIYAEFRRDWPEALKFYEEGVRVLREMIGTSTRLPPTQRLVEIKAVAEQFHFKISTLLLHAGKVVEAITWFRKHIKSYERVVGTPEVAFLHWEWFSRQFLVFGELIETTSTTIPDTLSPRFGTADNTLTEWEFQPAYYYQLAATYLREKRYAIECSSSMANLTTEVNGVPESVMPSVYVGQYVRLFEQGDTVSLLPLSDTEYTSYALSEAERFQDSYEIIALFRKAYESFQSLGATRMASACSSGMAIEYYAAADFSNAKQLFDSVAGLYRQEGWTSLLWENLGYLRECSMKLNSPKDFISYSLEMAALPLFSGSGEENRENKIKSGPAGSPTISRRENIQQEVINVLERKQSSEGTYDGFNNAIEEVTHLDIDQISPLRMVLTASVAFHDQSVKPGSPLLVSVSLLSHLPSPVVVDQLEVQFNQSDCNFVMHSAQEDSLPSYSNLHGQVIQDTSSLTLFTNRWMRLTHEVKSGKSGKLECLSVKATISKHLVICCHAESPASMEDFPLWKFENQVETLPTKDTTLAFSGQKLIQVDEPDAQVDLVLNSAGPALVGELFTLPVIIESKGHAVHSGELKINLIDARGGGLLLSPREAEDSESHHVELLGVSTVSEDKESKEEADSIRKIQYSFGVVSVPTLSVGDSWSCKLEIKWHRAKSVMLYVSLGYSLGSSEEEALHRLNVHRSLQIEGQIPLLVSHQFLRSFRREPLLLSGIRSLGSDDKKCSLAMNESNMLIVTARNCTEVPLCLHSMTIQPDGDSEQLCSVQQISGISNRHAIVAPREEYKGIFSVNPRAISTNFRLGEICLNWSRDSSLGEDQDRLIIMKVQLPEVNIEEPPLVVGMECPPYAILGIPFTIYVKIHNSTSLLQEIKYSLVDSQNFVFSGAHNHAAFILPKSEHTVSHKFVPLGSGSQQLPRITVTSVRYSAALTPSASAATVFVYPSEPKFNLETSHSTSDEVVS

SEQ ID NO: 12973 - protein, 325 aa, Zea mays
  VARIANT 156: note = Ancestral polymorphism is G, Derived polymorphism is E
MEVVVAAKQKAKKHIHLFYCSECEELALKIAASSDAIELQSINWRSFDDGFPNLFINKAHDIRGQHVAFLASFSSPSVIFEQISVIFALPKLFIASFTLVLPFFPTGSFERVEEEGDVATAFTLARILSMIPKSRGGPTSVVIYDIHALQERFYFGDDVLPCFETGIPLLLQRLRQLPDAENITIAFPDDGAWKRFHKLLQHFPMIVCNKVREGDKRIVRIKEGLPEGRHVVIVDDLVQSGGTLRECQKVLALHGAAKVSAYVTHAVFPKQSYERFMASSSAGPGDRFAYFWITDSCPHTVKAIGQRPPFEVLSLAGSIADALQI

SEQ ID NO: 12974 - protein, 266 aa, Zea mays
  VARIANT 101: note = Ancestral polymorphism is P, Derived polymorphism is R
MVRRRNTVAAGVVPASADPDTISDSGSSTSAPPPQPGRKQTYSALQVARAGAPATPTLEDAQPVAVEMTINNYLRTYGRIPMACCCSEGQGPHLDLNALAPPQRDPPVICAYCNCAFCFGVHEIPSLDHGPGHVYPAPLVPVTLNLLTPPPVGPLYRDRRGPAAAPAPLLVCSSEQHFNATIGMLQRRQGSAPPLVWKCTCCLRVQPVAVGSEGANSPDLHATPPAPPPEPWTYAGAYWNYVEPGDEDMVRLHLHYDPLKLSLGRR

SEQ ID NO: 12975 - protein, 357 aa, Zea mays
  VARIANT 195: note = Ancestral polymorphism is G, Derived polymorphism is E
  VARIANT 167..357: note = Derived polymorphism lacks residues 167 to 357
  VARIANT 132..357: note = Derived polymorphism lacks residues 132 to 357
MLSGAISRLGARLRLHADPSPASPRLRVLSTRRGKRSSSTLSPADCDDEGSLRHLFVLSRDPECPPRLLVVQPRLRPGSLLESKLAEALNLANSLEERRDGFYHSEFGAKRAPPHLVVQNPASRGRSHAGIQLYASDGGGRGFVCGLQAGGVALFCWPSTPAPQWGQLRRIYNGPTPLADLAVGADHVAAYDASGKVVLWWRGGGRFPARADGAFRSLVSGDGFSCAVQANASAAVRCWGPQGSTVQEGLANASAAPYLAAGGAHACAVLASGAALCSGLDASAGALPRDLFGYGLAVGDSHACALRRPDHTAVCWTLGGPTTTLYEPAMGISFGFLVAGDNFTCGNSRKRRIQTCP

SEQ ID NO: 12976 - protein, 226 aa, Zea mays
  VARIANT 9: note = Ancestral polymorphism is G, Derived polymorphism is R
  VARIANT 22: note = Ancestral polymorphism is P, Derived polymorphism is L
MEWTTVETRDGAKLSVRLFKPPASGTGLEPEPREDVAVVLVHPYTILGGVQGLLRGMAEGVARRGYTAVTFDMRGAGRSTGRASLTGSTEVGDVVAVCRWVAENIKPRGILLVGSSAGAPIAGSAVDKVDEVIGYVSIGYPFGLMASVLFGRHNDAILKSEKPKLFIMGTKDGFTSVKQLQNKLKSAAGRADTHLIEGAGHFQMEGPAFDAQMVEIIIKFINSLPK

SEQ ID NO: 12977 - protein, 1431 aa, Zea mays
  VARIANT 763..1431: note = Derived polymorphism lacks residues 763 to 1431
  VARIANT 584..1431: note = Derived polymorphism lacks residues 584 to 1431
MAGKSKGGKNKGKAQVVGHSASAEPEVLATDGAELVNPDNGEVSEPGEVSDPPATEDGVADVEKGDGDAPEVVQSAKKPAEGELHLYPVPVRTQSGEKLELQLSPGDSVIDVKQFLLDAPETCFYTCYDLILHTEDGSAHQLEDYNEISEIADITSGGCSLEMVAAIYDERSIRSHLRRVRELLSLSTLHVSLSTSLTLQQESAQGKSADSGKSPIQELDGLNFMEDSAGALTNLLASTPAEIKCVESMVFSSFNPPPTYRRAQLFHVSAEDIFHIMVLMPKFCNIVVTLSLSSWNFVELTLDSGFLRLHGDLIYIDVATLEGNKYCITGSSKSFYVNSSNKNIFDSKPTKQGLEASTLVGLLQKISAKFKKGFREVLDRRASAHPFENVQSLLPVTSWLGAYPVPEHRRDAARAEDSVVLSYGTELIGMQRDWNEELQSCREFPHGNPQERILRGRALYKVTCDFVDAAVKGAVGVINRCIPPINPTDPECFHMYVHNNIFFSFAVDSDYEDISKDHKPDCQNGSSRSTKVSSPDVITKPDANHGKSAEVVDSKSEEAQLADSEQATYASANNDLKGTKAYQEADVSGLHNLAMAIVDYRGHRVVAQSIIPGILQGDKSDSLLYGSVDNGKKISWNETFHSKVVEAAKQLHLKEHVVLDGSGNPIKLAATVECKGIVGSDDRHYILDLMRVTPRDSNYIGQEHRFCVLRPELIASFVEVESIKQSLKQKVPDAPVASTSDAKATSVEGDDKSEESSVHTHEENDNSSSEILFNPNVFTEYKLAGSAEEIAADEELVKRAGTYLVDIVIPKFVQDLCSLDISPMDGQTLTDALHLHGINIRYLGKIAGMVKHLPHLWDLFSTEIIVRSAKHVIKDILRQSLDHDIAPAIAHFLNCFVGKVLGASTKSSLSNAQSKTLKGHENSQTQKSTKGPKLSHAAVSRKSLSTYSHLTSDGIWFSIKEFAKSKYQFEVPDEARLSAKRVAVLRNLCRKVGITIAARKYDMDASSPFEASDMLNLQPVVKHSVPTCTDAKNLMEAGKVRMAEGTLNEAYALFSEAFSLLQQITGPMHKDAANCCRYLAMVLYHAGDTAGAIVQQHRELIINERCLGLDHPDTAHSYGNMALFYHGLNQTELALRHMSRTLLLLSLASGPDHPDVAATLINVAMMYQDASNMNTALRYLQEALMKNERLLGPDHVQTAVCYHALAIAFSCMSLYKLSIQHEKKTYDILVKQLGENDSRTKDSENWLNTFKLREEQVNAQKQKDQGANASDNAVKFLKANPAFLQAMKAAALQSGDRSANVNRSLNAAVVGEGVPRLRGVDERAARATAEARKKAVARGLNVRNGPAANHASDELAQILKLINTASGSSTSASAKTEESASEGQATNGSVQNGAATDAKSADINVPPAPANQPVGLGATLELKKQKSKQKS

SEQ ID NO: 12978 - protein, 118 aa, Zea mays
  VARIANT 88: note = Ancestral polymorphism is P, Derived polymorphism is L
  VARIANT 45: note = Ancestral polymorphism is P, Derived polymorphism is R
  VARIANT 11: note = Ancestral polymorphism is C, Derived polymorphism is Y
MHMRAINLPPCRALHSQAIDGSTELASQPASSQLARRARPSSSPPFRSVPSRPPPPPHSGMEMKKIACAVLVAASAATVALAAEAPAPGPTSGSSAVAPAVGAALGAAVASFFAYYIQ

SEQ ID NO: 12979 - protein, 66 aa, Zea mays
  VARIANT 3: note = Ancestral polymorphism is S, Derived polymorphism is F
MASRVAVLLVAVAAVLFAAASAQEMDLGVPPAPAPDTGAAAGAAASVLAVACSAVFFILVAGGLVQ

SEQ ID NO: 12980 - protein, 147 aa, Zea mays
  VARIANT 49..147: note = Derived polymorphism lacks residues 49 to 147
  VARIANT 51: note = Ancestral polymorphism is I, Derived polymorphism is T
MAHHSVCLQLLSYGYIALAGHRKKPVGEFWDDINIVHRVKLMTNTNNEQIIKIIGPRLSAMHTRSFMYSVSHFSASRSRACNDLRCGVEGGADAQQTSQSSYRQGDEVPYGDNFPLHNRILQQQMDLLKRRVTKPPKSSNKQAQSLC

SEQ ID NO: 12981 - protein, 722 aa, Zea mays
  VARIANT 92..722: note = Derived polymorphism lacks residues 92 to 722
MSGFVGVVVSDPSLQGQFTQVELRSLKAKFVSLKRDSGHVTTKNLPGLMKKLRGLNEVVSEEEIAAFLSESYPDSDHEIEFESFLREYLNLQAQVSAKEGGAGGGRGGKPSFLKSSITTLLHNLNQAEKSSYVAHINTYLREDPFLKKYLPIEPSGNQLFDLIRDGVLLCKLINVAVPGTIDERAINKKRVLNPWERNENHTLCLNSAKAIGCTVVNIGTQDLVEGRPHLVLGLISQIIKIQLLADLNLKKTPQLVELFDDSKDIDEVLSLSPEKMLLRWMNHHLKKAGYKKTVNNFSSDVKDGEAYAYLLKALAPEHSPETTLDTKDPNERAKLVLEQAEKLDCKRYLTPKDITEGSANLNLAFVAQIFQHRNGLTSDTKQVTLTQTATHDDVLLSREERAFRMWINSLGVESYVNNVFEDVRNGWVLLEVLDKVSHGSVNWKLASKPPIKLPFRKLENCNQVVKIGKQLKFSLVNLAGNDIVQGNKKLIVALLWQLMRFNILQLLNKLRFHSQGSEGKEISDADILNWANCKVKASGRTSRIESFKDKSLSNGMFFLDLLSTVQPRVVNWKVVTKGETDEDKKLNATYIISVARKIGCSVFLLPEDIIEVNQKMILTLTASIMYWSLQKQPQSQSELTEQSEPSSMTSDAASEVASEDGASTTAPSESEEVNSLSDSISNLTTDDATSNAPSAENGNGNSAFMMPKVVATRSDIFNTSAS

SEQ ID NO: 12982 - protein, 197 aa, Zea mays
  VARIANT 26..197: note = Derived polymorphism lacks residues 26 to 197
  VARIANT 73: note = Ancestral polymorphism is T, Derived polymorphism is M
  VARIANT 139: note = Ancestral polymorphism is A, Derived polymorphism is V
  VARIANT 141: note = Ancestral polymorphism is V, Derived polymorphism is A
  VARIANT 144: note = Ancestral polymorphism is P, Derived polymorphism is L
  VARIANT 149: note = Ancestral polymorphism is C, Derived polymorphism is R
  VARIANT 158: note = Ancestral polymorphism is V, Derived polymorphism is A
MGSYHYTSQFVDSNPKPSHKPKTTVQIPITSPREAARGGSPDAVAAAKIQAALRGYLVRRHVTAVRAADAEATRLERLLRRQETVDAVRSDERERARFSEALMAVLLRLDAVPGHYPAVRDARRAVSRRVVGLQEVFDAVAVAPKAQTCGVPASLEQVLEWIWGVGEAPAPVPPPQAEVEEEVRRAGSCWARFFGGV

SEQ ID NO: 12983 - protein, 303 aa, Zea mays
  VARIANT 150: note = Ancestral polymorphism is L, Derived polymorphism is P
  VARIANT 161: note = Ancestral polymorphism is F, Derived polymorphism is S
MRKRERENPCGICGHYHKYEEGEVCGVCGHRWKPSDGEGAPSRHESAFPTEVLKDFLFLGSYDNASRSEVLRTLSISHILNAQTVPDCHNLYKNSFTYHSLQRDRPLDFDEANQYLEKCERDKSRVLVHCMTGKNRYLIACEELLLAFTLSALLRFVDEYFFGTHFVRSAAIVAAFLMKSRGWRLAQSFQWVKDRRPQVQLTDASQKELLEYELKLFGPSTQTLVPTESFASLGFGYTKPAGDMQTPVFNQTTMPSIFERFNPNDRPTNFTFGVERKAEANPRDNNSDGRVNPTSTENLMDSS

SEQ ID NO: 12984 - protein, 478 aa, Zea mays
  VARIANT 131..478: note = Derived polymorphism lacks residues 131 to 478
MSSPAVRRVVLLSSLLCAGALGFLPCSHAAAVAPGYVAVSAASFVPSSTCSSPDRVPPHRRNGTSAVLRLTHRHGPCAPSRASSLAAPSVADTLRADQRRAEYILRRVSGRAPQLWDSKAAAAVATVPASWGYDIGTLNYVVTASLGTPGVAQTMEVDTGSDLSWVQCKPCAAAPSCYSQKDPLFDPAQSSSYAAVPCGGPVCAGLGIYAASACSAAQCGYVVSYGDGSNTTGVYSSDTLTLSASSAVQGFFFGCGHAQSGLFNGVDGLLGLGREQPSLVEQTAGTYGGVFSYCLPTKPSTAGYLTLGVGGPSGAAPGFSTTQLLPSPNAPTYYVVMLTGISVGGQQLSVPASAFAGGTVVDTGTVVTRLPPTAYAALRSAFRSGMASYGYPTAPSNGILDTCYNFAGYGTVTLPNVALTFGSGATVTLGADGILSFGCLAFAPSGSDGGMAILGNVQQRSFEVRIDGTSVGFKPSSC

SEQ ID NO: 12985 - protein, 468 aa, Zea mays
  VARIANT 240..468: note = Derived polymorphism lacks residues 240 to 468
MSNYYDDYDDIDGMEDDYDMDDPIDDMVDEQQGIRDSDVEDNDYGQPSDVLTQLQNVLLKIATTQIMDLNDKIPDTSSADARKGRDIQGIPWEQINITRKKYRQSRLEQYKNYENVPNSGEEAMKDCKPTEKGGIYYEFRRNTRSVKSTILHFQLRNLVWATSKHDIYLVSHYSIRHWSALSGVDTELINVQGHVAPREKHAGSLLEGFYQTQVSTLTVKDNLLVAGGFQGELICKHLDQEGISFCCRTTYDDNAITNAVEIFNTSSGAVHFMASNNDSGVRYYDMERFQLFKHFQFEWPVNHASLSPDRKVVVIVGDDPDGLLIDANSGKTVHSIKGHRDYSFASAWSPDGRTFATGNQDKTCRIWDVRNLSKSVHVLRGNLGAIRSIRFTSDGQFMSMAEPADFVHIYDVKSDYNKRQELDFFGEISGTSFSPDTDTLFVGVWDRMYGSLLQFGRLYNYSYLDSLF

SEQ ID NO: 12986 - protein, 617 aa, Zea mays
  VARIANT 290: note = Ancestral polymorphism is H, Derived polymorphism is Y
MSEGNVDSIQISVSNDERRNRADAEISEDEPRHTRMRSLKKKALHASTRLTHSLKKRGKRKVDCRVPRIAIEDVRDAEEEQAVNSFREVLFARGLLPVKHDNYHTMLRFLKARKFDFEKAAQMWADMLQWRKEFGTDTIFEDFEFHELEEVLQYYPHGYHGVDKEGRPVYIELLGKVEPNKLIQITTVERYIKYHVQEFERAFREKFPACSISAKRHIDTTTTILDVHGVGWKNFSKIARDLVRCMQKIDGDYYPETLHQMFIVNAGPGFKLIWSTVKGLLDPKTSSKIHVLGTKYQSRLLEAIDASQLPEYFGGSCTCSNHGGCLRSNKGPWSDPSIMKLVHSMESLKEIGQVSDIEETVTGSMRLRALKLPERISDTSNAESGSDVDDLGSPVAPEDVEYPSLAPVREEARESGSTTYSGSIGMSRMADKVVGSNGRYNSTGNETRQVNAEQGSLINGGLLAPAGQRAPNDAVGNDDGFLKYISRRVVAIFLEVLSFLRFFIRRRQHSENVHSHTATAPSSLANLQTIKEDRVNPCLERLDRLESMFNQLSKKPPELPEDKDRAIQDSFDRIKSIEFDLQKTKKVLHATVIKQMQMAETLEAVTEPDLRRRKFCT

SEQ ID NO: 12987 - protein, 332 aa, Zea mays
  VARIANT 80..332: note = Derived polymorphism lacks residues 80 to 332
MSTANRYQHIKSTKPVVGKARKLKDLMIKSDNRICADCGAPDPKWASANIGVFLCLKCGDVHRALGPDISKVLSVTLDDWSDSDIDSMVEVGGNSYANSIYEAFLPKDHPKPKPDSTMEYRTKFIRAKYETQDFLKPSLRISSRSSFKSTTSVKSVDSNFSSTSRKDVFEDTREFVGELNITLVKGTNLAVRDMLTSDPYVVLTLGGQKVQSTVKKSDLNPVWNEVLKISVPRNYGPLKLEVYDHDMFSADDIMGEAEIDLQPMITAAMAFGDTSRLGDMQIGRWFMTKDNALMKDSTVNVVAGKVKQEVHLKLQNVESGELELELEWVPIL

SEQ ID NO: 12988 - protein, 306 aa, Zea mays
  VARIANT 204: note = Ancestral polymorphism is Y, Derived polymorphism is N
  VARIANT 209..306: note = Derived polymorphism lacks residues 209 to 306
MSSGRYMAYSPSPSTTPHSPRIAGLRAPSAAVAEQEKYLAELLAERQKLGPFVPVIPHSVRLLNQEILRVSTLLENASLLNQSGLEHGSPLTTGGLYSNGAATDMNVWTSAFQPESSPAYSWLGGSQGSSSGLIVKKTMKVDIPVDKYPTFNFVGRILGPRGNSLKRVEANTDCRVLIRGRGSIKDPARWIFCLLSAMGLGIAYAVIFQEEMMRGKPGYEHLNEPLHILVEAELPVEIIDARLMQAREILEDLLKPVDESQDYFKKQQLRELAMLNGTLREEGMQRSGSASPFHNSLGMKRAKTRG

SEQ ID NO: 12989 - protein, 1366 aa, Zea mays
  VARIANT 952..1366: note = Derived polymorphism lacks residues 952 to 1366
  VARIANT 858..1366: note = Derived polymorphism lacks residues 858 to 1366
  VARIANT 609..1366: note = Derived polymorphism lacks residues 609 to 1366
MASPSGNPNPNPNTPFEIGKLFRPPNPMTTATPNPIFPGVAGGPTGSPPPSGPYSYPPVTPPFHRGPYIHYQQDPHAMARPVVSFPMPNPNLNPNPNPNANPNAASPGPNPGARLMQLLGNSGPTQLETAVSMPPPTSEFAQLQQLPAMPSAPPARMLSSTSSKVPRGRLLGTGERAVHDVDSRLPGEAQPPQLEVTPITKYTSDPGLVLGRQIAVNRTYIVYGLKLGNIRVLNINTALRALLRGHTQRVTDMAFFAEDVHRLASASIDGRIYVWRIDEGPDEENKPQITGKIEIAIQIVGEAEAYHPRICWHSHKQEILFVGIGNCVLRIDTTKVGRGKDFTVEDPVKCHLEKLVDGVRLVGKHDGDVTDLSISQWMSTRLASGSKDGSVKIWDDRKQVPLSIFKPHDGQAVYSVAFLTAPERPNHINLITAGLLNREVKIWASTNEDGWLLPSDSETWKCTQTLELVSSLEPRVEEAFFNQVAVLPQASLILLANAKKNAIYAVHVEYGPDPASTRLDYIADFTVAMPILSLTGTHDSQPDSEQVVQVYCVQTMAIQQYGLELPLCLPPTADSTGFGRDPAISRVYEAPLEMAGTESSTGTSFTDSYSVSSLSKPSTVDQSAGNAVAFSYLILSVNSEIVIPRDLSAELDLKPSAPPLAYSEGDGSVPLPSAPPAPKMEAPGSGPAPGGRGIDQSAFDYTTNRNVERDVLKRQDTPMPIRKDILGKDEPRDGHSDVPMLPNPRLMFQVGGNATHLVTPSEIISGTLSSSENNDASKSDGGKSQDVSSRSSQVPEVEPKHIDESKQDQNLGLEAVKETQIVCENMEKTRSSLDQTVEMISERSVTTDKYSVEESQSSSDRPTSDQTGISENVLKKFVEMPEKIDYSSASREQSSSFTKEEKVLHPQTSGQPSPPVSAFNSTESHEPLSSTYLPITVSSYPEVGATQGMLQQLMGRQEDMEKQLSTVVPASIAKEGKRLETSLGRTVEKSIKANIDAFWARLQEENTKREKADRDRMQQFVTLITSSINKDLPSNLEKSLKKEISSLGPVVARAITPIIEKCLTSAVSDSVQKGLGDKLFNQLEKSITGKLEATLARQIQIQFHTSGKQALQDALRTSFESLLVPAFEQACKTMFEQIDGAFQKGMSEHSTAIQHQVESSHSPLALTLKEIINSASSITQSFSSELLDGNRKLLALVTSGNAMAHNTSALQPINGPMGGSQEVEAPLDPMKELGRLISERKFDEAFTMALQRSDVSIVSWLCSQVDLRALCAMVPVPLNQGVLLALLQQLAIDIHNETSRKVQWMTDVAMAINPADQMIAVHVRPIFEQVYNQLAHQRTLPTMTAADGTSIRVIMHVINSVLLSYK

SEQ ID NO: 12990 - protein, 461 aa, Zea mays
  VARIANT 47: note = Ancestral polymorphism is S, Derived polymorphism is F
MEVKYRIGFHWIQLLSRVLEGGFDTSSEQPVEFLKYCPGSWLLSVISVGNKANALSRRHTRTLLCDRCGSQPASVRCLEDNASLCQNCDWNGHDAESGASGHKRQAINCYSGCPSSAELSRIWSFITDIPTVAAEPDYEDGLSMMTIDGSDVTNRHDTSDDKRLLEIANTTLMSDPPSADKLKSPTGSSSGDGFDVMTLATDQPAGPVSATPKVPNARDDDKFNDGMYEDLCVDDADLTFEDYEELFGTSHIRTEELFDDAGIDGYFELKETPPFYFNEVCYLTLSMHTTVISGWPKRIFSFEFFLWQRELLCLLLQPKAMQIECGNVVSADCAMSNPGARADSSLCIPVRQVRSSISHSLSGLTGESSAGDHHDCGVSPMLLMGEPPWHSPGGPEGSVAGGSRDSALTRYKEKKKRRKFDKKIRYASRKARADVRKRVKGRFIKAGEAYDYDPLSQTRSY

SEQ ID NO: 12991 - protein, 299 aa, Zea mays
  VARIANT 71: note = Ancestral polymorphism is L, Derived polymorphism is P
  VARIANT 79..299: note = Derived polymorphism lacks residues 79 to 299
  VARIANT 206..299: note = Derived polymorphism lacks residues 206 to 299
MLRHLTGSDDTTHIRTSSPQSSILPGPSHPSWPRVLPRRATNEAIRRHTPSAMPQRSEAGTAGEGDEEQRLRAALRHLQAEAGVLERLVYKHRNQHRGAAYFQYLLKVRRDLKLLLGAGLAEVLNAVFPVLACRKPANTILVPNKQSKKKPVANHSHHQRLLGVARLLSQMSEPVMKAAMYPFSYACYIMVLFIFLGTDPLVLISQMLLDVVSIYNKVTDLTERKQAVKISISGVQAFREYYPSMNDACTVLECVWIKDKFVLHEKVKDISQETQVENQKCCGPESTVQYETIALISEG

SEQ ID NO: 12992 - protein, 740 aa, Zea mays
  VARIANT 349..740: note = Derived polymorphism lacks residues 349 to 740
  VARIANT 387..740: note = Derived polymorphism lacks residues 387 to 740
  VARIANT 457..740: note = Derived polymorphism lacks residues 457 to 740
  VARIANT 461..740: note = Derived polymorphism lacks residues 461 to 740
MAGSSVRGGSNCPPLFVTEKPTRMARYAYRLFASTVLAGVLLVWLYRATHVPPMSSGARWWAWLGLSAAELWFGFYWVLTLSVRWSPVFRRAFPDQLLRRYKEEQLPGVDIFVCTADPTVEPPMLVISTVLSVMAYDYPKEKLNIYLSDDAGSIITLYALYEASEFAKHWLPFCNKYQVEPRSPAAYFGTEASPPDACDRKEWFSLKEMHKDLAARVNSVVNSGKIPEVSKCKLMGFSRWSENASFRDHPSIVQILIDGNKRKATDVDGKVLPTLVYMAREKRPQEHHHFKAGSLNALIRVSSVISNSPVIMNVDCDMYSNNSGSIRDALCFFQDEQLGQDIAFVQYPQNFENVVQNDIYGNPINTVNELDHPCLDGWGGMCYYGTGCFHRREALCGRIYSPDYKEDWTRVARKTEDVIDLEGMAESLVTCTYEHNTLWGVEKGVIYGCPLEDVITGLQIQCRGWRSVYHNPPRKGFLGMAPTSLGQILVQHKRWTEGFLQISLSKYSPFLLGHRKISLGLQMGYSVCGFWAANSFPTLYYVTIPSLCFLNGISLFPEITSPWFVPFAYVAVAAYSCSLVESLQCGDTAVEWWNAQRMWLFRRITSYLLAAIDTIRRMLGVTESGFTLTAKVTDPRALERYKKGMMEFGSFSVMFAIITTVALLNLACMMLGVAKVLLRKGAVSLGAMFVQAVLCALIVAINFPVYEAMFVRKDSGRLPASVSVVSLCIVLPFCILPTKL

SEQ ID NO: 12993 - protein, 384 aa, Zea mays
  VARIANT 157..384: note = Derived polymorphism lacks residues 157 to 384
MADTDSAETEKEKMVADDGGKPAELSKSARKKLQKQERQAERKAARKAAEKERRRADIERRRREWEDALAAAPSDEARAEMVAARRETRRERVGRRAEERGARADRLRRAAEGAGQKVVLDLEFADLMRPNEIHSLTQQIMYCYAVNGRSANPAHLWLTGCSGEMATHLQRIPGYDKWIIERAARPYIEAFEDRKENLVYLTADAETVLDDLDMSKIYIIGGLVDRNRWKGITLKKSAEQGIQSAKLPIGNYLKMSSSQVLTVNQVFEIMLKFVETRDWKTAFFHVIPQRKRGEAETRDDVEKGGLDDNDGAAEGAADGDHSEEDLNKGFGEEEDDDGDEELEEEEADVSNKRQCVRVENGEAGDATVAEVEPNNGGGGGGGDR

SEQ ID NO: 12994 - protein, 278 aa, Zea mays
  VARIANT 184: note = Ancestral polymorphism is A, Derived polymorphism is G
  VARIANT 131: note = Ancestral polymorphism is A, Derived polymorphism is T
MDSSSFLPAAGAENGSAAGGANNGGAAQQHAAPAIREQDRLMPIANVIRIMRRVLPAHAKISDDAKETIQECVSEYISFITGEANERCQREQRKTITAEDVLWAMSRLGFDDYVEPLGAYLHRYREFEGDARGVGLVPGAAPSRGGDHHPHSMSPAAMLKSRGPVSGAAMLPHHHHHHDMQMHAAMYGGTAVPPPAGPPHHGGFLMPHPQGSSHYLPYAYEPTYGGEHAMAAYYGGAAYAPGNGGSGDGSGSGGGGGSASHTPQGSGGLEHPHPFAYK

SEQ ID NO: 12995 - protein, 197 aa, Zea mays
  VARIANT 123: note = Ancestral polymorphism is T, Derived polymorphism is I
MGRKAKRCAGKKDDGREEKVAAAPAAEGASSSSSDGEGAGTAATGLPMANLVRLMRQVIPKGVKISSRAKDLTHDCAVEFVGFLAGEASELARAQHRRTISPEDFTRSLQALGFDDYVRPMSTYISRYREQATSPAGYSGGFARRPPPRATAAPCVSDEETRSRVPPHGEHGDGWRTSVNTPAPGGHGYDYTSPDNM

SEQ ID NO: 12996 - protein, 110 aa, Zea mays
  VARIANT 57: note = Ancestral polymorphism is A, Derived polymorphism is S
  VARIANT 55: note = Ancestral polymorphism is L, Derived polymorphism is S
  VARIANT 40: note = Ancestral polymorphism is D, Derived polymorphism is V
MTEVSFNWIGFWSAMTSNLMNQSRNVYSKKILVDKEDSLDDINLFSIITVMAFLLSAPLMLCVEGIKFSPSYLQNAGVNVKELFVRAALAGTSFYFYQQVSYNLLAKYLP

SEQ ID NO: 12997 - protein, 120 aa, Zea mays
  VARIANT 11: note = Ancestral polymorphism is K, Derived polymorphism is M
MAVGGLQGAKKRKREHAEGKAKPRKQVKGGGDGAKRKSHSAAGGYTAHGGAGEIVARKKTLVTPKEKRLAAKELTKLWEKMRCRNVSKEERSKAVSQAIHKMDGKYLDIATSHVTTRVLQ

SEQ ID NO: 12998 - protein, 423 aa, Zea mays
  VARIANT 338..423: note = Derived polymorphism lacks residues 338 to 423
  VARIANT 190..423: note = Derived polymorphism lacks residues 190 to 423
  VARIANT 107..423: note = Derived polymorphism lacks residues 107 to 423
  VARIANT 49..423: note = Derived polymorphism lacks residues 49 to 423
  VARIANT 14..423: note = Derived polymorphism lacks residues 14 to 423
MHRARPANPPRKPRERRPYLVSECRDLTDAARWRSEILREISAKVDEIQNEGLGEHRLRDLNDEINKLLRRRPTPAQVRMAMGATFCAAVADAMVMFLGCSAVTSYQGAQEGASHYALLVTTSLLSVLLFTFDLLCGVLGGASFNPTDFAVSYAAGLDSPSLFSVALRFSVQAVGVVGGALAISELMQAQYKHTLAGPSLKVDPHTGALAEGMLTFVITLTVLWVIIKGPSNVILKALLLSTSIVSVILPGAEYKGPSMNPTNGGFTSYYPKFIKSKEYIPSISKYAQRFHGVPAEERLHWRSFLVKLGSENLKGSKNEELHVASHNVDRSVGGFRSYKNGFVWHDLSEDDLVLPATDDEYVLKGSELVDQSPSVHGIRQRLEKANLVDDVVDFHRVTANQAERYLTSYQRSAQMVLFIPCQV

SEQ ID NO: 12999 - protein, 416 aa, Zea mays
  VARIANT 147: note = Ancestral polymorphism is Y, Derived polymorphism is H
MKMSFNKSSGSRGWGQGAAAGGGGDELVLRGSISKKWTFLLCFGSFCIGLLFTNRMWTVPEPKEIIRRSTLEVEKMSLVDGDCAPKSAGDARDVPGEVPRTQDVIQTLDRTISNLEMELASAKATQESMLHGAAGAPVPEPTGKRKHFMVVGVNTAFSSRKRRDSVRATWMPQGEKRRTMEEEKGIVIRFVIGHSATPGGILDRAIDAEDRKHGDFMRLDHVEGYLELAAKTKAYFVAAVSTWDAEYYVKVDDDVHVNIATLGNTLARHRSKPRAYVGCMKSGPVLAQKGVRYHEPEYWKFGEWGNRYFRHASGQLYAISKDLASYIALNQHVLHKYANEDVSLGSWFIGLDVEHVDDRRLCCGTPPDCEWKAQAGNACVASFDWSCSGICKSADRIKEVHQRCGESENAIWNAEF

SEQ ID NO: 13000 - protein, 133 aa, Zea mays
  VARIANT 117: note = Ancestral polymorphism is P, Derived polymorphism is S
  VARIANT 116..133: note = Derived polymorphism lacks residues 116 to 133
  VARIANT 111: note = Ancestral polymorphism is R, Derived polymorphism is W
  VARIANT 108: note = Ancestral polymorphism is Q, Derived polymorphism is L
  VARIANT 100..133: note = Derived polymorphism lacks residues 100 to 133
  VARIANT 98: note = Ancestral polymorphism is R, Derived polymorphism is M
  VARIANT 94..133: note = Derived polymorphism lacks residues 94 to 133
  VARIANT 93: note = Ancestral polymorphism is V, Derived polymorphism is I
  VARIANT 77: note = Ancestral polymorphism is T, Derived polymorphism is M
  VARIANT 76: note = Ancestral polymorphism is R, Derived polymorphism is H
  VARIANT 41: note = Ancestral polymorphism is G, Derived polymorphism is R
  VARIANT 7..133: note = Derived polymorphism lacks residues 7 to 133
  VARIANT 4..133: note = Derived polymorphism lacks residues 4 to 133
MEACCLQSTDTIVPPPDAPRPLLSPNSQQGILRSRHGYGAGGERRHEERLDDGVGNGGTTDGKLSLRVDPSVCGQRTTKAINPHAYTDGTMFVQLPPRIQFPVPVIVQLERNTTSQPYLLHYQSYNAPWLPTR

SEQ ID NO: 13001 - protein, 503 aa, Zea mays
  VARIANT 184: note = Ancestral polymorphism is H, Derived polymorphism is Y
  VARIANT 197: note = Ancestral polymorphism is Y, Derived polymorphism is H
  VARIANT 217: note = Ancestral polymorphism is D, Derived polymorphism is Y
  VARIANT 254: note = Ancestral polymorphism is V, Derived polymorphism is M
  VARIANT 362: note = Ancestral polymorphism is S, Derived polymorphism is C
  VARIANT 385: note = Ancestral polymorphism is F, Derived polymorphism is Y
  VARIANT 386..503: note = Derived polymorphism lacks residues 386 to 503
  VARIANT 458: note = Ancestral polymorphism is L, Derived polymorphism is S
MGIKAVEKLRCPSSVAAAARSGLKLWMLRAVTTVLLWTSVVQFTAVGNTWTWGPRVLKGWPSCRTAREAAAVTTTRLSTPEPVVEKAALPPKRIYQNNGYLMVSCNGGLNQMRAAICDMVAIARSLNVTLIVPELDKTSFWNDPSEFQDIFDVEHFIISLRDEVRILRELPPRVKRRVELGKFYSVPPVSWSDISYYHKKILPAIQKYKVLHLNRTDARLANNGLPLEIQRLRCRVNYSALKFTSQIEVLGRRVIRMLRQNGPFLVIHLRYEMDMLAFSGCTQGCTPKETEELTRMSYSHFRYAYPWWKEKVINSFVKRKDGLCPLTPEEVAIVLRALDIDKSMQIYIAAGEIYGGKRRMASLTLAYPNVVRKETLLEPSDLMFFQNHSSQMAALDYLVSLESDIFVPTYDGNMAKVVEGHRRYLGFKKTIMLDRKLIVELVDQYTSGSLRWDEFASLIKAVHSNRMGSAATRAAIPDRPKEEDYFYANPQECLQGPNMLQTL

SEQ ID NO: 13002 - protein, 214 aa, Zea mays
  VARIANT 35: note = Ancestral polymorphism is A, Derived polymorphism is V
  VARIANT 54: note = Ancestral polymorphism is N, Derived polymorphism is K
MASAVSLLLSPPRLLHRDGTSRLLSIPHRRVLLAAPNNATPRRLLAPAPRASNKNDNSGAVEAPDRLVAAVAYLYPFLDGAHHGRFLLTQFPFFGALLRPLAPAARLFHSSPLTPFLLFLTLYFAVVRNQQAFSRFVRFNAMQAVVLDVLLIFPDLLAQSFAPSGGVGFEIFQSMESTVFLFLLVSLVYGGGACLLGKTPRLPIVADAAERQVM

SEQ ID NO: 13003 - protein, 628 aa, Zea mays
  VARIANT 255: note = Ancestral polymorphism is S, Derived polymorphism is R
  VARIANT 6: note = Ancestral polymorphism is A, Derived polymorphism is V
MGEVVAASSLALVLLFFCSCGPASGLLSPKGVNYEGQFQALMMIKNYLKDPHGVLKNWDQDSVDPCSWTMVTCSPENLVTGLEAPSQNLSGILSPSIGNLTNLETVLLQNNNINGLIPAEIGKLRKLKTLDLSSNHFSGEIPSSVGHLESLQYLRLNNNTLSGAFPSSSTNLSHLIFLDLSYNNLSGPIPGSLTRTFNIVGNPLICAATMEQDCYGSLPMPMSYGLNNTQGTVIPAKAKSHKVAIAFGATTACISLLFLAVGSLFWWRCRRNRKTLFNVDDHQHIENGNLGNMKRFQFRELQAATENFSSKNILGKGGFGIVYRGQLPDGSLVAVKRLKDGNAAGGEAQFQTEVEMISLAVHRNLLRLYGFCMTASERLLVYPYMSNGSVALRLKGKPPLDWITRKRIALGAARGLLYLHEQCDPKIIHRDVKAANILLDDCCEAIVGDFGLAKLLDHRESHVTTAVRGTVGHIAPEYLSTGQSSEKTDVFGFGILLLELITGQTALEFGKSSNQKGAMLDWVKKMHQEKQLDILVDKGLGSKYDRIELEEMVQVALLCTQFLPGHRPKMSEVVRMLEGDGLAERWEALQHTESHKFKVPEFSFSRCHSDLTDDSSLLVQAVELSGPR

SEQ ID NO: 13004 - protein, 150 aa, Zea mays
  VARIANT 18: note = Ancestral polymorphism is P, Derived polymorphism is L
MGSDLETEKKKTPVALMPIAKPLAGKKLCKRTLKLVRRASEAKCLKRGVKEVVKSIRRGNKGLCVIAGNISPIDVITHVPILCEESNVPYIYVPSKEDLATAGTTKRPTCCVLVLTKPNKGELSDEVKDKLKSDYDQVVTEVAEATSAMF

SEQ ID NO: 13005 - protein, 372 aa, Zea mays
  VARIANT 170..372: note = Derived polymorphism lacks residues 170 to 372
MGKSKDKKGSREAKEDKKLALGVKRKQLKRKKDRVLECAVDSEPAAGHGVKEEKELPRRKKIPLVKQKKKNKHANVKSNHDTADAVVESLSDSKYDAPLKLKKKSKKKQMESSSPAVVYESSVVTEDAGAPKLKKKKRKVKGGKASAGITDAEEILHENQNEETSADINQLAALSEDVDNEEPQKLKRGKKMEVKKSGKAKKKDKHASRKDNNNLEGHVDVSAANADEIPLVDEDCSRGMKKWILEYKQKRPGLKALQEAIDEFIVAHEEQQEKEKKEREARAAEDGWTVVVHHKGRKKTTDTETGTAVGSVSLGAMQHKMAKMKPKEVDMNFYRFQKREAHLSELAMLQSKFQQDKKRIQELRAQRKFKPY

SEQ ID NO: 13006 - protein, 94 aa, Zea mays
  VARIANT 8..94: note = Derived polymorphism lacks residues 8 to 94
  VARIANT 37: note = Ancestral polymorphism is D, Derived polymorphism is N
  VARIANT 44: note = Ancestral polymorphism is A, Derived polymorphism is V
  VARIANT 51..94: note = Derived polymorphism lacks residues 51 to 94
  VARIANT 63: note = Ancestral polymorphism is V, Derived polymorphism is A
  VARIANT 68: note = Ancestral polymorphism is H, Derived polymorphism is L
  VARIANT 69: note = Ancestral polymorphism is R, Derived polymorphism is I
  VARIANT 81: note = Ancestral polymorphism is N, Derived polymorphism is I
MSMPSTVGGGRSDLPTNPNNERIELDKTGDEGNPHPDYDHLTPAERCYMEQKHKIDMQKMAKVANKSHRDRIQDFNQYLANLSEHYDIPKVGPS

SEQ ID NO: 13007 - protein, 429 aa, Zea mays
  VARIANT 249: note = Ancestral polymorphism is D, Derived polymorphism is V
  VARIANT 144: note = Ancestral polymorphism is S, Derived polymorphism is F
MKPNSSSSSSQVVRRAASTTGLLFVVLLVAFTASNYSSLDTDRLLDVPPNAASHVQTTAPSSSSSLEVEKSAACDDVARGEWVPDPAAPYYTNATCPFIDSRQDCMKYGRPGLDSILRWRWQPHGCNLPRFDPAAFLGLVRHKSMAFVGDSVARNHMQSLMCLLSKIGSVAARARAQVEYPQEMQPKDCIHCTRTYHYREHNFTVTVFWAPFLVRWNLTRAGALQFMDPHNVYLDEADPEWARQVAGYDYVVLNGATWFTRPVVLHERGRVLGCSDCGDPNATFVPPHHAVRASFRTALRALREAPGFRGKVVVRTVAPPHYENGKWYDGGNCLRTRPMRSGETGLPDTEAAFHAAQVEEFRAAASAAPPGRFVLLDVSEMMQMRGDGHPGQYGHWPHEKVGFGIDCVHWCLPGPIDAWSDVLLHLITN

SEQ ID NO: 13008 - protein, 773 aa, Zea mays
  VARIANT 232..773: note = Derived polymorphism lacks residues 232 to 773
MDLESADGAEAADGKRRGESLRATLLLAYQSLGVVYGDVATSPLYVYKSAFAGNDIQHSEGNEEIYGVLSFVFWTLTLITLIKYVLIVLRADDGGEGGTFALYSLICRHVRAGLLPGGGTRDELMEEEKVTGRRGERPVSRVRAVLEKYRVLQRLLLLFALLGTCMVIGDGVLTPAVSVFSAVSGLELSLEKEQHKYIELPVACAILICLFALQHYGTHKVGFLFAPIVCIWLVCISAIGLYNIIRWDPHVYRALSPYYMYQFLRKTQTGGWMSLGGILLCVTGSEAMYADLGHFSQSSIQIAFISVVYPALVLAYMGQAAFISQHHSFESSYHIGFYVSVPETLRWPVLVIAILAAVVGSQAIITGTFSIIKQCSSLSCFPGVKIVHTSSTLHGQIYIPEINWMLMILCLAVTIGFRDTKHLANAQGLAVITVMLVTTCLMSLVIVLCWNKSIFLALGFLLFFGTIEVIYFSASLVKFHEGAWVPISLSFIFMVIMSVWHYGTIKKYEFDVQNKVSVNWLLNLGPSLGIVRVRGIGLIHTELMSGIPAIFSHFVTNLPAFHQVLVFLCVKSVPVPHVQPEERFLVGRIGPKEYRLYRVIVRYGYRDVQKDDLEFEKELVSNIAEFIRSSGEYDKNGFVEDADKPFEKLSTISTGINMLEEDGEVDAHVSPHKEIDPHNAAPKRKKARFMIPKSAQVDSEVRRELQELMDAREAGMSFILGHSYMKAKSGSSFIKRVVINFFYEFLRKNSRGPAYAANIPHASTLEVGMVYQV

SEQ ID NO: 13009 - protein, 411 aa, Zea mays
  VARIANT 17: note = Ancestral polymorphism is S, Derived polymorphism is F
  VARIANT 254: note = Ancestral polymorphism is A, Derived polymorphism is T
MDTALPSVLIGGGLSVSVSISTATKAGSQSISSHLSTSSLRLTARHRNRRRLPLLASSSESPPAQLAAASTESQSRSSRWVVVMDTPPAAAGGSGVSRAEAVDYYAATLAQVVGSEKEAQMRICEASWDGTYEFRCEIDEDASKELAKMPGVLSVQLDMGNKSEKDNHSLSLSTANLVSISDGASTSSSGKNEFWLVRMEKPGVEVVTKAQMVDHYTQILMKVLGNEQDAQVSIYHVSWDRDYGFCCHIDEECAKELAGEQLGLSYPFMFLECYLFNPIRTLDQTTKITKIVSGDDGVKSSEGTGAVDIKTKRLFVTGLSFYTSEKTLRAAFEPFGELVEVKIIMDRISKRSKGYAFVEYTTEEAGGAALKAMNGQIINGWMIVVDVAKTRSRDRLSGGSNQAFRPHYQAR

SEQ ID NO: 13010 - protein, 175 aa, Zea mays
  VARIANT 9..175: note = Derived polymorphism lacks residues 9 to 175
  VARIANT 44: note = Ancestral polymorphism is I, Derived polymorphism is T
  VARIANT 51: note = Ancestral polymorphism is I, Derived polymorphism is T
  VARIANT 55: note = Ancestral polymorphism is I, Derived polymorphism is T
  VARIANT 64: note = Ancestral polymorphism is R, Derived polymorphism is P
  VARIANT 68: note = Ancestral polymorphism is A, Derived polymorphism is V
  VARIANT 135: note = Ancestral polymorphism is A, Derived polymorphism is S
  VARIANT 139: note = Ancestral polymorphism is P, Derived polymorphism is L
MSAVMGDLQGLNGATVGFSAAGGPEEATEEENIFGSRVCLHNQTVSSCMCIRRRTPGTRFFPVRPLMASFICVKDFPQDLCMHAWHKFLCSPKWGNYRVPLLSNQILYLCQLMFQMSPLLRCFLSMPVAKTVGEALNKPVLEAFGNAKTIRNNSSCFKKMLRFSLMQMGRYQELL

SEQ ID NO: 13011 - protein, 126 aa, Zea mays
  VARIANT 15: note = Ancestral polymorphism is R, Derived polymorphism is C
  VARIANT 29: note = Ancestral polymorphism is T, Derived polymorphism is M
  VARIANT 33: note = Ancestral polymorphism is A, Derived polymorphism is T
  VARIANT 50: note = Ancestral polymorphism is H, Derived polymorphism is Y
  VARIANT 51: note = Ancestral polymorphism is G, Derived polymorphism is D
  VARIANT 55: note = Ancestral polymorphism is F, Derived polymorphism is S
  VARIANT 59: note = Ancestral polymorphism is R, Derived polymorphism is C
  VARIANT 73: note = Ancestral polymorphism is A, Derived polymorphism is T
  VARIANT 75: note = Ancestral polymorphism is G, Derived polymorphism is R
  VARIANT 76: note = Ancestral polymorphism is D, Derived polymorphism is E
  VARIANT 80: note = Ancestral polymorphism is C, Derived polymorphism is Y
  VARIANT 84: note = Ancestral polymorphism is R, Derived polymorphism is C
MLRRKRSHLPVGHPRSTAPCLRRYASRSTKCCTDICRKEIVFSHMWGWWYDVFLSGLLRVQIEEIGWKQLVSATGDGVSCLTFRVVDEPGQMHLLEITLPMGYPESPPSISAVSLYPDIFIILCQG

SEQ ID NO: 13012 - protein, 135 aa, Zea mays
  VARIANT 102: note = Ancestral polymorphism is S, Derived polymorphism is R
  VARIANT 26: note = Ancestral polymorphism is L, Derived polymorphism is F
  VARIANT 24: note = Ancestral polymorphism is G, Derived polymorphism is S
  VARIANT 17: note = Ancestral polymorphism is L, Derived polymorphism is I
  VARIANT 9: note = Ancestral polymorphism is G, Derived polymorphism is D
MMMARGRGGAIGGGGVIALVLLVGLFVATSAPPVAEAAASYMVGDYGGWKFNVDRWAKGRTFRAGDVLVFSYNRAVHDVAVVNAAAYRSCAVPNKGARVLRSGRDKVRLGRGTHYFACTVRGHCQAGMKLAVRAV

SEQ ID NO: 13013 - protein, 345 aa, Zea mays
  VARIANT 225..345: note = Derived polymorphism lacks residues 225 to 345
MGQGGQEKSFNFLQVLLGVIMRIVDCAKPDLLIPLFCLLRVTRLLSENLVTVVMAAGLFISEGSIAGGTAGVVVETALYPIDTIKTRLQAARGGSRIEWKGLYSGLAGNLTGVLPASAIFVGVYEPTKRKLLETLPENLSAVAHFHIFINTDHIVQLLQTAGAIGGIAASLVRVPTEVVKQRMQTGQFKSAPDAVRLIVAKEGFKGLYAGYGSFLLRDLPFDAIQFCIYEQLRIGYKLVAKRELNDPENALIGAFAGAITGAITTPLDVMKTRLMVQGQGNQYTGIVSCAQTILREEGPKAFLKGIEPRVLWIGIGGSIFFGMLEKTKSMLAERRNRELRAVKDE

SEQ ID NO: 13014 - protein, 493 aa, Zea mays
  VARIANT 205: note = Ancestral polymorphism is T, Derived polymorphism is A
MRPPPQGPRTTMSMGSPVQLRRLKPLYQLVVNNILAIVAVPLAAAVLLKASSLGPEEILALRPAHMFLAAFLPAAATVLYLMLRPRAVYLVDYACFRTSPNCRVPFATFLEHSRVWPGFDERSVRFMTRLLERSGLGEETCLPYAQHYIPPSRDLESSRAEAELVIFSAIDDLLAKTGVSPRDIDILVVNCSLFAPTPSFADMVAHRYRLRGDVRNVHLAGMGCSAGLVSVELARNLLQVAPRGARALVVSTETITPNYYMGEERAMLLPNCLFRMGGAAALLSTDGAGARFRLARVVRTLRGASDGAYRCVYQEEDERGNVGINLSKDLMSIAGDALKANITAMGPLVLPASEQLLFALSFIARKVLNNRIRPYIPDFRTAFEHFCIHAGGRAVIDELQRSLTLSDEQVEASRMTLHRFGNTSSSSLWYELAYVEAKGRMRRGDRVWMIGFGSGFKCNSAAWECIRPAANADGPWANCIHRYPVHIPDVLKH

SEQ ID NO: 13015 - protein, 182 aa, Zea mays
  VARIANT 69: note = Ancestral polymorphism is F, Derived polymorphism is L
  VARIANT 8: note = Ancestral polymorphism is G, Derived polymorphism is D
  VARIANT 5: note = Ancestral polymorphism is R, Derived polymorphism is C
MGKFRKLDRGYSHRLSMLRSYFSPTSLPHTMALCRLTVDLWIFLLGRTMVSQLVKHERIETTVAKVLSFAAFLRARACGVGGPAEGGSDGAAREGDLGGQQAPHCEGQSQRGRELSAEGKLAMRGSSTRRASSLWKRYQRGGQARCGRELSGTQHAATRAAAFVRGDDVVHKLFTDLAYRYS

SEQ ID NO: 13016 - protein, 195 aa, Zea mays
  VARIANT 45: note = Ancestral polymorphism is H, Derived polymorphism is R
  VARIANT 39: note = Ancestral polymorphism is G, Derived polymorphism is D
  VARIANT 38: note = Ancestral polymorphism is C, Derived polymorphism is S
MGLWDSLLNWLRRMLGRHRWSMLLLYASTQSRYITMLSGVLILIHGFCALQTGGYSEDMIPTVGFNMRKITKGNVTIKLWDLGGQRRFRTMWERYCRGVSAILYVVDAADRDSIPIAKSELLDLLTKQSLAGIPLLVLGNKIDKSEVLSKQALVDQLGLESIKDREVCCYMISCKDSVNIDIVIDWLIKHSRTAK

SEQ ID NO: 13017 - protein, 1643 aa, Zea mays
  VARIANT 1445..1643: note = Derived polymorphism lacks residues 1445 to 1643
  VARIANT 1307..1643: note = Derived polymorphism lacks residues 1307 to 1643
MDGGHTTRHPMSPAISASTVLPQQRQMQPHHHPARPAIADLFTLYLGVRASLAPKFLISSRVGVSLLVLTLGVVGLQMNSKQRAEDPLRESSNKLQKRVTALNRDLPPRDEQFISDYEQLRMQFPDAEQLQAITESVLISFVLQCSSHAPQSEFLLFATRCLCARGHLRWDSLLPSLLNTVSSIEAPMVQGVSVTGGGSVTPSSAITMPNAPNFHQSNPASPLSVMNTIGSPTQSGIDQPVGANVSPIKAAEFSSSAQLGTAARGDQSRRGAEASYLHHLSCRIILAGLEFNLKPATHAVIFQHMVNWLVNWDQRPQGMDETDTMQTCRLEKPLHEWMHLCLDVIWILVNEDKCRIPFYELVRCNLQFLENIPDDEALVSIIMEIHRRRDMVCMHMQMLDQHLHCPTFGTHRFLSQSYPSIAGESVTNLRYSPITYPSVLGEPLHGEDLANSIPKGGLDWERALRCLRHALRTTPSPDWWRRVLLVAPCYRSQSQQSSTPGAVFSPDMIGEAVADRTIELLKLTNSETQCWQDWLLFADIFFFLMKSGCIDFLDFVDKLASRVTNSDQQILRSNHVTWLLAQIIRIEIVMNTLSSDPRKVDTTRKIISFHKEDKSLDANNIGPQSILLDFISSSQTLRIWSFNTSIREHLNSDQLQKGKQIDEWWKQMMKASGERMIDFTNLDERATGMFWVLSFTMAQPACEAVMNWFTSAGMADLIQGPNMQPSERIMMMRETYPLSMSLLSGLSINLCLKLAYQLEETIFLGQAVPSIAMVETYVRLLLIAPHSLFRPHFTALTQRSPSILSKSGVSLLLLEILNYRLLPLYRYHGKSKALMYDVTKIISMIKGKRGEHRLFRLAENLCMNLILSLKDFFFVKKELKGPTEFTETLNRITIISLAITIKTRGIAEVEHMIYLQPLLEQIMATSQHTWSEKTLRYFPPLIRDFLMGRVDKRGLAIQAWQQAETTVINQCNQLLSPSAEPNYVMTYLSHSFPQHRQYLCAGAWMLMNGHLEINSANLARVLREFSPEEVTANIYTVVDVLLHHIQCEVQRGHLAQDLLSKAITNLSFFIWTHELLPLDILLLALIDRDDDPYALRLVISLLEKPELQQRVKNFCNTRSPEHWLKNQHPKRAELQKALGSHLSWKDRYPPFFDDIAARLLPVIPLIIYRLIENDATDIADRVLAFYSSLLAFHPLRFTFVRDILAYFYGHLPIKLIGRILNLLGVSTKTPFSESFAKYLVSSNSSICPPPEYFANLLLNLVNNVIPPLSSKSKSNPADTTRSTFNKHHASSQPGGVGNTDGQRAFYQNQDPGSYTQLVLETAAIEILSLPVPAAQIVSSLVQIIAHVQAILIQSNSGQGMSGGLGQSSGLPTSPSGAAESSGPNQANSAATGINATNFVSRSGYSCQQLSVLMIQACGLLLAQLPPEFHMQLYSEAARVIKDCWWLADGSRPVKELDSAVGYALLDPTWASQDNTSTAIGNIVALLHSFFSNLPQEWLESTHTVIKHLRPVNSVAMLRIAFRILGPLLPRLAFARPLFMKTLALLFNVLGDVFGKNPQVSNPNPVEASEIADIIDFLHHAVMYEGQGGPVQSTSKPKLEILTLCGKVIEILRPDVQHLLSHLKIDPTSSIYAATHPKLVQNPS

SEQ ID NO: 13018 - protein, 154 aa, Zea mays
  VARIANT 81: note = Ancestral polymorphism is A, Derived polymorphism is T
MREQQGSGDVAGRRGGVIRSLLGVERRLAEGDAEGAVGVSSGKQPATEGGGGGGGEERKAVVRVVAADMPPALQRRAFRCARDELAAMPHFPRRLEPKRLALALKKEFDAAYGPAWHCIVGTSFGSYVTHARGGFLYFSVDKVYILLFRTAVEP

SEQ ID NO: 13019 - protein, 179 aa, Zea mays
  VARIANT 146: note = Ancestral polymorphism is A, Derived polymorphism is T
  VARIANT 141: note = Ancestral polymorphism is G, Derived polymorphism is W
  VARIANT 132: note = Ancestral polymorphism is R, Derived polymorphism is C
  VARIANT 126: note = Ancestral polymorphism is T, Derived polymorphism is I
  VARIANT 118: note = Ancestral polymorphism is D, Derived polymorphism is N
  VARIANT 111: note = Ancestral polymorphism is R, Derived polymorphism is C
  VARIANT 107: note = Ancestral polymorphism is S, Derived polymorphism is L
  VARIANT 98: note = Ancestral polymorphism is G, Derived polymorphism is R
  VARIANT 84: note = Ancestral polymorphism is A, Derived polymorphism is T
  VARIANT 83: note = Ancestral polymorphism is A, Derived polymorphism is T
  VARIANT 82: note = Ancestral polymorphism is A, Derived polymorphism is G
  VARIANT 63: note = Ancestral polymorphism is V, Derived polymorphism is M
MGLVVSATASCSDIFGRRRSSTLPPATATPTSSTPPLTDTTPEPELVRVFRHFDADGDGRISVAEMRESCGCTAAEAEEMVAAADRDGDGFISLDELGALFEDEDLSDTLRAAFAEYDENGDGVITAEELLRALRRLGIVGEEMTAERCAEIIAAVDRDGDGVISFDEFKAMMATEPAA

SEQ ID NO: 13020 - protein, 178 aa, Zea mays
  VARIANT 29: note = Ancestral polymorphism is R, Derived polymorphism is S
  VARIANT 36: note = Ancestral polymorphism is R, Derived polymorphism is C
MTAVDAGGGTMVDNSVSSGSSNKLLGPRRRSTYYGRGARNSAPAVAEAPSDASFEFSAVVSYSSASPASMVFSDGQLRAHQFPAVRSSAGSSQAMSPVRSSSVGSRYTSTKQQQAGVTGTKKRVSFATDKAAAAKASAGQRDKKSGGLLGCMGSACGPSRDQAVEPAARNANRKVVAV

SEQ ID NO: 13021 - protein, 162 aa, Zea mays
  VARIANT 69: note = Ancestral polymorphism is R, Derived polymorphism is Q
MAVLVARQGRELQRYSQSTGGRIVVGCIPYRVRCDGELEVLAITSQKGHGMMFPKGGWEVDESMDEAARREALEEAGVLGDTEPVLGLWHYKSRRYVDQTYEGFMFPLRVADELHQWPEMASRKRTWATVQQVMDGCPHWWMREALERLVARHAVPVLQSAL

SEQ ID NO: 13022 - protein, 228 aa, Zea mays
  VARIANT 20: note = Ancestral polymorphism is P, Derived polymorphism is R
MDGRRRRQWPRSRSGAAAARLLLLLLLAVSLEGGHGDHGAAAAGVAPAGGNGMTELQKHVAFFDRNHDGIITFDETYQGLQDVGVGDVTAKASAAFINGALGPKTRPDNSNSSRMDIYVENIQKGKHGSDTGAYDAQGRHAFVPAKLDEMFTKHAKTVPNALTKDELDEMLKDNREKMDVAGWLGAKSEWEMLYKLAKDKDGRLPKDTVRAVYDGSLFYQLAAQAKKG

SEQ ID NO: 13023 - protein, 277 aa, Zea mays
  VARIANT 30..277: note = Derived polymorphism lacks residues 30 to 277
  VARIANT 90: note = Ancestral polymorphism is C, Derived polymorphism is W
MAMATPTRVTAAAVVLRVLSLLILLRTGTCADDYSAFVYAGCSQGRYSADSQYASGVDSVLTSVASSAPYAPYDNFTSPTDSSVVGLYQCRSDLPASVCSGCVRSAISRLSSLCAWAVGGAVQLRACFVRYGNDSFLGKQDTAVLFKKCGGTPGDAGGVAMRDSALGALVAAAAPAGGGFRTGGSGAVQAMSQCVGDLGAKPCSDCVSAAAAQLKAGCGYATAGEVYLGKCYARFWANGGGGFSSSSSSAGRHGFRLVHVVAAGLFFPSLAYASLAI

SEQ ID NO: 13024 - protein, 526 aa, Zea mays
  VARIANT 24: note = Ancestral polymorphism is R, Derived polymorphism is S
  VARIANT 106: note = Ancestral polymorphism is W, Derived polymorphism is S
  VARIANT 134: note = Ancestral polymorphism is N, Derived polymorphism is K
  VARIANT 151: note = Ancestral polymorphism is G, Derived polymorphism is E
  VARIANT 275..526: note = Derived polymorphism lacks residues 275 to 526
MDLPPLSHQALFAAVRSADAAAVRALLADAEASGTSLAALAAAQTDAGETALYVAAEAGSEETVSLLLPLYDLEAATVRSRLDLDAFHVAAKQGHTGVVKEFLGRWPGLCSVCDSSNTSPLYSAAVKDHLDVVNAILDTDDSCIRIVRKNGKTSLHTAARIGYHRIVKALIERDPGIVPIKDRKGQTALHMAVKGKNTDVVEELLMADVSILNVRDKKGNTALHIATRKWRPQMVQLLLSYESLEINAINIQNETAMDLADKVPYGESKTEIIEWLTEAGAKNARNVGKIDEASELRRTVSDIKHNVQAQLSENAKTNKRVTGIRKELQKLHREAIQNTINSVTMVATLIASIAFVAIFNLPGQYFQDVNSGGDIGEAQIAKLTGFRVFCLLNATALFISLAVVVVQITLVAWETGAQKQVIKIVNKLMWTACLSTGAAFISLAYVVVGPQHAWMAFTVSAIGGPIMIGTLLFLAYLLLRPRFKFGEDRQRRIKRASGSKSFSWSLHDGFSDLEAFSDHEKKIYAL

SEQ ID NO: 13025 - protein, 367 aa, Zea mays
  VARIANT 319: note = Ancestral polymorphism is C, Derived polymorphism is Y
  VARIANT 316: note = Ancestral polymorphism is C, Derived polymorphism is R
  VARIANT 79..367: note = Derived polymorphism lacks residues 79 to 367
MEVAATSPWPEEPLLRPPSPQPNLRADAASSGDPASPPPSAVRPSRLAALIGRAAGRRGPSMLVRETAALQLQRRRADWAHSRPVLALDIAWNVAFAAAAAAVLSSSAEESPVKPLRLWVVGYAAQCLVHVGLVCADTRRETRRARRSASDVESAGAGTDSSDADSEDDERAEGRSSYTGRCETMNTLISFLWWIIGFYWIFSGGEVLEHGAPRLYWLTIVFLAFDVFFAVFCVAVACFIGIALCCCLPCVIAILYALAGQEGASDADISVLLRYRYSDPSEDGEKGVDEGLMIPILNNSGMSTSERILLREDAECCICLSSYEDGAELSALPCNHHFHWPCITKWLRMNATCPLCKYNILKGSDSA

SEQ ID NO: 13026 - protein, 256 aa, Zea mays
  VARIANT 226..256: note = Derived polymorphism lacks residues 226 to 256
MERTRDSGPPATGSKVGGPSSPGYLMTVGRGLVVVGVGMWSYGVVICTMVGRTIQVQGFALTDSAESVKLFLERIAGAGTICALKLRHPRNISANSRAFAIVQFQSQESASLVENAAQRQVLKIGRFYLRTRPADRDIVPRPRIPMFSLEDIVLHLGCLVKENILSALFRASNVSVQFGFDMKKIYFYLSYNFTKFKLELSYESIWEMQLHRPPAYRSRTQFLLIQVGFSYNLPFLDILADFRLYLFNLLKRYISR

SEQ ID NO: 13027 - protein, 415 aa, Zea mays
  VARIANT 104..415: note = Derived polymorphism lacks residues 104 to 415
MESLTLRASTAASPLQRRRLLPGRQRATYVRATASAGEPDLSVRVNGLQMPNPFVIGSGPPGTNYTVMKRAFDEGWGAVIAKTVSLDAEKVINVTPRYAKLRAEPNGAAMGRIIGWQNIELISDRPLETMLNEFKQLKKEYPDRILIGSIMEEYNKAAWHELIERVEESGVDALEINFSCPHGMPERKMGAAVGQDCDLLEEVCGWINEKATVPVWAKMTPNITDITQPARISLKSGCEGVSAINTIMSVMGINLKTLRPEPCVEGYSTPGGYSARAVHPIALAKVMQIARMMKEEFADGQSLSAIGGVETGNDAAEFILLGADTVQVCTGVMIHGYPLVKKLCAELQDFMREHNFSSIEEFRGASLPYFTTHTDLVHRQQEAVRQRKAIKKGLQSDKEWTGDGFVKETESMVSN

SEQ ID NO: 13028 - protein, 87 aa, Zea mays
  VARIANT 4: note = Ancestral polymorphism is L, Derived polymorphism is M
  VARIANT 15: note = Ancestral polymorphism is I, Derived polymorphism is T
  VARIANT 73: note = Ancestral polymorphism is K, Derived polymorphism is N
  VARIANT 84: note = Ancestral polymorphism is P, Derived polymorphism is S
MAVLKNSNLVLAALIMLLMASSMVLGSAAARPLLVGEELAGEAAAVGGGGDSIVRFIRQLYWQRLSGPGPSCKGSTWDPNNGCPPPP

SEQ ID NO: 13029 - protein, 86 aa, Zea mays
  VARIANT 14: note = Ancestral polymorphism is V, Derived polymorphism is L
  VARIANT 32: note = Ancestral polymorphism is Q, Derived polymorphism is H
MIMTRFVLPLMMAVLMLLAALQPGTARRIEDQKWTGGELSAAAAGHHRPIVQFAKHLYLQRRLQQAQPSCGSYYTGSPSCSHRRQP

SEQ ID NO: 13030 - protein, 83 aa, Zea mays
  VARIANT 1: note = Ancestral polymorphism is M, Derived polymorphism is I
  VARIANT 9: note = Ancestral polymorphism is L, Derived polymorphism is P
  VARIANT 57: note = Ancestral polymorphism is L, Derived polymorphism is F
MAMTSKFVLPLLLAVLMLLVVSGSARPLQDDEWAGGETSSASASVVGHPTIQFLKRLYLQQLASPCPSNMTYDPNSNPHCHRR

SEQ ID NO: 13031 - protein, 80 aa, Zea mays
  VARIANT 20: note = Ancestral polymorphism is V, Derived polymorphism is A
  VARIANT 46: note = Ancestral polymorphism is P, Derived polymorphism is S
MAMTSKFVLPLLLAVLMLLAVSGSARRVEGDRWAGGETAASVVGRPTIQFLKRLYLQQLAAPCPSGMTYDPNSNPHCHHR

SEQ ID NO: 13032 - protein, 452 aa, Zea mays
  VARIANT 323: note = Ancestral polymorphism is L, Derived polymorphism is P
MVTPAVSRYRLRPRLVRVAVSEIPLATRRTRQQPVAATEPAIPSNFLCPISLEMMKDPVTALTGITYDRDSVEGWLQRGHSTCPVTARPLRAEDLIPNHATRRMIQDWCVANRALGVERVPTPRVPLSAADAAELLAAVSAAARRGDAMVCRQLAAKARALGKESDRNRRCLAAGGAARALSSAFLRLVDQPASFGGALGEILATLVVFFPLDEECRSHIASPASLDAIVSILSHDGEATSKSSAAVVLREIASSSDSDPECLDALSETNGVHDALIKLLQKPVSAQATKAALVTAYYLVRGSDLAARRLVDLGMVELLVEMLVDADKGTTEKALAVLDSLLLTEEGRGKACAHALAVPVLVKKMQHVSEMATEFAVSALWRLCKSFSGEGPCKAEALQLGAFQKLLLLLQVGCMGVTKERASELLRLLNGSRDGVECIETVDFKGLKRPFS

SEQ ID NO: 13033 - protein, 1175 aa, Zea mays
  VARIANT 25..1175: note = Derived polymorphism lacks residues 25 to 1175
MHCIAPRLLLLPLPTVSRHALSPTQTPPLPPLLPSRACKFHLASARSPSRAAASVSGDDEDEEVDVDDDEDDETTIRNVDDEYDDDFEDGDEGDEGDEEAVDEESGGEYEEEAGEDEDKREDTAARRRDSEEYKSRRVAKLVAEVREFGEDVIDYNELAGIYDFPIDKFQRLAIQAFLRGSSVVVSAPTSSGKTLIAEAAAVATVARGRRLFYTTPLKALSNQKFRDFRNTFGDHNVGLLTGDSAINKDAQILIMTTEILRNMLYQSVGMTASEGRLFQVDVIVLDEVHYLSDISRGTVWEETVIYCPKEVQLICLSATVANPDELAGWISQIHGKTELVTSNKRPVPLTWHFSKKYSLQPLLDGKGKKMNRKLRMSNSQNLASPKSEFYYVKGKRRFRTNKIEQGNSRPLDISKQVQLSKHELSNMRRSQVPLIRDTLSQLWENGMLPAIWFIFSRRGCDAAVEYLEDCRLLHDCEASEVELELRRFKMQYPDAIRESAVKGLMRGVAAHHAGCLPLWKSFIEELFQRGLVKVVFATETLAAGINMPARTAVISSLSKRIDAGRQLLTPNELFQMAGRAGRRGIDTVGHAVLVQTPYEGPEECCDIIFAGLEPLVSQFTASYGMVLNLLAGSKVTHKQKESDDVKDKHSGRTLEEARKLVEQSFGNYVGSNVMVAAKEETERIRQEIQYLSSEITDESIDRKCREELSEEDYAEISLLQKRLKEEKQIRNELKKKMELERMAAWKNRLEEFESGHLPFMCLQYKDKDSIQHTIPAVFIGNLNSFADQKIMNMVEDDSLVSGKPKRDSGEQLYRPSYYVALSSDNSWYLFTEKWIKTVYKTGLPAVPSVEGGTLPRETLKQLLLREELVWDKVEKSEYGSLLSMEGSLDTWSWSLNVPVLNSLSEDNEVERFSQEHQDAVECYKQQRRKVSHLKKTIKATRGFKEFQKIIDMRNFTKEKIERLEARSRRLTRRIRQIEPTGWKEFLQISKVIQEARALDINTQVIYPLGETAAAIRGENELWLAMVLRNKVLLDLKPSQLAAVCGSLVSEGIKLRPWKNSSYVYEPSSVVTGVISYLEEQRNSLIDLQERHSVKIPCEIDAQFAGMVEAWASGLTWREIMMDSAMDDGDLARLLRRSIDLLAQIPKLPDIDPVLQKNAQIACSVMDRVPISELAG

SEQ ID NO: 13034 - protein, 365 aa, Zea mays
  VARIANT 46: note = Ancestral polymorphism is P, Derived polymorphism is T
MGAASPAMWAGLVLVVLLAASGPASAGLPRFAEAPEYRNGDGCPAPVTGAGVCDPGLVHIAMTLDAHYLRGSMAAIYSLLKHASCPESIFFHFLAAEGGGAPAVAELRAAVAASFPSLRFEIYPFRADAVAGLISASVRAALEAPLNYARNHLADLLPRCVPRAIYLDSDVLAVDDVRRLWETRLPAAAVVAAPEYCHANFSRYFTEAFWDDPVLGARVFAGRRRAPCYFNTGVMVIDLRRWRVGNYRQRIERWMEMQKEKRIYELGSLPPFLLVFAGEIEAVDHRWNQHGLGGDNVFGSCRPLHNGPVSLMHWSGKGKPWDRLDAGKPCPLDHTWKSYDLYIGENDSSPASGPSRSALSSLVAW

SEQ ID NO: 13035 - protein, 612 aa, Zea mays
  VARIANT 311..612: note = Derived polymorphism lacks residues 311 to 612
  VARIANT 299..612: note = Derived polymorphism lacks residues 299 to 612
  VARIANT 141..612: note = Derived polymorphism lacks residues 141 to 612
MGATTRREPLKQRVNRCLLKLSDRDTEAMAAAELEAIARALEPDELPTFVSAVSDARPTDKTPLRRHALRALALVAASHPRDVVAPLIPRILAAALRRVRDQDSSVRAALVDTARAAAAASASASTALRPLTDALLHEQDQCAQLAAALATAAAVEASAVTDDLASYLHKLQPRLLKLLRSNAFKAKPALITLIGASATVGGDAEVTASIPCLRDAVASDDWAARKAAAEALAALALEHTDLLTTYKSSCVTFFEARRFDKVKIVRESINRMIEAWKEIPGAEEDECSSAPPSASQSQRRYSLTGSASDGRYPAASLGSNSVPSATRRSRLPVSRSSPPDVSPSVTKTYSPSSIRNKKLSPPSYRKARQANNCNYKVEIAVAPDATPIKVVTEEKLLEGGNVRGRLEARRALFQGSQDRSAKLAGYKAGSRVVPYEGGGNLEEISEVEGRSERYAVQKDESLSEIRTQLLQIENQQSSLLDLLQKFMGKSENGMRSLETRVHGLEMALDEISRDLAFSSGRMSSREPDAKTCCIPSPKFWRRHNGGRSSSRFSVSDAANSSDGSRTSYKWERQRFGLQGGFVTNPLAEPNISSAGKTMVTHEGRKKDKTLQK

SEQ ID NO: 13036 - protein, 602 aa, Zea mays
  VARIANT 455..602: note = Derived polymorphism lacks residues 455 to 602
MAMLLRRRLPLLRLLRPLHTGSMASISSSSTPPPPPPPPLQKPHAAFVGPRSRRLRFPNAAPVESGRGAGKSSPAAAYLAMGAAAALASLPVAYADSNEQGAVDTVASADPAVGEDLARKERKRILELVQSRGMQRGSYPKFDVAVKGQKVVVKFNMPSNCNVSHLIVDLVTHIGLEAEQHGGGSEVLVRAWDSPAARQITLNPPKKTSTGDHNEDGLCVLIFEPLIGSDYSEIEFIKPGSFSLKELEALISALKIASEKGSSGKNTPRKGNGQRSKHLPSLEKVVSDLEAMGVRVYGFDETSSVPMDGTVIWENLAGYEPQKRHVPPVCYSFPFLNQEIEDTVLLALQSPEVYDDIARGTRCKFETNRPRAVLFEGPPGTGKTSSARVIAKQAGIPLLYVPLEVVMSKYYGESERLLGSVFSLANDLPEGGIIFLDEVDSFAIARDSEIHEATRRILSVILRQIDGFEQDRRVVVIAATNRKEDLDPALISRFDSIICFGLPDQQTRVEIAAQYAKHLTRSELVQFSLATQEMSGRDIRDVCQQAERHWASKLIRGQVPKDEKGEPSLPPIDEYLSCAEQRRKSLPGRTSQTSRSPALKLA

SEQ ID NO: 13037 - protein, 114 aa, Zea mays
  VARIANT 7: note = Ancestral polymorphism is H, Derived polymorphism is R
  VARIANT 104: note = Ancestral polymorphism is V, Derived polymorphism is M
MKRLLAHGQSGCPSRTLVGRIPALPVLCNNVLPDHRYYSAEKHDDDTTLGEIGDKARSTAEEFLRVAKEKTDDVAEGAKETLHETKEAVVGESDDEKEKFKRRVEEGKYHHQKK

SEQ ID NO: 13038 - protein, 91 aa, Zea mays
  VARIANT 57: note = Ancestral polymorphism is K, Derived polymorphism is R
  VARIANT 29: note = Ancestral polymorphism is Q, Derived polymorphism is K
MQRSNSFGTSWADQWDYGGDPSPRARGRQDGGAGGKKQQGGVEKTKAAAATGLRKVKEGTATGFQWIKDKCQKKGGKKQQGAHDGSGIAGY

SEQ ID NO: 13039 - protein, 306 aa, Zea mays
  VARIANT 85: note = Ancestral polymorphism is R, Derived polymorphism is S
MAFAVAFPASAFPSGFPPGTPPAFPNPWAAFQNLSGCHMGEERQGLAGLKDYLSHFGYLPPPPPSSPFSDAFDQNLEAAIATYQRNFGLNATGALDPRDLKYAITATSAAASIDRSTLSDVFARAFSRWAAATNLRFAETASESDADITIGFYSGSHGDGEPFDGPLGTLAHAFSPTDGRFHLDAAEAWVAGSDVSRSSATGAVDLESVAVHEIGHLLGLGHSSVPDAIMYPTIRTGTRKVELEADDVQGIQSLYGSNPNFKGATPTSPATSSREMDSSAGAGCRPDRVFVGVVAVAAVGLLLLVL

SEQ ID NO: 13040 - protein, 449 aa, Zea mays
  VARIANT 323: note = Ancestral polymorphism is R, Derived polymorphism is Q
MAGPKFGSFKAEKGDSAAAAGAAAQRRDPYEVLGVGRNATEQEIKSAFRRMALKYHPDKNSDDPVASEKFQEATFSYNILSDPDKRRQYDASGFEAIEADSQELELDLSSLNTVNTVFAALFSKLGVPIKTTVSATVLEEALNGSVEISQLQLGKSLCRKVEKQSAHFYSVDITDKEAKMGLVCRVHSTSKSKFKLLYFELEDNGGLSLALQLTSISLVQEDSAKTGKVTSAGMFFLGFPVYRFEQNNSAAAAKDPDSAFFKRLDGFQPCEVNELKAGSHYFAVYGDNFFKSASYTIEVVSAEPFSAQKEKLRSVEAKIIAKRSELSKFESEYREVLAKFTEMTSRYAQEMQTIDDLLKERNAIHASYTNNPTLQRSSSSSKGKSPSKGSRSEDDQTVKKEKKSKSQPMEGSKSDDEGPENKKEETPKDRIRRKKWFNIHLKVDKRRPC

SEQ ID NO: 13041 - protein, 362 aa, Zea mays
  VARIANT 20: note = Ancestral polymorphism is A, Derived polymorphism is V
MHQHEILAIMRLSSLLLVVAALSARAAAQQVPPVGGSALKPDYYSQSCPRAERIIAEVMQTKQMANPTTAAGMLRVFFHDCFVTGCDASVLIASTQFQKSEHDAEINHSLPGDAFDAVVRAKLALELECPGVVSCADILALASGVLVTMTGGPRYPIPLGRKDSLSSSPTAPDVELPHANFTVDRLIQMFGGKGFTVQELVALSGAHTLGFSHCKEFADRLYNFRSQGGKPEPFDPSMNPSYARGLQDVCKDYLKDPTIAAFNDIMTPGKFDNMYFVNLERGLGLLSTDEELWTDPRTKPLVQLYASNPTAFFTDFGRAMEKLSLFGVKTGADGEVRRRCDAYNSGPDVGGAMPMAMPMPKM

SEQ ID NO: 13042 - protein, 586 aa, Zea mays
  VARIANT 88: note = Ancestral polymorphism is N, Derived polymorphism is I
  VARIANT 223: note = Ancestral polymorphism is R, Derived polymorphism is G
  VARIANT 226: note = Ancestral polymorphism is R, Derived polymorphism is H
  VARIANT 345: note = Ancestral polymorphism is I, Derived polymorphism is T
MRSPGRRLPAPARLVAAALLLAALTGGAVGADGYGRARRVYMKNKVLEMFYHAYDNYMTYAFPHDELKPLTKSFTDSLSELGNLNVLNLVVLGNLTEFERGVLWLSENLTFDVDARINLFECNIRLLGGLISAHILAKDYSSQFKHGLYQDQLLRLAESLGNRFLPAFETPTGLPYSWINLKYGVMENETTETSTSGCGSLILEMGVLSRLTGDSRYEAAALRALRKLWSMRSSLNLVGTTLDVFTGKWIQYSSGIGAGVDSFYEYLIKAYILFGSDEYWDMFHSAYLAVQKYFRHGPWYHEADMRTGEATHWQLTSLQAFWPGLQTLLGDVTAANLSHREFYNIWQRFGVLPERYLLDYGMLHPTEKYYPLRPEFAESTFYLYQATKDPWYLEVGETIVRSLNYYTKVDGGFASIRDVSTMKLEDHQHSFFLSETCKYLFLLYDDSFLRNQNYIFTTEGHPLPIRSTWHEKFPAAYVPSNWTSVKDEIQPIRASALSSQVCPETIFGRSVGTPWESACHVPDAHASHRCRTDDDCGIEAITCKKRTCSMAGYCGLFFYNGNKSSGFSMIMRTANTSRLLQLRTAA

SEQ ID NO: 13043 - protein, 173 aa, Zea mays
  VARIANT 29: note = Ancestral polymorphism is S, Derived polymorphism is R
  VARIANT 12: note = Ancestral polymorphism is V, Derived polymorphism is E
  VARIANT 11: note = Ancestral polymorphism is T, Derived polymorphism is A
MGNCQAAEVATVLLQHPGGRVERLYWSTSAAEVMRANPGHYVALVTLRVAEDRQDAPGGQRRTVRLTRVKLLKPKETLLLGHVYRLITTQEVTKAVQARKQDKQRKAQQQLLEPRQGQGVASGAAAEEEDDDDEAALDASLDQLARQDNGSRSSSARHRQWRPSLQSIDEATT

SEQ ID NO: 13044 - protein, 311 aa, Zea mays
  VARIANT 249: note = Ancestral polymorphism is G, Derived polymorphism is V
  VARIANT 230: note = Ancestral polymorphism is A, Derived polymorphism is V
  VARIANT 214: note = Ancestral polymorphism is E, Derived polymorphism is D
  VARIANT 202: note = Ancestral polymorphism is P, Derived polymorphism is S
  VARIANT 179: note = Ancestral polymorphism is C, Derived polymorphism is Y
  VARIANT 170: note = Ancestral polymorphism is P, Derived polymorphism is A
  VARIANT 163: note = Ancestral polymorphism is P, Derived polymorphism is L
  VARIANT 153: note = Ancestral polymorphism is C, Derived polymorphism is R
  VARIANT 134: note = Ancestral polymorphism is G, Derived polymorphism is E
  VARIANT 73: note = Ancestral polymorphism is G, Derived polymorphism is D
  VARIANT 60: note = Ancestral polymorphism is A, Derived polymorphism is T
  VARIANT 54: note = Ancestral polymorphism is A, Derived polymorphism is T
  VARIANT 53: note = Ancestral polymorphism is R, Derived polymorphism is S
  VARIANT 46: note = Ancestral polymorphism is E, Derived polymorphism is K
  VARIANT 39: note = Ancestral polymorphism is Y, Derived polymorphism is C
  VARIANT 38: note = Ancestral polymorphism is C, Derived polymorphism is Y
  VARIANT 36: note = Ancestral polymorphism is R, Derived polymorphism is C
  VARIANT 27: note = Ancestral polymorphism is Q, Derived polymorphism is R
  VARIANT 25..311: note = Derived polymorphism lacks residues 25 to 311
  VARIANT 19: note = Ancestral polymorphism is R, Derived polymorphism is C
MARLVLRLREDHRACVLGRRVEALQARVYALELRNRECYEATAAWEAEVQWLSAENHRLADQAMMARRKRKDGGGHAALFASYNVHLLAALVLQRGSLSLSAVIVEMQPGSKNILVISDSSGSKMGKERAFCAGGDLAALVRSTVSYTEGTWCSTDHSSTYSPGCILWIPGYKNIIAYCGYYRNITANTLAVLEAMAAHNFPINPYGKAKKMAEDIILDFSKLKKSNMMAVMILRYFNVIGSDPKGRLGEAPIHELRKHGRISGACFDATLGIIPGLKECKAVVVPRTICYQNKKDESGWWPRLLKKDLCS

SEQ ID NO: 13045 - protein, 587 aa, Zea mays
  VARIANT 337..587: note = Derived polymorphism lacks residues 337 to 587
  VARIANT 151..587: note = Derived polymorphism lacks residues 151 to 587
MDDPSSASNKHKRKRGRKPKASPPFPDRSSPSPSAAPAPAGRRGRKPRRHEAPADADATRPPSPPRRGEPKPVANGGDVVAVAESGPASWDEVVRVVPCMDAVVKVFCVHTEPNFSLPWQRKRQYSSSSSGFIIGGRRVLTNAHSVEHYTQVKLKKRGSDTKYLATVLAIGTECDIALLTVNDDEFWEGVSPVEFGTLPALQDAVTVVGYPIGGDTISVTSGVVSRIEILSYVHGSTELLGLQIDAAINSGNSGGPAFNDRGKCVGIAFQSLKHEDAENIGYVIPTPVITHFIEDYKKSGEYTGNMLFSIFLISNDSVTIFFLCIILGFPILGVEWQKMENPDLRKAMGMKPDQKGVRVRRVEPTAPESGCLRPSDIILSFDGVDIANDGTVPFRHGERIGFSYLVSQKYTGEKALVKVLRDSKVHEFKIRLATHKRLVAAHVKGRPPSYYIVAGFVFAAISVPYLRSEYGKDYEYDAPVKLLVKHLHAMAESPDEQLVVVSQVLVSDINIGYEEIVNTQVLAFNGQPVKNLKNLATMVENCKDEFLKFDLEYDQIVVLETKTAKAATQDILTTHCIPSATSDDLKA

SEQ ID NO: 13046 - protein, 528 aa, Zea mays
  VARIANT 267..528: note = Derived polymorphism lacks residues 267 to 528
  VARIANT 281..528: note = Derived polymorphism lacks residues 281 to 528
MPRPSQQTRNIYTRTMGSAGGGGESKLESPLLGASSTGHGEAVVSGQLESILGDASVPWGTRMASASAVEMRLLVRLAAPAVLVYMINYLMSMSTQIFSGHLGTLELAAASLGNTGIQVFAYGLMLGMGSAVETLCGQAYGAHKYDMLGIYLQRSTVLLMATGVPLAALYAFSRPVLVLLGESPEIASAAAVFVYGLVPQIFAYAANFPIQKFMQAQSIMGPSAYISAAALAAHLALSYLVVYRLGLGLLGASLTLSASWWAIVAAQFAYIVTSSRCRLTWRGFSWQAFSGLPSFFRLSLASAVMLCLETWYFQILVLIAGLLKDPELALASLSVCMTISGWVFMISVGFNAAASVRVSNELGAGNPRAAAFSVVVVTLLSFVLSVLVSAVILLCRDYISYIFTEGEDVSQAVSRLTPLLAFTLILNGIQLQPVLSGVAVGCGWQAFVAYVNVGCYYIVGIPLGCLLGFYFDLGAAGIWSGMIGGTLMQTLILIWVTFRTNWNKEVEEAQKRLNKWDDGKAPLLSAQE

SEQ ID NO: 13047 - protein, 352 aa, Zea mays
  VARIANT 30: note = Ancestral polymorphism is V, Derived polymorphism is A
  VARIANT 63: note = Ancestral polymorphism is N, Derived polymorphism is K
MEEQLSPLAVTHLLQHTLRSLCGHDDAQWVYAVFWRILPRNYPPPKWDLQGGIYDRTRGNRRNWILAWEDGFCNFAASACDHEGAAAPAAAAASSSYTAECAAAGQEAAKGLQPELFFKMSHDIYNYGEGLIGKVAADHSHKWVFQEAQEHEINLISSWSNPADSHPRTWEAQFKSGIKTIALIAVREGVVQLGSMKKVAEDLSYVVMLRRKFGYLESIPGVLLPHPSSAAFPAGAIAGPAAADAACSWPPGLVMPPPVELYDPYAQSAAAAAQMHIVPSMSSLEALLSKLPSVDPAAAAMASKEEMDAVEHGERHGMADVVAAGSGGESTSVAAAAAVSYYVNVAKPSEGF

SEQ ID NO: 13048 - protein, 533 aa, Zea mays
  VARIANT 90: note = Ancestral polymorphism is I, Derived polymorphism is T
MNLLEELIRAIELWLRIVKEQVPLIDPTLDPVLLVPGIAGSILEAVDDEGNKERVWVRILAAEHEFREKLWSKFDASTGKTVSVNEKTRITVPEDRYGLYAIDTLDPDLIIGDDTVYYYHDMIVEMIKWGYQEGKTLFGFGYDFRQSNRLSETLDRFSKKLESVYTASGGKKINLITHSMGGLLVKCFISLHSDTFEKYVKSWIAIAAPFQGAPGYITTSLLNGMSFVEGWESRFFISKWCMQQLLLECPSIYELLANPNFQWKDIPLLQIWRENLDNSGKKSALLESYEPEEAIMMIKEALSSNEIIADGMHIPVPLNLDILNWAKETYDLLCSTKLPESVKFYNIYGIDYDTPHTVCYGSEQHPVSSLSSLLYAQGKYVYVDGDGSVPAESAKADGFNAVARVGVAADHRGIVCSRRVFRIVQHWLHAGEPDPFYDPLSDYVILPTLYEIEKHREKHGDVTSVAEDWEIISPNDGKTLRPGELPPMVSTLTTSREGKEGALEEAQATVVVHPEKKGRQHVQVRAVGVSHGG

SEQ ID NO: 13049 - protein, 179 aa, Zea mays
  VARIANT 28: note = Ancestral polymorphism is C, Derived polymorphism is R
MDTDHGGASAAGMDEAEAAFFARGGRRCCCFPWPAAASSSSSHQRVGGAAAAAAAAAEETWWQRAVDAVLKVREWSELVAGPRWKTFIRRFGRSGPPARPHHHHFGGRKLNYDALSYALNFDEGHGASPEGDYTGYRDFSARFVGPPASAKSSMDLGGRDAPPLFGPPPLPPHDGAGRA

SEQ ID NO: 13050 - protein, 202 aa, Zea mays
  VARIANT 23: note = Ancestral polymorphism is V, Derived polymorphism is G
MEDSKAPVSEHGGETSKAAVLVGVAAGSGGRRGRAATRVLAVVDLILRSVAVVATVGSAIAMGTTNQTLPFFTQFLRFKAQYSDLPTLTFFVVVNSIVAAYLVLSIPLSIVHIMASSAKYSRLVLVFFDAAMLLALVTAAASAAAAIVYLAHKGNARANWLAICQQFDSFCERISGSLIGSFAAMALLLLLILLSAAALARR

SEQ ID NO: 13051 - protein, 275 aa, Zea mays
  VARIANT 140: note = Ancestral polymorphism is S, Derived polymorphism is L
MASPLLKSHSQLAAAAALHSVRRADRCPATIHLGKFHDHGLRSGRSKRSGSAKVGAFPSLDVVPLMVTMVEHVDMSRDYVVTKSIWHLSDAALKSVCESPARHCHCHRRVVSAAHERAYLLRHVHRLGSLLLRVHEGKRLQYYYNTHTHHVIALFCWSVHGTACLRAWVKSKQDPFYDSETYRSQGGDGTVHWYYDRVSKHARTFAQRLCLHSKAGSLATDNFADISCNAHWQQEDLEASAREELLREELLEEIEQRVGGLRELEEASKEEQLTK

SEQ ID NO: 13052 - protein, 290 aa, Zea mays
  VARIANT 253: note = Ancestral polymorphism is G, Derived polymorphism is R
MALRQAVLLAVVLAALLPLALSRGLGLVHGHVRPHTHGLGLGHHHAQPHPHPHGHAPLVGGAWSSAHATFYGGGDASGTMGGACGYGNLYSQGYGTNTAALSTALFNNGLSCGACFEVRCDAAGGGSHSCLPGSVVVTATNFCPPNNALPSDDGGWCNPPRAHFDMSQPVFQRIALYRAGIVPVSYRRVACNKKGGIRFTINGHSYFNLVLVTNVGGAGDVHAVAVKAERSPGWQALSRNWGQNWQSNTLLDGQALSFRVTTSDGRSVLSNNAAPRGWSFGQTFSGAQFN

SEQ ID NO: 13053 - protein, 544 aa, Zea mays
  VARIANT 366..544: note = Derived polymorphism lacks residues 366 to 544
  VARIANT 345..544: note = Derived polymorphism lacks residues 345 to 544
  VARIANT 338..544: note = Derived polymorphism lacks residues 338 to 544
  VARIANT 313: note = Ancestral polymorphism is G, Derived polymorphism is V
  VARIANT 306: note = Ancestral polymorphism is A, Derived polymorphism is V
  VARIANT 272: note = Ancestral polymorphism is N, Derived polymorphism is K
  VARIANT 212..544: note = Derived polymorphism lacks residues 212 to 544
  VARIANT 166: note = Ancestral polymorphism is A, Derived polymorphism is D
  VARIANT 36: note = Ancestral polymorphism is A, Derived polymorphism is T
MGAAAAGGHALRAVGDVVSFPATVAAFVEALLQGWAEARAGLLVPLLRAAVLLCTAMSLIVLAEKVFLGAVSSVAKLRRRRPGRVCRCDPDEEAAAASQAYPMVLVQIPMYNEREESVTRTQVYQLSIEAACRLTWPVDRLIVQVLDDSTDSVIKELVKGECERWATEEGINVKYETRKDRAGYKAGNLKEGMRHAYVRACEFVAMFDADFQPPPDFLVRTVPFLVHNPSLALVQTRWKFVNANDCLLTRMQEMSMDYHFKVEQEAGSSLCNFFGYNGTAGVWRTQAIVESGGWEDRTTAEDMDLALRAGLLGWEFVYVGSIKVKSELPSTLKAYRSQQHRWSCGPALLFKKMFWQILAAERVSVWKKWYMVYDFFIARRIVGTFYTFFFFSVLIPLNILLPEAQIPVWELIYIPIAITLLNSVGTPRSIHLVILWVLFENVMALHRFKAILIGFLEADRANEWIVTQKLGNLQKLKSIARLTGSYRFKDRFHFLEVFIGLFLLASACFDYLYRDDYVYLFVLPQSIMYFAIGFQFVGLNVSED

SEQ ID NO: 13054 - protein, 688 aa, Zea mays
  VARIANT 113..688: note = Derived polymorphism lacks residues 113 to 688
MAGATSSSSVSLILILVASSSPRRSRGRVGIALRSYGYSGAELRLHWARRGSSRDGPAVVRAAAVPAGGEGEDAAATQAVYSTSPPKTATSAPKQNQSAAKQNGTVGSSSASKSPAPAVSESKAEPSAPVTKTETDASAKVEELKPSVDDAKPVESIGIPEPVDAKVDAAAATDAAASAADDTEDKEHGPLAGPNVMNVVVVASECAPFCKTGGLGDVVGALPKALARRGHRVMVVIPRYGEYAEARDLGVRRRYRVAGQDSEVTYFHSYIDGVDFVFIEAPPFRHRHNDIYGGERSDVLKRIILFCKAAVEVPWYAPCGGTVYGDGNLVFIANDWHTALLPVYLKAYYRDNGLMQYARSVLVIHNIAHQGRGPVDDFVNFDLPEHYIDHFKLYDNIGGEHCNVFAAGLKMADQVVTVSNGYLWELRTSEGGWGLHDIINQNDWKLQGIVNGIDMSEWNPAVDVHLHSDEYTNYTFETLDTGKRQCKAALQRQLGLQVRDDVPLIGFIGRLDHQKGVDIIADAIHWIAGQDVQLVMLGTGRPDLEDMLRRCEAEHSDKVRAWVGFSVPLAHRITAGADVLLMPSRFEPCGLNQLYAMAYGTVPVVHAVGGLRDTVAPFDPFNDTGLGWTFDRAEANRMIDALSHCLNTFRNYKESWRGLEARGMAQDLSWDHAAVLYEDVLVKAKYQW

SEQ ID NO: 13055 - protein, 236 aa, Zea mays
  VARIANT 121: note = Ancestral polymorphism is D, Derived polymorphism is V
MEMNFFSQDELGGLFDVDFPSFWAQMEEDEARRKSEEGDCEKALIVYGNVQTVAEIPGRRGGGSSSGTKKKELTFEQLSRHFSVPIKQAAQELNVGVTVLKRQCRKLGVTRWPYRKLKSLDKLIDNVQGIGKQNAQENGHLTRSLVEFLDQTMKPIGERPDAMLDQRMEGLRLVCFKENVQEDENLTRSVVEFLQLTKKMIEERPDAILDQRTKDLRQACFKESFRRKRLIGHGAW

SEQ ID NO: 13056 - protein, 394 aa, Zea mays
  VARIANT 373: note = Ancestral polymorphism is P, Derived polymorphism is L
  VARIANT 342: note = Ancestral polymorphism is K, Derived polymorphism is N
  VARIANT 317: note = Ancestral polymorphism is S, Derived polymorphism is L
  VARIANT 278: note = Ancestral polymorphism is L, Derived polymorphism is R
  VARIANT 260..394: note = Derived polymorphism lacks residues 260 to 394
MLATASPHLQAAARRLFLAVPVNQGCSSIRLPRRCFGRYASVRAASVTAPPAKEGADDLGFLEMSSGTRRRYYMLGGKGGVGKTSCAASLAVRFANNGHPTLVVSTDPAHSLSDSFAQDLSGGTLVQVEGPDSPLFALEINPEKAREEFRTVSQKNGGTGVKDFMDSMGLGVLVEQLGELKLGELLDTPPPGLDEAIAISKVMQFLEAQEYSMFSRIVFDTAPTGHTLRLLSLPDFLDASIGKILKLRSKIASATSAIKSVFGQEVQQQDAANKLEQLRERMVKVRELFRDTESTEFIIVTIPTVMAISESSRLHSSLQKESVPVRRLIVNQVLPPSTSDCKFCSIKRKDQTRALDMIRTDPELKGLNIIQAPLVDMEIRGVPALNFLGDILWK

SEQ ID NO: 13057 - protein, 493 aa, Zea mays
  VARIANT 157..493: note = Derived polymorphism lacks residues 157 to 493
  VARIANT 165: note = Ancestral polymorphism is P, Derived polymorphism is L
  VARIANT 166: note = Ancestral polymorphism is W, Derived polymorphism is S
MPTHEKRRRKLEAEGKKKKKKVFRRQFFCGYLFTRQYLNQNHVKVVKPNNPCLKHKYWLSVVKKVRKKGTNEEGSLSKKDFGIMGESKITRLLIPSVLQIHTALRFAQWDPTSDDIEKQDEVMLPGFRFHPTDEELVRFYLKRKIQQKSLPIELIRQLDIYKYDPWDLPKLASTGEKEWYFYCPRDRKYRNSTRPNRVTGAGFWKATGTDRPIYSSDGSKCIGLKKSLVFYKGRAAKGVKTDWMMHEFRLPSLTDPTLLQKKPLEKTIPPNDSWAICRIFKKTNSTAQRALSHSWVSPPLSSTNENYIRLSSQATQRSYHSSENTSSTMTDIISSIQFTGSSYMPSIVSSCRNPLSIIDSSSRPAASLMLPSSGAEHHAMSILSAIPHDLPAGMDIASMVLNASPTTLQNLDRIPTNIEFGQPHHPSNSSMANRCTADLLDIGNSVTGAPRSINFPFNLQGALPDDWRMTLPWDSLPCTTEVSTNYKSTKYYT

SEQ ID NO: 13058 - protein, 736 aa, Zea mays
  VARIANT 237..736: note = Derived polymorphism lacks residues 237 to 736
MSSGGPPRKRNFKIEAFKNRVDLDPKYAERTWKVLEHAIHEIYNRNASGLSFEELYRSAYNMVLHKYGEKLYDGLQSTMTWRLKEISKSIEAAQGGLFLEELNAKWMDHNKALQMIRDILMYMDRTYVPTSHRTPVHELGLNLWRDHIIHSPMIHSRLVNTLLDLIKRERMGEVINRGLMRSITKMLMDLGPAVYQDDFEKPFLDVSARFYSVESQEFIVCCDCGNYLKKAERRLNEEMERVSHYLDAGSEAKITSVVEKEMIANHMHRLVHMENSGLVNMLVDDQYKDLGRMYSLFRRVPDGLSTIRDVMTSYLRETGKQLVIDPESLKDPVEFVQRLLNEKDKHDKIISVAFGNDKTFQNALNSSFEYFLNLNSRSPEFISLYVDDKLRKGLKGATEEDVEVILDKVMMLFRYLQEKDVFEKYYKQHLAKRLLSSKTVSDDAERSMIVKLKTECGYQFTSKLEGMFTDMKTSQDTMQDFYAKKSEELGDGPTLDVHILTTGSWPTQPSPPCNLPTEILTVCEKFRAYYLGTHNGRRLTWQTNMGTADIKATFGKGQKHELNVSTYQMCVLMLFNNADGLTYKDIERDTEIPASDLKRCLQSLACVKGKNVLRKEPMSKDISEDDTFYFNDKFTSKLVKVKIGTVVAQKESEPEKQETRQRVEEDRKPQIEAAIVRIMKSRRVLDHNSIVAEVTKQLQARFLPNPVVIKKRIESLIEREFLERDKVDRKLYRYLA

SEQ ID NO: 13059 - protein, 271 aa, Zea mays
  VARIANT 68: note = Ancestral polymorphism is Q, Derived polymorphism is L
  VARIANT 78: note = Ancestral polymorphism is R, Derived polymorphism is S
  VARIANT 96: note = Ancestral polymorphism is N, Derived polymorphism is K
  VARIANT 114: note = Ancestral polymorphism is S, Derived polymorphism is L
  VARIANT 125: note = Ancestral polymorphism is R, Derived polymorphism is C
  VARIANT 133: note = Ancestral polymorphism is G, Derived polymorphism is R
  VARIANT 205: note = Ancestral polymorphism is H, Derived polymorphism is L
MVGEIHGPLAMRPHVSHSRSSPHDPMKAKGAPKALWQAGICRSGGRGLRGAQSCLWGGDNEAARLKVQDDEQQQRRRRRRPWFRHGCRDGKSFTYKNSINIAIAVAIDGGLITSVLQDAEHVGERRSCCGCGGCGGHGVATCGKWRHEEEADLRSRRWTGRKFECLDKSPFRYFLGELYGGNSLGSTIAVGNEKKRQRVYNTMFHVPWRCERVLGTSNFVHIEPVRMTSSLKVIEMLQSSNGIQHVPCASISALISRDGNANWNWSLVSID

SEQ ID NO: 13060 - protein, 467 aa, Zea mays
  VARIANT 387..467: note = Derived polymorphism lacks residues 387 to 467
  VARIANT 410..467: note = Derived polymorphism lacks residues 410 to 467
  VARIANT 419: note = Ancestral polymorphism is P, Derived polymorphism is L
MGGGSGSFLKVLVNNMDVLAGPLVSLAYPLYASVRAIETKSAVDDQQWLTYWVLYSFITLFELTFAPVLECEGVGEADEPNSSGPLVVDTSGLADNSHKRKADTVKLKSSKAKKPKPLPKIESDFCYRREKGFPAIQIGLNLHRIQTSNFLQEFHGKESSIFTSSWAMSKKNVDLHAERHIMPLFSNCLSSYRHLLSESQLENSYSGWPWDAMTNYAEELSPVSEHQNELFTLSPELFRNAFLVIHQAAMQLVLIIVDTLKRFQLAVKVNAYDGVQIVDSLHSSKYHIATLAECDSCCCTDPPTSQFVDNENTKNLLKEKHTKPINFPGPIKMLGDGHTVTVINVQSKLSPPYMHSKDPGDAERLSTPGENNKESSFYHNCERHCYQPILPWINGDGSTNSTLYEGLSRRVIGYVMHYPGLSEEDVIRRMDVLNPQTCRTLLEKLTLDGNLHVRVFEEPVPMAPTTL

SEQ ID NO: 13061 - protein, 406 aa, Zea mays
  VARIANT 147..406: note = Derived polymorphism lacks residues 147 to 406
MMQPPPPHQQQQWAMAPPPPPQYYQAGHPPPPPPQFYQAGPPPPAMWGQPPPQAAAAPAPAGGGAGDEARTLWIGDLQYWMDENYLYSCFSQAGEVISVKIIRNKQTGQPEGYGFIEFSNHAVAEQVLQNYNGQMMPNVNQPFKLNWATSGAGEKRGDDGSDYTIFVGDLASDVTDFILQDTFKSRYPSVKGAKVVFDRTTGRSKGYGFVKFADSDEQTRAMTEMNGQYCSSRAMRLGPASNKKNTGGPQPSSAIYQNTQGTDSDSDPNNTTVFVGGLDPSVTDELLKQTFSPYGELLYVKIPVGKRCGFVQYSNRASAEEAIRVLNGSQLGGQSIRLSWGRSPANKQPQQEQSQWSGGGYYGYPQGYDPYGYARPPQDPAMYAYAAYPGYGNYQQQPPQQPPPQQ

SEQ ID NO: 13062 - protein, 386 aa, Zea mays
  VARIANT 366..386: note = Derived polymorphism lacks residues 366 to 386
  VARIANT 351..386: note = Ancestral polymorphism lacks residues 351 to 386
  VARIANT 301: note = Ancestral polymorphism is A, Derived polymorphism is D
  VARIANT 213..386: note = Derived polymorphism lacks residues 213 to 386
  VARIANT 111..386: note = Derived polymorphism lacks residues 111 to 386
MEESDLGGNLGKQTEEDKAAGESGDEGKIERSQSINLNRVPAVAVEAMSTQGNCETHGAAVPGTKDAGTGKAGQSSGDRQEEKLPKCEQVDYGSEVEGCADDENPGKRAALVTLVGNEYCGDEDERVQVLTIVKKDEHADDIVDRINPGTVAGYSEVKGAVGASAATSAVRPAGSRSSSFHGVTRHRWSGKYEAHLWDSSCRVEGRRRKGKQGSYDTEEKAARAYDVAAIKYWGENTRLNFPASSFPLASVISISYMMALYMSELLQISQYGKELEDIRDLSREECVTYLRRRSSCFSRGASIYRGVTRRQKDGRWQARIGLVAGTRDIYLGTFSMQNMNFDLPMPLKSNWFEFTDDLNFVPSQKQRKKLQRLMILLPLRYVAKTL

SEQ ID NO: 13063 - protein, 165 aa, Zea mays
  VARIANT 17: note = Ancestral polymorphism is A, Derived polymorphism is V
  VARIANT 33: note = Ancestral polymorphism is R, Derived polymorphism is C
  VARIANT 36: note = Ancestral polymorphism is P, Derived polymorphism is S
  VARIANT 38..165: note = Derived polymorphism lacks residues 38 to 165
  VARIANT 50: note = Ancestral polymorphism is Q, Derived polymorphism is R
  VARIANT 56: note = Ancestral polymorphism is T, Derived polymorphism is M
  VARIANT 58..165: note = Derived polymorphism lacks residues 58 to 165
  VARIANT 64: note = Ancestral polymorphism is R, Derived polymorphism is Q
  VARIANT 65: note = Ancestral polymorphism is R, Derived polymorphism is W
  VARIANT 68: note = Ancestral polymorphism is R, Derived polymorphism is Q
  VARIANT 98: note = Ancestral polymorphism is P, Derived polymorphism is S
  VARIANT 99: note = Ancestral polymorphism is V, Derived polymorphism is M
  VARIANT 101: note = Ancestral polymorphism is R, Derived polymorphism is H
  VARIANT 115: note = Ancestral polymorphism is R, Derived polymorphism is L
MPWNTQSVYDMYSVLAAVRNNGGLVKEAKAIIRLFPIWVACLLYAVAYSQSSTFFTKQAATLDRRIRRHFQVPPAALHSFISITIVVIIPIYERVLVSVSRRYSGKPSGITMLQRIGTGMFFSLLSTGIATLVENRSCDLEAATWRLYPSYGRAIRCYLVDLRSI

SEQ ID NO: 13064 - protein, 499 aa, Zea mays
  VARIANT 131..499: note = Derived polymorphism lacks residues 131 to 499
  VARIANT 54..499: note = Derived polymorphism lacks residues 54 to 499
MAAAAAASQSDVPHRQPGQRRPMCAVCTKPLRLCLCGRLRSPPVDNAVGVTVLQHAMEAHHPLNSTRVARLGLRNLAVAQVTDVNHRARFILTTLDAGGGAAAASGPAGGPVSARFGNHDRSDGPEEIELQDGGGLAFPRDGICGAKSDGKHSATCDFDQSGLSACGHLGAEDLSFGGSCEMLDLGDVNGGIFCNLAGEDGFLSCCHNDGGRVRFIKKTNSDGQPAGLERPSSAANQIENSVDEATTGESNHRSEMEVAYNVNGSLSHSVVTNDSDSDEVNGMVNGCNGVGKEIDEVSDAIGQDWTRKSMDKCTIAYTEKELRIGIERGVKPKIRWLSRGPLGEAAVSNGFLVTKIQMKKCKLTGEITVFEEFSITIPPKSALLFPCQRAISIDASGCQVQHLIVLDGTWAKAQRMYHENPWLQLLPHVKLESDRVSLYSEVRHEPKAGCLSTIESIVVAMRKLGEDSKGLDDLLDVFESMIADQRRCKDENVKQKLNS

SEQ ID NO: 13065 - protein, 147 aa, Zea mays
  VARIANT 5: note = Ancestral polymorphism is L, Derived polymorphism is F
  VARIANT 20: note = Ancestral polymorphism is G, Derived polymorphism is R
  VARIANT 29: note = Ancestral polymorphism is E, Derived polymorphism is Q
  VARIANT 37: note = Ancestral polymorphism is P, Derived polymorphism is L
  VARIANT 45: note = Ancestral polymorphism is S, Derived polymorphism is F
  VARIANT 58: note = Ancestral polymorphism is T, Derived polymorphism is K
  VARIANT 62: note = Ancestral polymorphism is G, Derived polymorphism is R
  VARIANT 66: note = Ancestral polymorphism is C, Derived polymorphism is Y
  VARIANT 86: note = Ancestral polymorphism is Y, Derived polymorphism is N
  VARIANT 104: note = Ancestral polymorphism is A, Derived polymorphism is V
  VARIANT 113: note = Ancestral polymorphism is T, Derived polymorphism is P
MVVELIKRRIVGLHQNTTTGSTDITDMWEPLEEGLLPLETTRHVSMITITLSKKELDKSSIGYAYCTLLSAAFNDFLCQFVLTRFYGVEIVIATPGRLIDMMEVGHTNLRRVTYLVLDEADRMLDMGFEPQIRKIVAQIRPDRQTLY

SEQ ID NO: 13066 - protein, 377 aa, Zea mays
  VARIANT 38: note = Ancestral polymorphism is S, Derived polymorphism is F
MGCTGSRHALRGGVRGGSRSPRARSRSGGVHHTVALKSSTLGSLSLDRDRDDDGALAGAAKTLMRRQKQQVRGSPAKAPAREPEVINVWELMDGLDDDGKDDEEGGDADADAEGRREKSATGSPAEFDFDPDVIAAFRKALDENPPPPPSDVPGNEGCVDKKPDGPGGEVGVKVKQREREIQRFPGIVRARVSAFQQRIDAKLLAKLAPPPPPDSARKVVLYLTSLRGVRKTYEDCWSTRSVLRSYGVRVDERDLSMHSGFKDELHAALGSSPNAGRLPQAFADGRHLGGAEEVRRMHEAGELARALEACDVVVAPPPSSGGKGVVLDACSGCGGVRFVPCEDCSGSCKVFVEEVGTFRRCPECNENGLVRCPLCSS

SEQ ID NO: 13067 - protein, 468 aa, Zea mays
  VARIANT 19: note = Ancestral polymorphism is T, Derived polymorphism is A
MALAPSHALVVAPFTALCAFLALALLFLYSKATSSSKKTQQLLPPGPAGLPIIGSLHCVVSKRPVFRWIHGLLKDMDTNVLCLRFGAVHVVVVACPETAREVLRTNDAVLASRPETVASALFSFGYKGSILTPYGEQWKKMRRVLSSEILSASMEQRLQRRRAQEADYLVGFLYSQCSASAAACCCSAVDVRHVARHFCGNMIRTLVFGKRHFSGGGGGGGPGPEEVTHMDALFTLLNYVYCFSVSDYVPAAWTWMVAGDHKKVAESVMETLSRPEVMHKAMEELDTVVGKDRLVQEPDIPRLNYLKACVREAFRLHPYHAFNPPHVATEDAVVSGYLIPKGSHVLLSRVGLGRNPDVWDAPLQFRPERHLMMNENDDVDDRYHHVVLTEPDLRFISFSAGRRGCPGVSLGSSVTMMLFARLLQGFTWTKPPGVRAIRLQESSTSLALAEPLLLQAQPRLPVHLYASG

SEQ ID NO: 13068 - protein, 582 aa, Zea mays
  VARIANT 172: note = Ancestral polymorphism is P, Derived polymorphism is A
MQRQRAKMPAGQLSWPLLLGAVLAFGVAASPAQASRNTHYDFVIKETNVTRLCHEKTILAVNGQFPGPTIYARKDDVVIVNVYNQGSKNITLHWHGVDQPRNPWSDGPEYITQCPIQPGANFTYKIIFTEEEGTLWWHAHSDFDRATVHGAIVIHPKRGTVYPYPKPHREVPIILGEWWNADVEQILLESQRTGGDVDVSDANTINGQPGDFAPCSKADTFKMSVEHGKTYLLRVINAGLTNEMFFAVAGHRLTVVGTDGRYLKPFTVDYIMISPGQTMNMLLEANRATNGSANSRYYMAARPFFTNAGLPFDDKNTTAILEYTDAPPAAGPPDFPELPAINDTAAATAYTAQLRSLVTEEHTIDVPMEVDEHMLVTISVNTLPCGANQTCAGPGGNRLAASLNNVSFVSPTTDILDAYYHSTSGVYDPDFPNKPPFLFNFTAPNPPQEFWLTKRGTKVKVLEYGTVVEVVFQDTAILGAESHPMHLHGFSFYVVGRGFGNFDKDKDPATYNLVDPPYQNTVSVPTGGWAAMRFRAANPGVWFMHCHFDRHTVWGMDTVFIVKNGKTPNAQMMPRPPNMPKC

SEQ ID NO: 13069 - protein, 391 aa, Zea mays
  VARIANT 165: note = Ancestral polymorphism is L, Derived polymorphism is I
  VARIANT 198: note = Ancestral polymorphism is Q, Derived polymorphism is L
MLLLPGRPVLSPALQYSSSPSPSRLRPLPCTSNAPTSASTAADAATPSSFSVEDYLVNRCNLYANVAARVAPELSAIRSPSKPDAVLAFLANTLELSPPLIAVAVARDPTILTCSVPRTLAPRAEELRALGFTAFQMGLIVARCGAAAFRSRALVPSVQFWLPYLRGRVDKLVAALKGNPGLLTADLRTVKSTVALLQEEGTLTDGDVGWFAISYCSKLLVASPDEVDSVLARADEFGVPRKTRAFKDAIIAAFSVTPERLAWKVAFFRDELGWTEAQVKTAAAKMPTLMTVSAERIRRNWEFLTTEVGMDAERVASFPALLRYDLEGRLVPRFQVMRVLQARRLWRGRDFNNIAAITEEDFVAKFIRPFLVKVPSLAKIYEAAVIEKEEQ

SEQ ID NO: 13070 - protein, 289 aa, Zea mays
  VARIANT 168: note = Ancestral polymorphism is G, Derived polymorphism is E
  VARIANT 196: note = Ancestral polymorphism is A, Derived polymorphism is E
  VARIANT 204: note = Ancestral polymorphism is G, Derived polymorphism is E
  VARIANT 214..289: note = Derived polymorphism lacks residues 214 to 289
MPLIFFSAAAPLVAVSLLPLPTHCCLRLTATRAAATSTTATPGPAPASTFAVEDYLIASCHLTPPQALKASKSLAHLKSASNADAVVEPNVAFLRKCGLSAVDIAKLLVAAPRLVTMPPEYVQDAVRRATQLGVAPGSQMFRHALSTAGCIGQEKVDSKVAVLKETLGWSQEEVSLAISKAPRILVASEERLRRNAEFLLNEVGLPPQYIARRSVLLMYSLERRIVPRHLVLMVLKEKGLVEQDRCFFNVVAPTEEKFLEKFVAPYEESIPGLADAYESACMGKVTRGL

SEQ ID NO: 13071 - protein, 248 aa, Zea mays
  VARIANT 147: note = Ancestral polymorphism is S, Derived polymorphism is C
  VARIANT 170: note = Ancestral polymorphism is T, Derived polymorphism is I
MAALRLASFTLRPAAAAAASSGATPSAPRSASFSSVARGLPSLRLAPPRRRRGDLARPRAAAEAAAESYASALSEVAVENGTLEQTVSDLEKLEKIFADEAVAEFFDNPTVPREEKAELIGEIAKSSELQPHVVNFLNVVVDNFRASIVPQIVVEFENVYNSLTGTEVATVTSVVQLESQDLAQIAQHVQKMTGAKNVRLKTQLDPALIAGFTVQYGRDGSNLIDMSVRKQIEEIASEFELPAVPLEV

SEQ ID NO: 13072 - protein, 226 aa, Zea mays
  VARIANT 74: note = Ancestral polymorphism is R, Derived polymorphism is C
MPAAAAARGCDQREDVKQRRDGTNLGHGEDMEAARGEEDDLDGFWVSYGRRCPRRRLPPLIPSLVARGALRRTCTDDGRLVIRIVPIVHEDDSSVPPPPPLRELPAAARDASARRTNVARPDDDRTNLGHGEDVEAVVKQEEKDEEDDNMKAKQTQEEDDLLDGFWVSYGRRCPRRWLPPLISSLVARGTLRRTRTDDGRLVIRIVPVVWPLARARPRPAATRPSR

SEQ ID NO: 13073 - protein, 519 aa, Zea mays
  VARIANT 78: note = Ancestral polymorphism is Y, Derived polymorphism is N
MRLPVLFALQLVALAAAASAAEAAATFSSRMVHRLSDEARLEAGPRMGLWPQRGSGGYYRALLRSDLQRQKRRLAGKNQLLSLSKGGSTFSPGNDLGWLYYAWVDVGTPTTSFLVALDTGSDLFWVPCDCIQCAPLSSYRGNLDRDLGIYKPAESTTSRHLPCSHELCQPGSGCTNPKQPCTYNIDYFSENTTSSGLLIEDSLHLNSREGHAPVNASVIIGCGRKQSGDYLDGIAPDGLLGLGMADISVPSFLARAGLVRNSFSMCFKEDSSGRIFFGDQGVSSQQSTPFVPLYGKLQTYAVNVDKSCIGHKCLEGSSFQALVDSGTSFTSLPPDVYKAFTTEFDKQINASRVPYEDSTWKYCYSASPLEMPDVPTIILAFAANKSFQAVNPILPFNDEQGALARFCLAVLPSTEPIGIIGQNFLVGYHVVFDRESMKLGWYRSECRDVDNSTTVPLGPSQHGSSEDPLPSNEQQTSPPVTPATTGTAPPSSATTNRQMLFASSYPLLFLTMSTVFFIS

SEQ ID NO: 13074 - protein, 185 aa, Zea mays
  VARIANT 10: note = Ancestral polymorphism is S, Derived polymorphism is R
  VARIANT 13..185: note = Derived polymorphism lacks residues 13 to 185
MGGAMRQLLRFLGASNGRPREKKTKRTTLRRRLLVPTVELRVRMDCERCEREVKKALSGIRGVEHVEVNRPQQKVTVTGEVDPVAVLRRAQSTWKKAEPWRGPGHDQDTAGYYATPAAAALYGVGPAQLQAHDGRWADPAAYYYCRYPYPYPAPGLSSAEAAVVVGAEQISSLFSDDNPNACSVM

SEQ ID NO: 13075 - protein, 161 aa, Zea mays
  VARIANT 73: note = Ancestral polymorphism is S, Derived polymorphism is P
  VARIANT 92: note = Ancestral polymorphism is H, Derived polymorphism is N
MEPAERIESAGTALGKRPRSRVLPRTASMVTVPSAAKQGRQERGAGVPSSCSLPAACAGMVAVPGGYYYCGTSFAAVETAAFLKACGLCKRHLGPGHDTFIYRGEVAFCSQECREKQIEYDDLDERMEQTCSVTSMKEAPSVSGASGSDQSGSGGETVAAA

SEQ ID NO: 13076 - protein, 579 aa, Zea mays
  VARIANT 360: note = Ancestral polymorphism is M, Derived polymorphism is I
MSNHNAPCDIPKPASVDEFLAKNGKKKKSFMSGLFRKKGRGADKKLLSRRDIVFDLEGRSGDRMDLLETSAAVRKSFSDRHCTTRIENLTLSCLDSPRRPNVDTREYRVFVGTWNVGGKPPDSSVNLQEFLQIEGLPDIYVLGFQEIVPLNAGNVLVVEDNEPAGKWMDLIYQALNRPPPHQDGQSSGDELSPPPSTSSSHYRSRPQGAARDPSNAAAIPKTSSGGMLCAQKPPPPLKMVSKCYRVDNALVKTCTCMSDPSTMQLRAREMREFLCRVEAAAASPGRGAGADDDALASIEGGDQRGGGGMNYCLVARKQMVGIFLSVWVRRELVQYVGHLRVDCVGRGIMGRLGNKGCIAMSMTLHHTSICFVCCHLASGEKEGDEVRRNSDVAEILKNAQFPRICKVPGQRVPEKIIDHDRIIWLGDLNYRVSLSYEETKTLLEDNEWDILLEKDQLAMERQAGRVFKGWKEGKIYFAPTYKYKQNSDSYLWETAKSKKKRRTPAWCDRILWHGQGIEQLQYIRGEFRLSDHRPVCSVFVIEADVDSGSKIRKGYSTLDARIHCESPEIPKRHSFYDDF

SEQ ID NO: 13077 - protein, 780 aa, Zea mays
  VARIANT 23: note = Ancestral polymorphism is H, Derived polymorphism is Y
  VARIANT 21: note = Ancestral polymorphism is Q, Derived polymorphism is L
MEGRARLSLVHAAAALVVLLQLHGGAVVVASEPPYTCGAGAPPNIPFCDAGLPIDRRVDDLVSRMTVAEKISQLGDQSPAIPRLGVPAYKWWSEALHGISNQGRGIHLDGPLRAATSFPQVILTAASFNPHLWYRIGQVIGVEARAVYNNGQAEGLTFWAPNINVFRDPRWGRGQETPGEDPTMTGKYAAVFVRGVQGYGLAGPVNSTGLEASACCKHFTAYDLENWKGVTRYVFDAKVTAQDLADTYNPPFKSCVEDGHASGIMCSYNRVNGVPTCADYNLLSTTARQDWGFYGYITSDCDAVAIIHDAQGYAKTAEDAVADVLKAGMDVNCGSYVQDHGASALQQGKITEQDINRALHNLFAVRMRLGLFNGDPRRNLYGDIGPDQVCTQEHQDLALEAAQDGIVLLKNDGGAGALPLSKPNVASLAVIGFNANDAIRLRGNYFGPPCVTVTPLQVLQGYVKDTSFVAGCNSAACNVTTIPEAVQAASSADSVVLFMGLDQDQEREEVDRLDLTLPGQQQTLIESVANAAKKPVILVLLCGGPVDVSFAKTNPKIGAILWAGYPGEAGGIAIAQVLFGEHNPGGRLPVTWYPQDFTRVPMTDMRMRADPATGYPGRTYRFYRGPTVFNFGYGLSYSKYSHRFATKPPPTSNVAGLKAVEATAGGMASYDVEAIGSETCDRLKFPAVVRVQNHGPMDGKHSVLVFMRWPNATDGSGRPASQLIGFQSLHLRATQTAHVEFEVSPCKHFSRATEDGRKVIDQGSHFVMVGEDEFEMSFMA

SEQ ID NO: 13078 - protein, 398 aa, Zea mays
  VARIANT 312: note = Ancestral polymorphism is E, Derived polymorphism is D
  VARIANT 355: note = Ancestral polymorphism is V, Derived polymorphism is G
MTNQQDVVVSEMGIAAGAALPGPSPALLACRGAAAGAMSLRYLDLAAAAARSASGTWADAMRASSPTRSRAADEFTAWVRKHPSALGKFEQIASASKGKKVVMFLDYDGTLSPIVADPDAAYMSDAVRLLVLLDRPRSPAHTTFHAVRPGKSSSHSTDVPPSPHLAQMRAAVRDVAKHFPTSIVSGRCRDKVRNFVALSELYYAGSHGMDIKGPSSNPESVLCQPASEFLPVMDEVYKALVEKTKSTPGAKVEHNKFCLSVHFRCVDEKRWNGLAEQVKAVTKDYPKLKLTHGRKVLEIRPSIMWDKGKALEFLLESLGFANRSDVLPVYIGDDRTDEDAFKVLRKRGQGIGILVSKCPKETNASYSLQDPGEVMDFLLRLVDWKRKSSAAPMVRPRV

SEQ ID NO: 13079 - protein, 251 aa, Zea mays
  VARIANT 64: note = Ancestral polymorphism is S, Derived polymorphism is R
  VARIANT 90: note = Ancestral polymorphism is T, Derived polymorphism is A
  VARIANT 142: note = Ancestral polymorphism is D, Derived polymorphism is H
  VARIANT 146: note = Ancestral polymorphism is A, Derived polymorphism is G
  VARIANT 147: note = Ancestral polymorphism is R, Derived polymorphism is I
  VARIANT 153: note = Ancestral polymorphism is C, Derived polymorphism is Y
  VARIANT 159: note = Ancestral polymorphism is P, Derived polymorphism is L
  VARIANT 162: note = Ancestral polymorphism is A, Derived polymorphism is V
  VARIANT 177: note = Ancestral polymorphism is L, Derived polymorphism is P
  VARIANT 182: note = Ancestral polymorphism is R, Derived polymorphism is C
  VARIANT 195: note = Ancestral polymorphism is G, Derived polymorphism is E
  VARIANT 216: note = Ancestral polymorphism is G, Derived polymorphism is A
  VARIANT 238: note = Ancestral polymorphism is A, Derived polymorphism is V
MPTSCILALGGALANIVEFQKIAEVVGDWYFERGAAVEIDCAYPCDSTCCNLIPIDKVCLEMLSFANYSGDADSKIVREVWARLLDQALTKGGVAEACSVVKRVGSKLDPANGACLPLDIICLHLEKAAVDRLSSGEELVGDDDVARALLGACKGLPGPVLVVYDHLLSNGAIIPSLNLKLRLLRSVLAILREWGISVIAHRLGTTSAGASFFLDGTFSLNQTGTANQGARDKIISLANRYMTEVRRLNLP

SEQ ID NO: 13080 - protein, 123 aa, Zea mays
  VARIANT 55: note = Ancestral polymorphism is R, Derived polymorphism is C
  VARIANT 63: note = Ancestral polymorphism is G, Derived polymorphism is R
  VARIANT 64: note = Ancestral polymorphism is D, Derived polymorphism is Y
MSLALLEGYSSAEEEDGPAAGAGAELSESADSSAEEAGSDGDEGSAPPKSAFKPRRRPNRKKGDAGGGDGDSCLPSALEAFSDISGPPEFLRHRVAEPEEGTEALGVLDRRGKEGSKLPPPGK

SEQ ID NO: 13081 - protein, 71 aa, Zea mays
  VARIANT 43: note = Ancestral polymorphism is K, Derived polymorphism is R
MCLQCGVPKTYSHGKGMVCPQCGDRPALTKEPEKKKGSTVKDKEKIKRMRGQSSHASWKSETEMALRQHFD

SEQ ID NO: 13082 - protein, 294 aa, Zea mays
  VARIANT 219..294: note = Derived polymorphism lacks residues 219 to 294
  VARIANT 216..294: note = Derived polymorphism lacks residues 216 to 294
  VARIANT 199: note = Ancestral polymorphism is T, Derived polymorphism is I
  VARIANT 177: note = Ancestral polymorphism is G, Derived polymorphism is R
  VARIANT 164..294: note = Derived polymorphism lacks residues 164 to 294
  VARIANT 66: note = Ancestral polymorphism is D, Derived polymorphism is G
  VARIANT 4..294: note = Derived polymorphism lacks residues 4 to 294
MKGQAYNVQMKAAHEKAREAIYRQRNPISSQRGGDHLIDLHGLHVNEAIHILKDDIQMGKREETRDFARVLSGYNDIIMARVFAHQDILDLAKYAYVHVINGLTDNNHPCQIMADALSMLEQIGRIENTKVVYVGDGNNIVHSWLLLAVVLPFHFVCACPKGFEPDAHTVEMARGAGISKIEITNSPREAVKGADVVYIDVWASMGQKEEVDYRKQKFQGFTVDETLMEIAGPQAYLMHCLPAERGVEVIDGAIEAPNSIVFPQAENRRLRTECTLRTPSCFTYSVLNSPIAHQ

SEQ ID NO: 13083 - protein, 161 aa, Zea mays
  VARIANT 5: note = Ancestral polymorphism is P, Derived polymorphism is L
  VARIANT 18: note = Ancestral polymorphism is G, Derived polymorphism is D
  VARIANT 26: note = Ancestral polymorphism is T, Derived polymorphism is R
  VARIANT 80..161: note = Derived polymorphism lacks residues 80 to 161
  VARIANT 138: note = Ancestral polymorphism is K, Derived polymorphism is E
MAMMPPAAASSLASTPRGIAAPPTRTASLCIRLGVVTATLFAGLAAASQPVERHAAVVVAMAKREQELEGIRAMTTEQLEEEVVDLKGELFLLRLKRSARQEFKNSEFGRMRKRIARILTVKRERETEQGINKRLSRELDRKWKQGIVVRPPPSLRENKEE

SEQ ID NO: 13084 - protein, 321 aa, Zea mays
  VARIANT 203: note = Ancestral polymorphism is W, Derived polymorphism is G
  VARIANT 191: note = Ancestral polymorphism is R, Derived polymorphism is W
  VARIANT 131: note = Ancestral polymorphism is G, Derived polymorphism is S
  VARIANT 93: note = Ancestral polymorphism is P, Derived polymorphism is S
  VARIANT 41: note = Ancestral polymorphism is S, Derived polymorphism is Y
  VARIANT 18: note = Ancestral polymorphism is T, Derived polymorphism is I
MARRLPLWTALLLPFLLTGVGTAAAASPPHDECPVPTIVESVLGTRDTCSTLDLGNPVGVVEGDEFTLATAVNLLHANKDDYIAVLFYASWCPFSQECKPNFETLASLFPTIRHFAFEESAIRPSIISRYGIHGFPTLFLLNSTMRVRYHGPRTVKPLAAFYTDVSGINASVNVKSTAGETMVHPLHDIERQKDAEQENCPFWWARSPEKILQQDTYLALATAFVILRLLYRLFPKIDSFARWAWRRHNLFANLMGAHEYFLTYLEQGRQKFHRLYPSSSKRGNLQEGAMNATAWASKSLASVSIGEPSAIGRTNSTSELR

SEQ ID NO: 13085 - protein, 117 aa, Zea mays
  VARIANT 30: note = Ancestral polymorphism is E, Derived polymorphism is Q
MAMAAPVEVGTQGTVGSLVLREVEHFRRMEVAGGHGKKSSKVVAAGGASPRSNGGKKPRPKKGAAVVGNASSFLPRMCSSAEVAEDPAGSGRRERPSRVRYRPLGDDGDGDALPQQD

SEQ ID NO: 13086 - protein, 713 aa, Zea mays
  VARIANT 215..713: note = Derived polymorphism lacks residues 215 to 713
  VARIANT 282: note = Ancestral polymorphism is V, Derived polymorphism is A
  VARIANT 364..713: note = Derived polymorphism lacks residues 364 to 713
  VARIANT 379: note = Ancestral polymorphism is G, Derived polymorphism is D
  VARIANT 418..713: note = Derived polymorphism lacks residues 418 to 713
  VARIANT 431: note = Ancestral polymorphism is C, Derived polymorphism is S
MDISSYLAIGGWFIQVIFDKYLSYQLRQWAADCGIEHELDRLRVALLRTQSVLHGAELVPALSYSSLPWMRELRDVMYDAEDLLDKLEYNRLHHEVEESSANESSSPISAFMLSRFHSQGVAASSLEPCWDRSARVKNKMVNLLERIEQVTSGVSEVLSLPRNIGSSNRNAMTSSIPYGRITGRDFEAQQLVTALISSQVENPVSVVSIVCWCRWHSNARITESFDVRMWICVTSLLDELRITKEMLESASSSRFRHGGIANFNRLQVALKARLASKRFLLALDDVWNSDNKTIAIEQENWQKLLAPLKDGAKGSKILLTTRSSIVAEMLQSSSIINLETLQVNDCWSLIKTYVFDETKHTIDSKLENIGRKIAETLSGLPLAAKVVAGHLKRNNSVDEWKQVLQRNAVWEEIMPILRTSYDNLPPQLKQCFAYCSIFPRNWEFEAEQLILLWLAQGFVHPDGCRRLEDIGKEYINDLCNKSFFTIQKKEFVSYYVMPPVIYELAKSVAAEECFRIGGDERTRIPSSVLNLSGCRLGKLPSRMNNLVNLRNLTAANQIISAITDIGRLKCLQRLPTFKVTREKTQSIVQLGYLLELQGSLQIRNLENVEAPIEAKEAMLCKKRQLSVLQLMWASDRDEHLKMLRQIGPEAYGSGSQMKPFQSLEELVLDDMPELNEWLWSDQTMRNLQNVVIKDCNKLKALPPVPPNLTEITN

SEQ ID NO: 13087 - protein, 318 aa, Zea mays
  VARIANT 289..318: note = Derived polymorphism lacks residues 289 to 318
MATSSSFSGPGGSPAHASPGGGGGGGGGGGVGSYHHHRSRFGDTTLTKVFVGGLAWETPSEGLRQHFDVYGEILEAVVITDRETGRSKGYGFVIFRDPDAAARAVQNPNPVIAGRRANCNIAAFGPPRAAQPRGRGGGGGGRGPHVPDQPPQGSPSPYRVPSQMTPPHQAATLFYNPQFGYWYPPDYPYQQALYNSQVLQHYYPQMYGPASPSGPAYQYMGYMPGGPSPRTGFSPMQQPMRQPFFQQPTTQMDGSFPSVPSLPPNFRLQLPPRAVSRESDDASGSQSAQPVSSTPATATNNEEDSRPVVSDSDPNTPN

SEQ ID NO: 13088 - protein, 218 aa, Zea mays
  VARIANT 159: note = Ancestral polymorphism is G, Derived polymorphism is V
  VARIANT 136..218: note = Derived polymorphism lacks residues 136 to 218
  VARIANT 134: note = Ancestral polymorphism is M, Derived polymorphism is L
  VARIANT 65..218: note = Derived polymorphism lacks residues 65 to 218
  VARIANT 38: note = Ancestral polymorphism is N, Derived polymorphism is I
MSALPAPPPAPPARSCGGILDSQNRLAPLCALESAGSILRHLCGLLLLRRLPGDLRSFGCYASPQASSMVANLVEGVSYPFFYSLADMGDWSTGQQCYICRRCKVSIKSNAEIAVEVSTIPLDELVPDTERVLLIKVDVQGWEYHVLGGASNLLSRRKGEAPYPYLIYEEDEHLLQAGNSSAQDIRTFLTSVGYNHCKRHGNGAHGVQLPPLRQEEGH

SEQ ID NO: 13089 - protein, 556 aa, Zea mays
  VARIANT 300..556: note = Derived polymorphism lacks residues 300 to 556
  VARIANT 139..556: note = Derived polymorphism lacks residues 139 to 556
MLPLVLATLTSVLLAGPAADHGALGSPPPDPVQCSSGGGTADCTVSSAYGVFPDRSTCRASAAVYPASEDELVRAVAGAAAAGTKMKVATRYSHSIPPLACPGSGRGEGLVISTRRLDRVVSVDPAAGRVTVESGVTLRDLVEEAAKAGLALPYEPYWWGLTVGGMLGTGAHGSSLWGNGSAVHEYVVGMRIVTPAAAAEGYAKVRVLTAADPDLDAAKVSLGVLGVISQRSVTFSERDDDDLAEQVGTFGYRHEFADIAWFPGHGRAVYRIDDRLPLSAPDDGAMDFIGFRATPTLAIQATRLAEDLFERADNGSGKCLTSRVTHATLSAAGYGLQWRSGGLFAGYPVVGPQHRMQASGGLPVRRAVLFVAEVRRLRDLEPRALCGVELYDGILIRYVKASTAHLGKPAPRGEPSGDMVDFDITYYRSRDSGRPRLFEDVLEEVEQMGIFKYGGLPHWGKNRNLAFVGAARKYSGLPRFLRVKDAYDPDGLFSSDWSNMMLGIGGRSPTTDAPGCALEGMCVCSRDEHCAPEQGYVCRPGKVYKEARVCTRVSYN

SEQ ID NO: 13090 - protein, 596 aa, Zea mays
  VARIANT 409: note = Ancestral polymorphism is M, Derived polymorphism is T
  VARIANT 329: note = Ancestral polymorphism is H, Derived polymorphism is Y
  VARIANT 298: note = Ancestral polymorphism is S, Derived polymorphism is F
  VARIANT 15: note = Ancestral polymorphism is S, Derived polymorphism is R
  VARIANT 6: note = Ancestral polymorphism is S, Derived polymorphism is C
MASPHSCFRGWQSTSHVALALVSVLILSSARLSAGGRSLLELYKPPASAILTYHNGAVLQGRIPVSIIWYGRFTPAQKAVVTDFLGSLTTAAASPLAPSPSVSQWWSTIDQLYLSKARGRGSGGGGGGARVALVGQATDEGCSLGKRLTLAQLPQLAARAGPRKGGIALVLTAQDVGVDGFCTSRCGLHGSDARAPGTAYVWVGNSATQCPGQCAWPFHRPLYGPQTPALVPPSGDVGADGMVINIASMVAGAVTNPFRDGFYQGDKDAPLEAATACTGVYGSGAYPGFAALVLLLSSAQLSTGARRRMELYQPDPADMLSYHNGSVLHSDIFVSVLWYGSFTQVQKAIIYDFLLSLTTTPQAASPSVAEWWDMIEQQYLSKAAQTTKHTTTRVMLDTTQVSSDDGCSMGTSLTLAQVSALAARARPRKGGVALVLTAQDVAVEGFCTSQCGLHGAESGAGAASAYVWVGNSAAQCPGQCAWPFHQPEYGPQTPPLVPPNGDAAVDGMVVSLATAFAGAVTNPFRDAYYQGSSDAPLEAATACPGQFGSGSYPGYPGNLKIDQASGASYNANGAQGRKYLLPALYNPSTSACSTLV

SEQ ID NO: 13091 - protein, 315 aa, Zea mays
  VARIANT 128: note = Ancestral polymorphism is M, Derived polymorphism is T
  VARIANT 48: note = Ancestral polymorphism is H, Derived polymorphism is Y
  VARIANT 17: note = Ancestral polymorphism is S, Derived polymorphism is F
MAAKSPVLAALVLLLSSAQLSTGARRRMELYQPDPADMLSYHNGSVLHSDIFVSVLWYGSFTQVQKAIIYDFLLSLTTTPQAASPSVAEWWDMIEQQYLSKAAQTTKHTTTRVMLDTTQVSSDDGCSMGTSLTLAQVSALAARARPRKGGVALVLTAQDVAVEGFCTSQCGLHGAESGAGAASAYVWVGNSAAQCPGQCAWPFHQPEYGPQTPPLVPPNGDAAVDGMVVSLATAFAGAVTNPFRDAYYQGSSDAPLEAATACPGQFGSGSYPGYPGNLKIDQASGASYNANGAQGRKYLLPALYNPSTSACSTLV

SEQ ID NO: 13092 - protein, 145 aa, Zea mays
  VARIANT 79..145: note = Derived polymorphism lacks residues 79 to 145
  VARIANT 53..145: note = Derived polymorphism lacks residues 53 to 145
  VARIANT 21..145: note = Derived polymorphism lacks residues 21 to 145
MTSSRAKFNLPNPNLFYIESQIAAMEPDPVAAGASSSPPPSPAPATSPPWQTRDDDEPGAVDCTDTGGDLNLAPPPSPQQATVENIAVGSEVEQEEPKKEVMAGVGETLRSFMEEFGDQGEDSIILSPRLKEISTHDRPAALRFL

SEQ ID NO: 13093 - protein, 349 aa, Zea mays
  VARIANT 84: note = Ancestral polymorphism is G, Derived polymorphism is A
  VARIANT 158: note = Ancestral polymorphism is I, Derived polymorphism is M
MGECEDGKEYRCWEELLPDALGLIFRNLPLQEVLTVLPRVCKSWGRVVAGPYCWQEIDIEEWSQQQGKPEQIARMVELLVGRSAGSCRRISVSGLPCDPRFSFIGDKSAENVSVCSEFLTCKSSARALRTLEIPRSEISDSMVESVAPRLPNVTFLDISSCTKMGARGLEAFGKHCKSLAGLRRVMHPIDLADRACQHDEAHAIACSMPRLRHLEMGYMLVATEAVAEILGRCRELRFLDLRGCWAVDDKLLPRDRHPGLRVLGPRVDDCYENSYWEECSDDYSDDSSIYSWELMDDVDDDYDYAAGSDDDDDEAVWDDDGQGLENLEVRFYGGGFGETFAGFDWPPSP

SEQ ID NO: 13094 - protein, 285 aa, Zea mays
  VARIANT 139: note = Ancestral polymorphism is R, Derived polymorphism is C
  VARIANT 136..285: note = Ancestral polymorphism lacks residues 136 to 285
MDEEEHEVYGQEIPEDGDMDGADVDMAASGDDAAKLQELDEMKRRLKEMEEEAAALRDMQAKVAKEMQGGDPSASTAEAKEQVDARSVYVGNMTSLAKQKKSAQSCCLHSGWDFLTGAGMAASDVVRSCWSTDITWVVRKYDMLLIVVYGILWGFSAPGPGADPKVDYACTPEEVQQHFQACGTVNRVTILTDKFGQPKGFAYVEFLEQEGVQEALNLNESELHGRQIKVAPKRTNVPGMKQRPPRGYNPYHGYPYRSYGAPYFPPYGYGRAPRFRRPMRYRPYF

SEQ ID NO: 13095 - protein, 183 aa, Zea mays
  VARIANT 151: note = Ancestral polymorphism is T, Derived polymorphism is M
  VARIANT 31..183: note = Derived polymorphism lacks residues 31 to 183
  VARIANT 26: note = Ancestral polymorphism is A, Derived polymorphism is V
  VARIANT 25: note = Ancestral polymorphism is C, Derived polymorphism is Y
MAMGKAKAAEGARCRRHRQQGAGVCATCLRERLSHLSVSAPLPSVVVVRGCGEDAEGHGGRRHQEAALSSCSESEASTAYSSEGSSAAASECASPDHETRRRRAPRVSLLMRHERVVGDADAVAAFLLARREQRTAAAAATSFWAKLLRATRGGGKKDHRGCSLAARGNTLQERAAAPKWVLF

SEQ ID NO: 13096 - protein, 238 aa, Zea mays
  VARIANT 8..238: note = Derived polymorphism lacks residues 8 to 238
MASSLVSRLPVAVLLLLVACSSTAAATSYTVGDGSGWTSGVDYTSWAASKDFKVGDNLVFNYAKGLHTVVEVSAGEYMACTAANPLGSESDSSGATTVALKAPGTHYYVCSIAGHCGAGMKLAVAVTVGGSNSNSPGATPDDPTTPRTSPTPTAPYTTPTTTTPYTTTPTTTPPYTTPTTTPTTTTPYTTPTCSGGGGATATPGMTPFMSFPSAAGLGSAALAGFGLVWCVIVQLALL

SEQ ID NO: 13097 - protein, 352 aa, Zea mays
  VARIANT 300: note = Ancestral polymorphism is N, Derived polymorphism is T
  VARIANT 277: note = Ancestral polymorphism is R, Derived polymorphism is Q
MALEAVVFPKEHPGCTAVKARPASLGCGFHTEELEVEDKGGVVLQGEAADALPPPGGAATTWDWDAVLCPCSTAPAAGAVEECWDVQQQQHQLLSVSPPPSSAVAASSSGRRKAAASEAARRRRRRPKAVRNTDEMESQRRNHIAVERNRRRQMNEYLSVLRSAMPPSYTQRGDQASIVAGAINFVKELEQLLQSLEAQKRCTEPPAPAPFAGFFIFPQYSTTAATGGAVGSSSDSAGSGGDQSGGGGGCAGARRGVADIEVSLAESHANVKVLAARRPRQLLRMVVALQCLGLTVLHLNVTTTADHLALYSLSLKMEDECRLSPSVDDIAAAVNEILADISDECARGGPGH

SEQ ID NO: 13098 - protein, 77 aa, Zea mays
  VARIANT 67: note = Ancestral polymorphism is G, Derived polymorphism is R
  VARIANT 55: note = Ancestral polymorphism is P, Derived polymorphism is H
  VARIANT 37..77: note = Derived polymorphism lacks residues 37 to 77
  VARIANT 2: note = Ancestral polymorphism is A, Derived polymorphism is D
MAIVPMEEQHDNSPEDQSSTPEENVDTNMNDNNVNDQEPMVNLPPTENVIVDEQPVFIEDIYDQEIRIILITSQGIY

SEQ ID NO: 13099 - protein, 371 aa, Zea mays
  VARIANT 188: note = Ancestral polymorphism is S, Derived polymorphism is C
  VARIANT 86: note = Ancestral polymorphism is T, Derived polymorphism is I
MLRLQHHFLSSIGASSHRHCSLLSIATTAITPDRFVAEEYLVTTCGLTPAQAGRASKGLTHLKSPVKPDAVVAFLAGVGLAKDDIIAGIARYPRLLCSKVDKTLTPRFAQLMSLGLSPSQISRLITIVPNIFVAPKKISHLQFYLSFMGCFDRVHSAIRINPMLLSRNLEDVVKPNIAFLLQCGLTVSNVLEFPLLIGMRPESVRERVACAEKLGVPRNTGMFKSALWAVYCVGPNSIGAKLDVIKATLGCSEAELTLVVRKSPPILRMSEGKLSRALKFLKVDVGLKLQYILLRPAILAFSMQRRLMPRHYFIKILKAKGLVKENVDFYNALCLTEKRFAQKFIDPYNQSIAGLADAYAAACAGKMPHED

SEQ ID NO: 13100 - protein, 371 aa, Zea mays; identical to SEQ ID NO: 13099
  VARIANT 188: note = Ancestral polymorphism is S, Derived polymorphism is C
  VARIANT 86: note = Ancestral polymorphism is T, Derived polymorphism is I

SEQ ID NO: 13101 - protein, 551 aa, Zea mays
  VARIANT 454..551: note = Derived polymorphism lacks residues 454 to 551
MMNLPFRLRHLRRLLAAPPLPTLAATHSHSPPSFRPLHPTRIQPLRFHLPNPPVRRLSSEHAILPTHLQDERFATLSDRIYDAVIKTGTESNEGTEAALDALGAELTTPLVADVLHRLRYEEKLAFRFFAWASQQDGYSHEPTTYNDIIDILSGTRYKSRQFGVLCNVLDHMKRHGSRSVPVEGLLEILRAYTEKHLTHMRKLAKKRRVRMRTPPETDALNVLLDAFCKCGMVKEAEAVFGRVKRKLLGNAETYSTLFFGWCRARDPKKAMKVLEEMIQMKHTPESFTYVAAIESFCSAGLVSEARELFEFMRTEGLTVSSPTAKTYSIMIVALAKADRMEECFELLSDMRTCGCMPDVTTYKDLIEGMCLVGRLDAAYRVLDEMGRAGFPPDIVTYNCFLNVLCSLRNADDALELCERMIEAHCEPSVHTYNMLMMMFFEMGEAHRALDIWLEMDKRGCQRAIDTYEIMIYGLFDCGETEYATALLDEVINRDMKLSYKKFDAIMLRLSAVGNLGAIHRLSEHMRKFYNVAMSRRFAITQKKKSIGLRRK

SEQ ID NO: 13102 - protein, 665 aa, Zea mays
  VARIANT 218: note = Ancestral polymorphism is F, Derived polymorphism is S
MSTPHSSSTSSVPHRASAPQIPQSLTLAPPTACSASPSSSFSSSSASGMRDAGEDDDSDSPPSQMSEDDPGAGAGDRWEPDLRGGGGRRAPPDQVLGNVLETVLQFLTAARDRNAASLVCRSWYQAEAQTRRELFIGNCYAVSPRRAVERFGGLRAVVLKGKPRFADFSLVPYGWGAYVSPWVAALGPAYPCLERICLKRMTVSDDDLALVATSFPCFRDLSLVCCDGFSTLGLAVVAERCRHLRVLDLIEDYVEDDEDELVDWISKFPECNTSLESLVFDCVSVPFNFEALEALVARSPALRQLRVNHHVSVEQLRRLMARAPQLTHFGTGAFRSEGAPGGGLAVTELATSFAASRSLICLSGFREVDPEYLPAIYPVCAKLTSLNFSFASLTAAELKPVIRNCTNLRTFWVLDTVGDEGLRAVADACSDLRELRVFPLDASEDSEGSVSDVGLEAISKGCRKLESILYFCQRMTNAAVIDMSKNCPELVVFRLCIMGRHRPDRVTGEPMDEGFGAIVMNCKKLTRLSVSGLLTDKAFAHIGKHGKLIKTLSVAFAGNSDMSLQYVFEGCTKLQKLEVRDSPFSDRGLLSGLDYFYNMRFLWMNSCRLTMRGCRDVARQMQNLVVEVIKDHSEDEGEGETVDKLYLYRSLAGPRDDAPPFVTLL

SEQ ID NO: 13103 - protein, 355 aa, Zea mays
  VARIANT 185: note = Ancestral polymorphism is R, Derived polymorphism is S
  VARIANT 84: note = Ancestral polymorphism is Q, Derived polymorphism is H
MVPGYDCAASVLLCAEDNAAVLGLDDESSWAAAATPPRDTVVAAAAAGVAVDGFLTEFPLLSDDCVAALVEKEVEHMPAEGYLQKLQRRHGDLDLAAVRKDAVDWIWKVIEHYSFAPLTAVLSVNYLDRFLSTYDFPEGRAWMTQLLAVACLSLASKIEETFVPLPLDLQVAEAKFVFEGRTIKRMELLVLRTLKWRMHAVTACSFVEYFLHKLSDHGAPSLLARSRSSDLVLSTAKGAEFVVFRPSEIAASVALAAIGECSSSVIERAATSCNYLDKERVLRCHEMIQEKIAVGSIVLKSAGSSISSVPRSPIGVLDAAACLSQQSDDATVGSPAVCYHSSSTSKRRRITRRLL

SEQ ID NO: 13104 - protein, 236 aa, Zea mays
  VARIANT 8: note = Ancestral polymorphism is A, Derived polymorphism is G
  VARIANT 39: note = Ancestral polymorphism is A, Derived polymorphism is V
MVVVDPKAVASAHQFTVVIDGVETTVHEGVLRRNGGTVAVVGPGVLEVSRLQHVVVRGGGGGDVRFSRCLYAAAEDCGAASFHRCDAVRVEGARAVAVRRCRSADVERAGAVAIRRCKGAARVRGAGELRVGRCREADVGACADVAVARCRAARADWCGALALGRCGSADVSRCGAVRVDRCRDATVAGCGTVAVRRGKVSMVELDQQMPPDFQDQTPMCQQGGPVLATPVAVVAK

SEQ ID NO: 13105 - protein, 144 aa, Zea mays
  VARIANT 17: note = Ancestral polymorphism is T, Derived polymorphism is I
MWWEWEGDGGEAPREETPVDFDFIALLAKPKDYYKILEVDYYASEETIRSSYIRLALKWHPDKKQGQGEENSTSKFQEINEAYQVLSNPAKRQEYDKKGILYVQDQNVVDYLNRHKGLILTCNGLGIRMAYMDFCVYDRWGQWG

SEQ ID NO: 13106 - protein, 1265 aa, Zea mays
  VARIANT 208..1265: note = Derived polymorphism lacks residues 208 to 1265
MFTEGLDRDALKWVREGQGAAALHSHDRMDALRAVRGAAGRGGLGMPTPEKFRSGHMPRGATVPLSRSSLRSDDGTAASGSDMDESSDNDEIEVCSGRYSVDSSPRRDDVTRRTAVPLYRYATMPGQQSYYSTDDGYSDLSSSRDTALPRAKAQPLGRPQARVVEYADEEYSVSPGTSEFSSQVEGQSNGVTSKGGYVSEYSHTGPARREANNLGPKNRAAAPARMRYQHDSHSAHVPAREDVKSTRKLNGSSGDIPSAPPINDYDQDHQPVTHDDTRSCDNSNFTNGLSAKKDHREVNGGVNLADKNDRSTLNAGPTSKPSSSIPIRVPTFHASLQGPWYSVLAYDACVRLCLHAWARGCMEAPVFLENECTLLRNTFSLQNVLLQSEEELMSKRASELVSEGAASKPKKTIGKMKVQVRKVRMSVDMPSGCNLSSLPMVKLDSVRYRLSNVQSTLSSGWESVRRVRVLPQLPANSSFSKHSLAYMQASAQYIKQVSGLLKVGVTTLRSSSAYEAPQETYSCQLRLKSSPEDDVVPMQPGSGETHVFFPDSLGDDLIIDVSDSKGKSCGRVVAQVATMAEDHADKLRWWSIFREPEHELVGRIQLYIHYTTAADENNMKVEMLQLFKCITHYGSVAETVAYDIVLEVAMKAQRIQQRNLVVHGSWKWLLTEFALYYGVSDAYTRLRYLSYIMDVATPTADWLNLVHGLLLPILMKSDGTATLSHQENRILGEVEEQIEQTLAMVCENYKSLDDSIPLGLAEDFRPPTGLAAAALEPAIKLYSLLHDVLSPEAQLRLCGYFQAAARKRTRRYMIETDEYVSGNSEGFRVDLVTVTTAYQKMKSLCNNLRSEIFTDIEIHNQHILPSFVDLPNLAASIYSVELSNRLRAFLVACPPAGPASPVADLVVATADFQKDLASWNICNIKAGVDAKELFHLYIVLWIEDKRRMLLENCRLDKVKWSGVRTQHMTTPFVDEMYDLLKKTLTEYEVIICRWPEYIFVLENAIADVEKAVIESLEKQYADVLAPLKDCIAPKKFGLKVVQKLTKRNSTVPYTVPEDLGILLNTLKRLLEVLRPRIESHLKSWSSCIPNGGNSAAIGEKLSEVTVTLRAKFRNYMQAVVEKLSENTRMQNTTKLKKIIQDSKELVIESDIRSRMQALKDQLIEAINHVHKVSEVHVFLAICRGFWDRMGQDVLSFLENRKENKAWYKGARVAISVLDDTFASQLQQLLGNTVPPKDLEPPRSIVEVRSILCKDAPRQKNSSFYY

SEQ ID NO: 13107 - protein, 162 aa, Zea mays
  VARIANT 156: note = Ancestral polymorphism is V, Derived polymorphism is A
  VARIANT 135: note = Ancestral polymorphism is P, Derived polymorphism is S
  VARIANT 117: note = Ancestral polymorphism is V, Derived polymorphism is I
  VARIANT 46: note = Ancestral polymorphism is P, Derived polymorphism is L
  VARIANT 18: note = Ancestral polymorphism is E, Derived polymorphism is G
  VARIANT 3: note = Ancestral polymorphism is T, Derived polymorphism is P
MATGNLASVVVAVDGSEESMNALQWALDNLRLRPDGELVVLHVQPPPNIAAGLNPAPIPFGGPSGLEVPAFTQAIEAHQRRITQAILEHALKICSDKNVEVKTEVVVGDPKEKICEIAANRKADLLVMGCRAIGPLKRVFLGSVSNYCINHVGCPVVVIKGT

SEQ ID NO: 13108 - protein, 154 aa, Zea mays
  VARIANT 118: note = Ancestral polymorphism is K, Derived polymorphism is E
  VARIANT 74: note = Ancestral polymorphism is F, Derived polymorphism is S
MEARFWELRIAFGNYPSSSRLLLELPPAVQGVWFYASISLSYSTRNKRRSSSYVPLKNEDSPILDDKKNTKNAFKLCNSKKLEKDWHPLIHEKVMKVMHRHDRRVFAWTIDDINSMKEMLYEHVDAIVTSNPSLPQRLMQETIAECMEDGFVLP

SEQ ID NO: 13109 - protein, 183 aa, Zea mays
  VARIANT 62: note = Ancestral polymorphism is L, Derived polymorphism is F
  VARIANT 69: note = Ancestral polymorphism is F, Derived polymorphism is L
  VARIANT 96: note = Ancestral polymorphism is D, Derived polymorphism is N
  VARIANT 98: note = Ancestral polymorphism is K, Derived polymorphism is N
  VARIANT 104: note = Ancestral polymorphism is P, Derived polymorphism is L
  VARIANT 105: note = Ancestral polymorphism is V, Derived polymorphism is A
  VARIANT 119: note = Ancestral polymorphism is R, Derived polymorphism is C
  VARIANT 154: note = Ancestral polymorphism is N, Derived polymorphism is Y
MLWAQTPRSTAAYDEIHTRGTCCDKQGYFTLDEWRTGLKALRADSISKLKKAFPELVQECNFADHFHMFINPGYKVIQFLGFLHICISLLPHRYEDKKKCIEIPVACELLNLVLGLQFRPQVDKLNNYLMYQNDYKVITMDQWMGFIRFCNEIYFPSLDNYDSDLAWPLILDNFVEWLRENKS

SEQ ID NO: 13110 - protein, 257 aa, Zea mays
  VARIANT 38: note = Ancestral polymorphism is F, Derived polymorphism is Y
  VARIANT 72..257: note = Derived polymorphism lacks residues 72 to 257
  VARIANT 102..257: note = Derived polymorphism lacks residues 102 to 257
  VARIANT 136: note = Ancestral polymorphism is Y, Derived polymorphism is N
  VARIANT 141: note = Ancestral polymorphism is P, Derived polymorphism is L
  VARIANT 154..257: note = Derived polymorphism lacks residues 154 to 257
  VARIANT 166: note = Ancestral polymorphism is C, Derived polymorphism is Y
  VARIANT 189: note = Ancestral polymorphism is A, Derived polymorphism is V
MRRAHLSAAAQRRPTVALLLGLALAFCLVVLSIQSSFFAAPGAPGRRLDLDADDVRELAGFQSRVQQCVASRGLGLTTHIIDHCKLVLKFPEGTNSTRYNAQFKFFEPLEYKYDVCETILLWEHYRNMTTVLTREYLDVRPDGWLDYAAKRIAQLGADKCYNRTLCDELLSILLPAKPPFHPRQFATCAVVAIRVNTRCACNILKQSGDVKMYSRDSASLAYGVGLIAYGEDCKQKLKAPDLELHLRKGRRTRTAKA

SEQ ID NO: 13111 - protein, 494 aa, Zea mays
  VARIANT 339: note = Ancestral polymorphism is E, Derived polymorphism is G
  VARIANT 233: note = Ancestral polymorphism is I, Derived polymorphism is T
  VARIANT 197..494: note = Derived polymorphism lacks residues 197 to 494
MAISISQEAFDSMVRENMEDLGMDPDEALADAVEALTLQGADLSGNTFRQIRTSTFSALSQSPPSTSLLRAGIVKRVPGEATAAEVSPVVRVLDELKASLSASGGSEQDLDGLVSLLDELRNLCCSGEGSENAAIAVRNGVVEALVALCASARVEQERLLASALKSLSSVLRDVASTEKFRRSEGPRIVMDLLQGGSENSDLLDAGFSVVAAGSAGNEVVKESFMDLKVDELILRVMKDKSKSNVQSLYDAIRVLLKPDDNRVVASQIEYELGQVYGYSRRFAEIGVAEVLVNALREQVAPSSLPSACAALKSIAVNDEICRSISENGGIDVLLQCIDGAGEQKNKAVARSCCSLLSKLAASDANKSIIIQRGGFDRFLKLTSRFSEDPAIIQEVMSMVTVLTLRSPENAARAMEEGYGTLAIQSMQRFPSSVQTQKQACLMIRNLVARNPENRIVLLNDGAEKLIRKAMALHRSCKDAASSALRDLGLDNYNA

SEQ ID NO: 13112 - protein, 1098 aa, Zea mays
  VARIANT 773..1098: note = Derived polymorphism lacks residues 773 to 1098
MERVALLRTSGRRLLHRCRRGRPVVVPAAAASSLARRASSFSLPARGYSALPRGGARFLVAAAPLHCSGRYWPAAAPQLARRLSASAVSTSPSPVPYDTDDVHEYATKLGFEKVSEQTIDECKSIAVLYKHKKTGAEVMSVSNDDENKVFGIVFRTPPKNSTGIPHILEHSVLCGSRKYPLKEPFVELLKGSLHTFLNAFTYPDRTCYPVASTNTKDFYNLVDVYLDAVFFPKCVDDFQTFQQEGWHYELDNPEEEITYKGVVFNEMKGVYSQPDNIMGRVSQQLVQVQGLTFQNILQALSPDNTYGVDSGGDPNEIPKLTFEEFKEFHSKYYHPSNARIWFYGDDDPKERLRILSEYLDQFEANPAPNESKVWPQRLFKEPVRVIEKYPAGQEGDLTKKYMVCINWLLSEEPLDVETELALGFLDHLLLGTPASPLRRILLESGLGEAIVGGGVEDELLQPQFSIGLKGVSEDNIEKVEELVMQTLNNLAEEGFATEAVEASMNTIEFSLRENNTGSFPRGLSLMLRSIGKWIYDMDPFEPLKYEQPLQQLKARIAEEGSKAVFSPLIEKFILKNSHRVTVEMQPDPEKASRDEAAEKEILKQVKASMTQEDLAELARSTKELKEKQETPDPPEALKAVPSLSLQDIPKKPIHVPVEVGEINGVKVLQHDLFTNDVIYSEVVFDMGSMKKEHLQLLPLFCQSLLEMGTKDMDFVQLNQLIGRKTGGISVYPFTSSVRGKEDPLTRIIVRGKAMAPRVEDLFNLMYIILQDVQFTEQQRFKQFVSQSKARMENRLRGSGHGIAAARMDAKLNAAGWISEQMGGVSYLEYLRDLETKIDQDWDSISSSLEEMRKSLFSKNGCLINLTSDGKNLEKSRQHIAKFLDSLPSSPSIGSDPWLSRLPSVNEAIVVPTQVNYVGKAGNLYQSGYQLNGSAYVISKHISNTWLWDRVRVSGGAYGGFCDFDTHSGVFSYLSYRDPNLLKTLEVYDETARFLRELELDDDALTKAIIGTIGDVDAYQLPDAKGYSSLMRYLLGITDEERQQRREEILATSPKDFKEFADAVETIKDNGVVVAVASIDDVEAANKENPLFPEVKKCL

SEQ ID NO: 13113 - protein, 879 aa, Zea mays
  VARIANT 164: note = Ancestral polymorphism is G, Derived polymorphism is E
  VARIANT 214..879: note = Derived polymorphism lacks residues 214 to 879
MSLNRLKETLHACSSSSSEPRTQPRSPQHPARLPRRPPKTSLSQQLLRLEAAASSSSFFSSRPLQLPPAPRPPIEKPREDVEPPSSEDEDERKSRPIIRRCLHPPPAAALESRGPYEPLVLSLPGEHPVVQVPPSINCRLLAHQRDGVRFLYNLYRNNHGGVLGDDMGLGKTIQTIAFLSSVIGKGNGHGQSTNKGKMTGPVLILCPTSVIRNWENEFSEWAEFSVAVYHGPNRDLVLGKIENQGLEVLITSFDTFRIHDKVLCGISWELVVVDEAHRLKNEKSKLYTACLGITTQKRFGLTGTIMQNKIMELFNLFDWVVPGCLGDREHFRAYYDEPLKQGQRLSAPERFVQVADARKKHLVSILREFLLRRTKEETIGHLMLGKEDNIVFCKMSDVQKRVYRRMLQQPDIQILINKDVRCSCGSPLPQVECCKRTEPDGVIWSYLHRENPEGCSICPFCLVLPFLVKLQQISNHLELIKPNPKDELEKQKKDAELAAAVFGADIDLVGGTAKSENFMGLSDAENCGKMRALERLLSLWTGQGDKILLFSYSVRMLDILEKFLIRKGYCFSRFDGTTPMNARQSLVDEFNRSPSKQVFLISTRAGNLGVNLVSANRVVIFDPSWNPAQDLQAQDRSFRYGQRRHVTVFRLLGAGSLEELIYSRQIYKQQLSNIAVSGKIERRYFEGVQDDKKFQGELFGICNLFRDLSDKLFTSEIIEMHGEHGKSSATEATGIREIVDTDLFGSQENRKSSTATTHTDDQKLVDFGIVYAHRNEDVVNMRTDGREKGGADETVQSSLEELLSKNETKHTAMEKSYSSEEKREVARSYSLEQKKKEFSCIASFMGMDDLEFSKWLLSASPHQRSEVLQDYRRKKKNQK

SEQ ID NO: 13114 - protein, 370 aa, Zea mays
  VARIANT 287: note = Ancestral polymorphism is N, Derived polymorphism is S
MASLSSPSLLSSFLGDRLALSTRPLLLRSAVPGSRRLAYQATRTLCNLVDILFNRRNQDDAPENNPRRLRPGKVSPRLSVPNHIQRPPYVNSRQQRPGMNNGPEIHDENGIECMRASGKLAAQVLKFAGTLVKPGITTDEIDKAVHQMIIDNGAYPSPLGYCGYPKSVCTSVNECICHGIPDSRPLEDGDIINIDVTVYLNGYHGDTSATFLCGDVDDEAKKLVKVTRECLDKAISICSPGVEIKQIGRTIQDHADKFKFGVVRQFVGHGVGKVFHAEPVVLHFRNNEWGRMMLNQTFTIVNKVKHMKLSHFITLFYHSMSSEPMLTIGSINPVMWSDDWTAVTEDGSLSAQFEHTILITEDGPEILTQC

SEQ ID NO: 13115 - protein, 405 aa, Zea mays
  VARIANT 283..405: note = Derived polymorphism lacks residues 283 to 405
  VARIANT 274..405: note = Derived polymorphism lacks residues 274 to 405
MDSSATDGARLPPPRAGSRLCVRCGERKAALKRPKTLEQICRECFYIIFEDEIHQTIVQNSLFKAGERVAIGASGGKDSTVLAYVLSELNRQHNYGLDLFLLSVDEGITGYRDDSLETVKRNEIQYGLPLKIVSYKDLYGWTMDDIVKAIGLKNNCTFCGVFRRQALDRGAALLKADKIVTGHNADDIAETVLLNILRGDIARLSRCTFITTGEDGPIPRCKPFKYTYEKEIVIYPVYEISYIFIFLLFLFIFSRIEGDHFIPISENARMSLESKYRSQTSLSALPFIGIYSPNAYRGFAREFIKDLERMRPRAILDIIKSGENFRISTTTRMPEQGTCERCGYISSQKLCKACVLLDGLNRGLPKLGIGSTKAGARADSDGKQRTKRSERNTSSLQGKHGNFDF

SEQ ID NO: 13116 - protein, 968 aa, Zea mays
  VARIANT 667: note = Ancestral polymorphism is L, Derived polymorphism is F
MPSRSQYDRRGSDGDEDEIISVPSDLEESESEANRGAEADDDEYVGESSDASGGDEAEEGGSSDCGEGWDGDDHGGNVRRPLRGLQRGVAAPDKEMKSQNVDALVRGNLVVRRQPLIPRILSVSDAAAIVRKPFKPPCQNGYSDSNEQLARRLSARKRFVPWGSTQTFAINIIHHLPQSPVVASDSSSEKEEPLPPGIEPLILWQRDECEKENCNSASIEVDHLLVRYLRPHQREGVQFMFDCVSGSLSADGISGCILADDMGLGKTLQSITLLYTLLCQGFDDKPMVKRAVIVTPTSLVSNWESEIIKWLKGRVQVLALCESTRADVLSGIESFLKPLSRLQVLIISYETFRMHSSKFERPGSCDLLICDEAHRLKNDQTLTNKALAALPCTRRILLSGTPMQNDLEEFFSMVNFTNPGVLGDASYFRRYYEAPIICGREPTASAEEKKLGSERSAELSAKVNQFILRRTNALLSNHLPPKIIEVVCCKLTPLQTTLYNHFIHSKNIKRLISEETKQSKILAYITALKKLCNHPKLIYDTIKSNNSGVSGFDDCLHFFPPDLFSGRSGSWTGGGGMWVELSGKMHVLARLLGHLRQKTDDRIVLVSNYTQTLDLFVQLCRERRYPYVRLDGSTSINKRQKLVNQFNDLSRDEFVFLLSSKAGGCGLNLVGGNRLVLFDPDWNPANDKQAAARVWRDGQKKRVYIYRFLSTGTIEEKVYQRQMSKEGLQKVIQQEQADNKMQGNSLSTEDLRDLFIFHEHVRSEIHKNLKCSRCDKDGDPALDGTGFAATGHKASIPGVQDYADIGGFGEISGCLQKMNSTHQQIGRPTEEDLGSWGHHCDPSTVPDTILQCSAGEEVSFVFTNQVDGKLVPVESMVRSAAHQQNGIAATGEKGVQIPNSPSKPGKQSLNGKNLKMGFHLKNSSLKCSTKSRPSPNCLQGLMKTSPFLDQPQIKKLHVASDISDDDFV

SEQ ID NO: 13117 - protein, 278 aa, Zea mays
  VARIANT 250: note = Ancestral polymorphism is P, Derived polymorphism is A
  VARIANT 241: note = Ancestral polymorphism is S, Derived polymorphism is N
  VARIANT 231..278: note = Derived polymorphism lacks residues 231 to 278
MGKKLKKPGQAEGRKWAPWSSTNVTPNTARPAWGGSGSSHPSGTSWAQAPDHGAATRGNPRPPSQTSRPVLTPPLANGWQWQSRPRPSGSEVKKDDAPPSGSVPEVENVDGNNTSDDDDDDDLSDDISDDYDSDASEKSFETRKTNKWFKEFFEVLNTLSLEQINGQTRQWHCPACKNGPGAIDWYKGLQPLVTHARTKGSTRVKLHRELAALLEEELSRRGTSVLPAGEQFGKWKGLQESTDREIVWPPMVIVMNTFLEKDEDDKIYLGYLGETNIQ

SEQ ID NO: 13118 - protein, 356 aa, Zea mays
  VARIANT 99: note = Ancestral polymorphism is S, Derived polymorphism is L
  VARIANT 108: note = Ancestral polymorphism is P, Derived polymorphism is L
  VARIANT 180..356: note = Derived polymorphism lacks residues 180 to 356
  VARIANT 293: note = Ancestral polymorphism is S, Derived polymorphism is N
MIQFLYSSTNLCILLYCLQHELHMGAFKVGNITNENFFEIINGLRPANTAGCSSSTDAPNIPHDGTSVIELLSDSMNQLSIKNENQLLRVMVGSCWRLSDIQIVYVTPVLLPVEATADPLDKLERKRVIVYSTKLPGPISLFHRCRMMGAYETDDPKKGDSLCMYSEGRDEPHGEEMLEQITDSSLYQHMGSTCQNGGCVREKKDDSCCGPLYLRGDGRFFGDKKEKKSNLGTAGASPPIYNSFMSMKDDIAEVLLEFKEYATEVNVDSVRKAVRAVWRCAIKLERAAKRCISVLLELIKIKVNYVVQEAIIVIKDIFRRYPNTYESIIATLCESRFVKASMIWIIGEYAERIDNG

SEQ ID NO: 13119 - protein, 606 aa, Zea mays
  VARIANT 206: note = Ancestral polymorphism is R, Derived polymorphism is Q
  VARIANT 267: note = Ancestral polymorphism is G, Derived polymorphism is V
MVMGRPSNSHGGGGDEERLPLRGVLETSPSHHAAVQAKDKEARRGGSRLWRASVRAGLLLCLLTVPAVLLLLWWQADSSPQWVFDFEPPEEDDDQDIQDDMSDDLSPSPQIEYDRLLGGLLVEGFDDKSCRSRYRFARYHSSPSIPSPYLIERLRKQEALQKKCGPGTRAYREASKQLKSGQSMSINATDDCNYLFLIIHAGLGNRMLEITSAFLYALLTNRILLLDRYKEIADLFCEPFPGTSWLVPSDFPLNDDEFGQSSAESYGNMLQNKAFGGGTDRSLVGNRLPPYVYLHLDGNYGFHDKLFFCEDDQQFLRGVPWLVMRTDMYFVPSLFLVPAFQDELGRLFPEKDTVFHHLARYLFHPTNGVWYSVTRCFRSYLAKAEKRVGIQIRIYETKGILQRNGPFPHILNQILSCAQNEKLLPEISMAEGAADGTRNNRTAAGSGTRNNRTIAVLTTSLSAWYSEQIQEKYDEQSAVDGVSVRVFQPSHEEYQRSRNKGHNMKALAEIYLLSMTDVLITSGFSTFGYAAQGLAGLKPWIMLKSENHVTPDPPCVRAMSIEPCFHQAPFYDCKARKDTDLGKVVPYVRHCEDVSWGLKIVDQTHL

SEQ ID NO: 13120 - protein, 269 aa, Zea mays
  VARIANT 129: note = Ancestral polymorphism is N, Derived polymorphism is I
MASTVTAANSSHGSALRTRTASPRPVAGWSCRRTLSTPAHHHHARPSPRARVVAVRAAGTQRATWLPGLDPPPYLDGTLPGDFGFDPLGLGEEPEALKWYVQAELVHCRFAMAGVAGILFTDLLRVSGNSDLPVWFEAGAAKFDFANTTALFFVQLFLMGFAETKRYMDFKNPGSQAEEGTFIGLEAALAGQQPGYPGGPLFNPLGLAKDIENAHDEKLKEIKNGRLAMVAMLGFMVQASVTHAGPIDNLLTHLSDPFNKNIIHTFSSS

SEQ ID NO: 13121 - protein, 236 aa, Zea mays
  VARIANT 185: note = Ancestral polymorphism is R, Derived polymorphism is C
  VARIANT 180..236: note = Derived polymorphism lacks residues 180 to 236
  VARIANT 164: note = Ancestral polymorphism is K, Derived polymorphism is T
  VARIANT 123: note = Ancestral polymorphism is W, Derived polymorphism is C
  VARIANT 104: note = Ancestral polymorphism is G, Derived polymorphism is E
  VARIANT 61: note = Ancestral polymorphism is G, Derived polymorphism is R
  VARIANT 55: note = Ancestral polymorphism is A, Derived polymorphism is T
MAAPRLERGGFQLPNTEQENSLFLRALISVVSGDTAALLPEAAAVEAPAAPVACARCGADGCAAAGCCELVAGSSSDSDDAGCSGTRANGGGLGLGLGASKRRGRGRKVIQYRGVRRRPWGKWAAEIRDPRRAARKWLGTFDTAEDAARAYDVAAVELRGQRAKLNFPARAAAAAPAAVQPPHHRPLPDRSLRENCGSNAASPVHVALAPTTQQNIWEGLNEIMMMEEERSFWSMR

SEQ ID NO: 13122 - protein, 428 aa, Zea mays
  VARIANT 19: note = Ancestral polymorphism is S, Derived polymorphism is P
MANRGLHLALFLVLLGLSSNLAAGQILFQGFNWESWKQNGGWYNFLMGKVDDIAEAGITHVWLPPASHSLAEQGYLPGRLYDLDASKYGNEAQLKSLIEAFHSKGVKVIADIVINHRTAEHQDGRGIYCIFEGGTPDSRLDWGPHMICSDDRAYSDGTGNPDTGADFGGAPDIDHLNPRVQQELTGWLNWLKTDVGFDAWRLDFAKGYSADVAKVYIDGTQPCFAVAEIWTSLAYGGDGKPFYDQNAHRQELVSWLDRVGGKASPATTFDFTTKGILNVAVDGELWRLRGADGKAPGLIGWWPAKAVTFVDNHDTGSTQHMWPFPADKVMQGYAYILTHPGNPSIFYDHFFDWGLKNEIAHLVSIRDRHGIQADSELRIIEADADLYLAEIDGKVIVKIGSRYDCGHLIPEGFQVVAHGDGYAVWEKN

SEQ ID NO: 13123 - protein, 606 aa, Zea mays
  VARIANT 155: note = Ancestral polymorphism is S, Derived polymorphism is T
MASTASLQRFLPASPHASSRRRAGRARAAVSIPSSSPPATRDNEVPAERLEPRVEAREGGYWSLKERYRTGLNPHEKVKLEKEPMALFMDGGVRDLAKIPMEVIDAAKLTKDDVDVRLKWLGLFHRRKHQYGRFMMRLKLPNGVTTSEQTRYLASVIEAYGADGCADVTTRQNWQIRGVTLPDVPAILDGLRAVGLTSLQSGMDNVRNPVGNPLAGVDPHEIVDTRPYTNLLSSYITSNSQGNPAITNLVRNLTVTRPGANRPRKWNVCVIGSHDLYEHPHINDLAYMPAVKDGKFGFNLLVGGFISPKRWAEALPLDAWVAGDDVVPACKAILEAYRDLGFRGNRQKTRMMWLIDELGMEVFRSEVEKRMPNGVLERAAAEDLVDKKWERRDYLGVHPQKQEGLSYVGLHVPVGRLQAADMFELARLADEYGTGELRLTVEQNVVLPNVSNRRLDALLAEPLLQRQRLSPQPSLLLRGLVACTGNQFCGQAIIETKARALQVAREVEKRVAVPRPVRMHWTGCPNSCAQVQVADIGFMGCLTKDRDGKVVEAADIFVGGRVGSDSHLADVYRKSVPCKDLVPIVADLLVERFGAVPREREEEDEE

SEQ ID NO: 13124 - protein, 190 aa, Zea mays
  VARIANT 64..190: note = Derived polymorphism lacks residues 64 to 190
  VARIANT 72: note = Ancestral polymorphism is R, Derived polymorphism is L
MLSAAAARRRPRWGCRSRTRGRRTSSATRRRRVRVRLRLRREEPPPGDAARARPLLRRPRRGGGGAAVLVRRRVGGVLVRGVAARQPHVHTLCRRHAGDGEDAAEAVGAGGCAVHAEPPLSSPGHGRRYLVALGVERKNHSRCTQQQKEGISGGRLKQKKDEEKKKSVRVWSFGGPPPPSTLLVLSWTAS

SEQ ID NO: 13125 - protein, 315 aa, Zea mays
  VARIANT 74: note = Ancestral polymorphism is G, Derived polymorphism is D
MGGETHLSVQELAASLGALPPEFVRSEQDQPGATTYRGAAVPDAPVIDMSEPGFGARMAAAAREWGLFQVVNHGVPSAAVAELQRVGRAFFALPTEEKERYAMDPASGKIEGYGTKLQRDLEGKKTWNDFFFHVVAPPEKVDHAVWPRSLAGYREANEEYCRHMQRLTRELFEHLSLGLGLHGSAMAEAFGGDGLVFLQKINFYPPCPQPELTLGVAPHTDMSTLTVLVPNEVQGLQVFKDGQWYEANNGAYKAVLHRTTVNKEKTRMSWPMFVEPPGELVVGPHPKLVTEESPAKYKAKKYKDYQHCKINKLPM

SEQ ID NO: 13126 - protein, 891 aa, Zea mays
  VARIANT 79: note = Ancestral polymorphism is L, Derived polymorphism is H
MPTRLPLAAVLLLFLLLLLGAAAPTPARGGRVATELLAPGFTASYLLFIDTYGAFLASRSGAFHAVVYNPGQQQERFYLAVLHAPSKTCVWVANRAAPITDRAAPLQLTASGISAEDPNGTTIWSTPPFGEPVAALRLDDHGNLSLLDARNATLWQSFDRPTDSLLSSQRLPAGAFLASAASGSDFSEGAYRLDVTAADAVLTWMGSMYWRLSNDASSTVERSGTVAYMAVNGTGLYLLAADGGVVIQLSLPAAELRVVRLGYDGKLQIQSFASANSSKSPMDGGFVAPSDACALPLSCGALGLCTPKGCTCPPLFAASHDAGCTPSDGSTPLSVSSCGGGGGGSGNNSSPVSYLSFGSGVAYFANKLAPPTVSGGNVSSCQALCTSNCSCRGYFYDDSSLSCYLVKHELGSFMNADSTKGSDKLGYIKVLSSQLSRPSNSSSSNSTLIAILLPTIVVFVLIVVVSATVIRAWRKDAGRSSRSRDQQLRRQRSPSDSAHLVRDIDDQDDDIVIPGLPTRFTHEEIEDMTNSYRIKIGAGGFGAVYKGELPNGSQVAVKKIEGVGMQGKREFCTEIAVIGNIHHINLVRLRGFCTEGQRRLLVYEYMNRGSLDRSLFRPTGPLLEWKERMDVAVGAARGLAYLHFGCDQRIIHCDVKPENILLADGGQVKIADFGLAKFLTPEQSGLFTTMRGTRGYLAPEWLSNAAITDRTDVYSFGMVLLELVRGRKNRSEHVSDGGGEASNSSNGTAGSSSRGAKSDYFPLAALEGHEAGQYAELADSRLQGRVAAEEVERVVKVALCCLHEDPHLRPSMAVVVGMLEGTIALWEPKVQSLGFLRLYGRGFSGPADGGGSDMNLKHMASPMDRSGTTTTSTTMSGWPSYLSSSQLSGPR

SEQ ID NO: 13127 - protein, 315 aa, Zea mays
  VARIANT 49: note = Ancestral polymorphism is M, Derived polymorphism is I
  VARIANT 31: note = Ancestral polymorphism is P, Derived polymorphism is L
MGGETHLSVQELAASLGALPPEFVRSEQDQPGATTYRGAAVPDAPVIDISEPGFGARMAAAAREWGLFQVVNHGVPSAAVAELQRVGRAFFALPTEEKERYAMDPASGKIEGYGTKLQRDLEGKKTWNDFFFHVVAPPEKVDHAVWPRSLAGYREANEEYCRHMQRLTRELFEHLSLGLGLHGGAMAEAFGGDGLVFLQKINFYPPCPQPELTLGVAPHTDMSTLTVLVPNEVQGLQVFKDGQWYEANNGAYKAVLHRTTVNKEKTRMSWPMFVEPPGELVVGPHPKLVTEESPAKYKAKKYKDYQHCKINKLPM

SEQ ID NO: 13128 - protein, 563 aa, Zea mays
  VARIANT 22: note = Ancestral polymorphism is G, Derived polymorphism is R
  VARIANT 28: note = Ancestral polymorphism is P, Derived polymorphism is L
  VARIANT 37..563: note = Derived polymorphism lacks residues 37 to 563
  VARIANT 56..563: note = Derived polymorphism lacks residues 56 to 563
  VARIANT 178..563: note = Derived polymorphism lacks residues 178 to 563
  VARIANT 346..563: note = Derived polymorphism lacks residues 346 to 563
  VARIANT 368..563: note = Derived polymorphism lacks residues 368 to 563
  VARIANT 486..563: note = Derived polymorphism lacks residues 486 to 563
MAAAANPATPSHHDPELDARRGRCHRRPGVRRRKVRGVGRASPHGADGIHHLLWWQVVLFSRTFPWATEVVCLVAGAEHAMAPALRDDLPIARKASLQRFACGACDGGDGELSFPLMKPVEIMEVLHCCTTTSSRPTPVFTLRTSSTHNTASSLRVLMIGRILGGIATSLLFSAFESWLVAEHNKRGFDPQWLTITFSKAIFLGNGLIAIVSGLFANLLAENLGFGPVAPFDAAACFLAIGMAIIMSSWSENYGYPSESKDLMAQFKVAAKAIVSDEKIALLGAIQSLFEGSMYTFVFLWTPALSPNEEDIPHDFIFATFMVSSMLGSSIGSRLLARKLKVEGYMQIMFSISAVTIVLPVATNVRARQSLDDRQICVAVHPTLPYVLSTSDDMLIKLWDWDKGWVCTQIFEGHSHYVMQVTFNPKDINTFASASLDRTTKIWSLGSPDPNFTLDGHQKGVNCVDYFTGGDRPYLITGSDDSTAKVWDYQTKSCVQTLEGYTHNISVVCFHPELPIIITGSEDGTVRIWHSTTYRLENTLNYGLERVWAVGYMKGSRRGRHRRR

SEQ ID NO: 13129 - protein, 250 aa, Zea mays
  VARIANT 22: note = Ancestral polymorphism is A, Derived polymorphism is T
MVKGAHFQDAAVDGGAGGNAEAAMQGGAKRQYKGVRMRSWGSWVSEVRAPSQKTRIWLGSYSTAEAAARAYDAALLCLKGSAAADLNFPVHLPFHVPAAAAMSPKSIQRVAAAAAAASGGATCSPPQLQAGAAASAPYSAGGGAGATPPCSYGDASSSSGVSSPETGRNAGLCYGTAHYDDMDMDLAGDADADLAALADIEAFFQSPKCMEYAMMDPCSTFFAPAPVATDAASEWAEEGEIDLWSFSSLN

SEQ ID NO: 13130 - protein, 92 aa, Zea mays
  VARIANT 21: note = Ancestral polymorphism is Q, Derived polymorphism is R
  VARIANT 22: note = Ancestral polymorphism is P, Derived polymorphism is S
  VARIANT 36: note = Ancestral polymorphism is A, Derived polymorphism is D
  VARIANT 57: note = Ancestral polymorphism is E, Derived polymorphism is D
MALALAGLPHAASRLVPRVRQPPFRALCAAAAAGDASKRMLVLYTKPGCCLCDGLKEKLHAASMLAGTPYSLASLELQASQFARPAGLHSSN

SEQ ID NO: 13131 - protein, 323 aa, Zea mays
  VARIANT 25: note = Ancestral polymorphism is E, Derived polymorphism is D
  VARIANT 74: note = Ancestral polymorphism is V, Derived polymorphism is L
MVRSNVSPGGSGAPPGSPRLRRAPEVSAQVDVEGAVAWARGAAAGELWAVRRRNRGIDVDEEQLRAVMLAVRQLRYELDPDDPDTPYPKKQKRHHKQGTRSSERIAGRVSRVSSFLESTSKHIGIDPDKCAAAVPEWINDPSEECKANYRSHNDTLQRMGTVVMLPPIVDPPKTRKSEDGKCKCSDPGSETCAKVHVKEAWKRVKYQLGEQAFRNCGFDAMGERVLKLWTAEDKKKLADIEKLIPQSKCSDKCFMKVALKQFSSERTTDLAKYYYNIFLPRRLASLSRAEATYSIDVSLEDEGKDQVHLSREKGKGSGSSSKR

SEQ ID NO: 13132 - protein, 288 aa, Zea mays
  VARIANT 40: note = Ancestral polymorphism is R, Derived polymorphism is Q
MATAATASATAATRFTLLAGAGLRSRITRLPTAVRFQRQRGLTTTALLKTADLQPKEQGKPETLDYRVFLVDGGGRKVSPWHDVPLRAGDGVFHFVVEIPKESSAKMEVATDEAFTPIKQDTKKGNLRYYPYNINWNYGLLPQTWEDPTSANSEVEGAFGDNDPVDVVEIGERRANVGDVLKVKPLAALAMIDEGELDWKIVAISLDDPKASLVNDVDDVEKHFPGTLTAIRDWFRDYKIPDGKPANKFGLGNKPASKEYALKVIQETNESWEKLVKRNIPAGELSLA

SEQ ID NO: 13133 - protein, 122 aa, Zea mays
  VARIANT 85: note = Ancestral polymorphism is A, Derived polymorphism is V
MLQHGEEKKGKVKKGWLAVRVGAAEGDGSQQRFVIPIAYLYHPQFRRLLEAARDAYGYDYSAGPLRLPCSADEFLRLRALVEREAQAPSSSSSHHHRVHAGGGSHGGHYSLSSPCTRARVTS

SEQ ID NO: 13134 - protein, 429 aa, Zea mays
  VARIANT 314..429: note = Derived polymorphism lacks residues 314 to 429
MAAESRGFVMAAVMVVAAVVAVVSVAPCGAEAKTTIEPCSGSDSCPALLGYTLYADMKVSEVAALFAVDPAALLAANALDFGAPGAAHRILPMGLFVRVPTRCSCADGVRKSVSVRYAARPADTLATVSDVVFAGLASSDQIRNENGLTSADPDAPLDAGQKLAIPLPCVCFNSSDNNLPAVYLSYVVQVGDTVPAIAASYETTVTDVMNVNAMGSPVAAPGDILAIPLPACASTFPKSASDHGLIVSNGTYALTASNCVQCSCGPGSLNLYCTPTSLSGTCPSMQCPNSDVMLGNVSTHPTGAGCNVSACSYGGFVNGTITASLTAGLQARCPGPRQFPALTEPPTTVSHDSTYLPPLSAPGPAEAGGVMPEPGSPGPGASVQAGPFTLPKVSKANGPAGSVSAAPLVGKPLRILPVLVSCLAFYLQL

SEQ ID NO: 13135 - protein, 693 aa, Zea mays
  VARIANT 513..693: note = Derived polymorphism lacks residues 513 to 693
MGDSSVAGALVPSVPKPEPAPSGDTSAAAAATTAALAMPEEAGMRAASASPQGPAEEGEGPADRDLLCPICMAVIKDAFLTACGHSFCYMCIVTHLSNKSDCPCCGHYLTKAQLYPNFLLDKVLKKISAQQIAKTASPIDQFRCALQQGNEMGVKELDSLMTLIAEKKRQMEQQESETNMQILLVFLHCLRKQKLEELNEIQTDLQYIKEDISSVERHRAELYRTKERYSMKLRMLLDEPTAQKMWPSPIDKASCRFLPNSRTPLSGSCPGTLQNKKLDLKAQVSHQGFQRRDALTSSDPPNSPIQSGNVIARKRRVQAQFNELQEYYLQRRRTGAQARRQEERDIVAMNREGYHAGLQDFQSVLTTFTRYSRLRVIAELRHGDLFHSANIVSSIEFDRDDELFATAGVSKRIKVFEFSTVVNEPSDVHCPVVEMATRSKLSCLSWNKYSKNIIASSDYEGIVTVWDVQTRQSVMEYEEHEKRAWSVDFSRTDSSMLVSGSDDCKVKVWCTNQEASVINIDMKANICSVKYNPGSSFYVAVGSADHHIHYFDLRNPSSPVHIFGGHKKAVSYVKFLSNNELASASTDSTLRLWDVKDNCPVRTFRGHKNEKNFVGLSVNNEYIACGSETNEVFVYHKAISKPAASHRFVSSDLDDADDDPGSYFISAVCWKSDSPTMLTANSQGTIKVLVLAP

SEQ ID NO: 13136 - protein, 355 aa, Zea mays
  VARIANT 172..355: note = Derived polymorphism lacks residues 172 to 355
MAPKRSAPPPPPPPPAASSEETASGSGSEEEEEEEEEEEEDDLETAHSPPPVAPKSVAPLPQKVQEPEASDEDEYDDEDDEPQKVQEPEASDEDEDDEEEDIEEDEKANHVVPSSATKNPPPPPQTGEDSEASDEEEDREADDEMPQTKPAPNQEVEAKGAKRPSAPFQRTWSIDDDFRILEALAAQRLEHGALPQTDVLADALAGKLDNSGCSLSDLKRKVRSLQSRYAKAVKKGAPPSKDQDRRLFDLCKNVWPSVSNAKPVTKAVTKASANGGAGREPDEMCELYPYLAEEVRALQRAHPGLFKREFGMIEDSKARTLDERIKKQRRALMNLHLRRHDLTKEVTRTLMDLAE

SEQ ID NO: 13137 - protein, 174 aa, Zea mays
  VARIANT 139: note = Ancestral polymorphism is S, Derived polymorphism is L
  VARIANT 133..174: note = Derived polymorphism lacks residues 133 to 174
  VARIANT 124: note = Ancestral polymorphism is C, Derived polymorphism is Y
  VARIANT 110: note = Ancestral polymorphism is L, Derived polymorphism is I
  VARIANT 109: note = Ancestral polymorphism is Q, Derived polymorphism is H
  VARIANT 44: note = Ancestral polymorphism is D, Derived polymorphism is H
  VARIANT 42: note = Ancestral polymorphism is P, Derived polymorphism is T
MTMKLDVPARQKSQDAEQNGRTAAAGVLGIDEPWSQPKLRHPGDAQADADALVPPLNFAMVDDGIFRSGLPDAGSFRFLLSLNLRSVVYLCPEPYPEENARFLQQNGIQLHQFGIEGSKHRTGCVVGCLRKLQKWCLSSVFDEYLHFAAAKARSTDQRFMELFDASSLTHLAAS

SEQ ID NO: 13138 - protein, 199 aa, Zea mays
  VARIANT 144..199: note = Ancestral polymorphism lacks residues 144 to 199
MGSFLSHCSLPRGTGGGSARPAQPQSHSSRQSERAPVGRSHADDVPCRRPTERYKYTVHQSIRSLGLIPWNKQRGQTPKAPVLHSIKQCTASMEDFAGQDVCVVLGIGDNIKGLLATLSRIDAIISYDSSPRSTCILSFPIPCRVPDSRLLCGSRALHLGTKFVDEFRESLKVAHYVGANNGPNANGSRFFITYAKQPF

SEQ ID NO: 13139 - protein, 692 aa, Zea mays
  VARIANT 218..692: note = Derived polymorphism lacks residues 218 to 692
  VARIANT 191..692: note = Derived polymorphism lacks residues 191 to 692
MTTAAEAHHAALWGKHTNRQLGPTISNAATRCRDLQSYLAELTIFLCPHTKKFLILLDNRPWLLDQDTKPAHLWQLMVTKSRFSPFANSRARRRRDETDEKLVYSTSSVSAPHLQNKSSRWYSLIDDAMREKKLQVNKLKDARILNRELHQTLYGFIIFEVDWADVRGINYLNELQTDTSMVVESKIMKRWEFDSVKQASTLIASWFSGNPFECQLLQDYLTNISSNGDIFYDAQNDFLTPEWDSENLPSDSDDSSHVQIIRESSGFTDSSYTTPPCSGPYKRRKITKSDDGSSSTEESYTEIVASPKHSSSSCSSCDSDNENAKPLLEPSTYKDVLICFRFDDHDLPFGLKEVILSDVRLLTLLEYGLPSWVIFLQSYPVFCKIYRPWMCPLARALYVLMSLITVLIGFYDLYKNVPMLKATASRLFGPLFDWIETWEMISRLKYLGTMLFLHNFQQAFTWSLKIVGAAKSALSVLTKPIAGPILEVFELTMPIWNLCAETVGYLSSVVMLSVEVSWSVVIDTVEMIVWPFWFVFSTMVSIVNSILYPIIWLLGEILAAPFRLVIGLSSFVVDLFVDIINFLRGSWSTLSALYQVGSVPRSPVLTSDNNIWASLWKDLLYQIFRALRSILYGFVAFFSTCNRHRLSIYNHIQVFLRRISHVPAGARFTAYLDGTRKYSSQNHHKRRKAKTR

SEQ ID NO: 13140 - protein, 285 aa, Zea mays
  VARIANT 197: note = Ancestral polymorphism is E, Derived polymorphism is K
  VARIANT 200: note = Ancestral polymorphism is A, Derived polymorphism is V
MVRDGEMGRSCPFDLGESIRPVSDDGEAVMATAENKRPRLSSGAEKKPSRKEILERKKATYELIRKAVAVKDHLAQLSDFHKYQRNVYLESGSGHQLRKPMRKYIQNLLKVNMEEPYGPEWLLEEKVKRREMVVPEARYIFVKQYSNGFITESSMKETEVEHMCAVCPESCLLGFVHYRFVVEEELPVLYVYELQMEPSAQGKGLGKFMMQLIEQIACKNQMGAVMLTVQKANTQAMAFYTKLRYVISSTSPSRVDPQIGLEKSYEILCKTFDSEAKSKLEDGDY

SEQ ID NO: 13141 - protein, 526 aa, Zea mays
  VARIANT 159: note = Ancestral polymorphism is A, Derived polymorphism is T
  VARIANT 167: note = Ancestral polymorphism is M, Derived polymorphism is K
MPPPLPAAGGSAARAIAIRMLSTNTVPVEAASLPHTLALPPIAPSPAADELARLLLAHHNPFHPAESPLQLLSGGGVSLSGDLLVQILLRLRGASKLALSLLHAARLHPSFVNTQPRSDAYDAVVDALGRARQFDAAWRVVVDASADGAASPRTFAVLARRYVAAGMTRQAIRAFDDMEAFVSREPDAAEFATLLDTLCKYKYPKVATEVFNKRKYKYGPNEKMYSILIYGWCKVNRSDMAKKFLKDMLVHGIEPNIVTYNILLNGICRHASLHPDYRFDRTVHAAEDLLKEMRGRGIEPDVTSYSIILHVYSRAHKPELCLCMFRSMKERGICPTVATYTSVIKCLSSCGRLEDGEILLDEMVAEGVCPSPATYNCFLKEYRGRKDVTAALELYNKMKAPGSLTAPDIHTYNILLGMFSKLNRHGTVMDIWSDMCESTVGPDLDSYTLLIHCFCDSQKWREACQFFMEMIEKGFLPQKITFETLYRGLIQADMLRTWRRLKRRVDEEAAKFGDEFKLYHMKPYKR

SEQ ID NO: 13142 - protein, 437 aa, Zea mays
  VARIANT 264..437: note = Derived polymorphism lacks residues 264 to 437
MASWPAASRRRSSGGMKSAELSGSGASYGYGRTSSSPDACGYGRQFSAYSARSSQVSRSGSFSAAAQRVAGAFTGCFVPRRQVKAGEEEEEEEKKSKRSMDSGSYHGWNEANLSAAAGSWQEGRALTIADVSKATSNFSEKNVIRQGRSSTMYRGKLRDGSQIAVKCVTKLNDQSPTAELWRELEKIQHRNLARLFGFFERAADSLVVVEYVGNGSLREHLDESCGNGLELAQRLNIAIDVAQAITYLHEYKERPIIHGGIRSSGVLLTDALAAKVAGFGLAGTAASGSGSGSDATPARSAAGYVDPEYLITYQLTDKSDVYAFGVLLVELATGRPPVERSRGGEARLTTKWALQKCRAGEAVVAMDPRMRRSPASVAAVERTLALAAQSVAAARDERPSMRRCSELLWTIRRDYHRQEEPRCGAVAAERSDEWVIR

SEQ ID NO: 13143 - protein, 238 aa, Zea mays
  VARIANT 207: note = Ancestral polymorphism is R, Derived polymorphism is S
  VARIANT 134: note = Ancestral polymorphism is R, Derived polymorphism is S
MSSPQSAAPPVKLITAFGSPFAHRVEVALALKGVPYELVVEDLANKSELLLTHNPVHQSVPVLLHGDRAVCESLVIVEYVDETFHHGAAPGILPADPYDRATARFWADFIDNKCLKPMWLSMWTDGEAQARFVRETKESLGVLDAQLQGKRFFAGDALGFVDLAACTLAHWLGVLEEVAGVHLIAADGEYPALRRWAKEYVSDEVVSRSLPDRDELVAFFTASKERYKSWVRAEVERH

SEQ ID NO: 13144 - protein, 91 aa, Zea mays
  VARIANT 15..91: note = Derived polymorphism lacks residues 15 to 91
  VARIANT 56: note = Ancestral polymorphism is T, Derived polymorphism is N
MGLEAHRPRNKARTYRRGATMAGKGGPTNLEKEQMFGMAEKEMEYRVDLFNRLTKTCFEKCVEKRYKEAELNMGENSCIDRCVSKYWQACD

SEQ ID NO: 13145 - protein, 345 aa, Zea mays
  VARIANT 214..345: note = Derived polymorphism lacks residues 214 to 345
MALDTCSYDDCWVLPPLDCWDWASELLFHTLEGAGAAAVFPETPGVQCSPSEASSGYLHDAIAPVSARRNKRQRMAAATTTPPSRRPATVCGDLQCLLAGLRDSSADAEGGADFRHDLNTTTAAETETRCSFVSGGGDGAGASSREEQQRGPSAQVLLPTPAAAAKGGDEEAKASAVVPPRRFPATVRAAAPLQLQKAAAGTAHAAARRDDRPRPVVDREHSFRAGAGAGAAATTAPASACHSLLSGEHAFEHVSGEDEKRGVGVLYPFAVVKPLGLDDGRMTTLDDVNQRILKRPARPVRHPVGPFAFGPAVSAHGLSLSGKAVVSLTKIRTRGNGTITIIRTR

SEQ ID NO: 13146 - protein, 165 aa, Zea mays
  VARIANT 26: note = Ancestral polymorphism is V, Derived polymorphism is A
  VARIANT 48: note = Ancestral polymorphism is A, Derived polymorphism is S
  VARIANT 96: note = Ancestral polymorphism is Q, Derived polymorphism is K
  VARIANT 122: note = Ancestral polymorphism is D, Derived polymorphism is N
MAAEKRTIGMGMDYSPSSKAAARWAVDNLIKAGDRLVLVHVLPKGVDSSHKELWKTTGSPLIPLSEFMEMNLQARYGLNPDKETLEILRAVSKSKQVEVLAKVYWGDAREKLCEAVDDLKVDSFVLGCRGLGPLKRALLGSVSNYVVNNATCPVTVVRGPTGLSA

SEQ ID NO: 13147 - protein, 419 aa, Zea mays
  VARIANT 222: note = Ancestral polymorphism is P, Derived polymorphism is L
  VARIANT 218: note = Ancestral polymorphism is P, Derived polymorphism is L
MTVTSTLPLLCRFRRHLSLVAAAGMAGVTATGMAGVPATFSSATAQIGGFLSKKPYAPPLWATHLSPMPCHTFSLGHFPTPIHKWNLPNLPEGTEVWIKRDDLSGMQLSGNKVRKLEFLMADAVAQGADCVITVGGIQSNHCRATAVAAKYLNLDCYLILRTSKLLVDKDPGLVGNLLVERLVGAHVDLVSKEEYGKIGSVALADLLKKRLLEEGRKPYVIPVGGSNSLGTWGYIEAIREIEQQIQQSSDVQFDDIVVACGSGGTIAGLALGSRLSSLNTKVHAFSVCDDPEYFYDYVQGLIDGLNSGFDSHDIVSMENAKGLGYAMNTAEELKFVKDIAASTGIVLDPVYSGKAVYGLLKDMAGNPAKWKGRKVLFIHTGGLLGLYDKADQLSSLAGSWRRMDLEDSVPRKDGTGKMF

SEQ ID NO: 13148 - protein, 1823 aa, Zea mays
  VARIANT 268..1823: note = Derived polymorphism lacks residues 268 to 1823
  VARIANT 319..1823: note = Derived polymorphism lacks residues 319 to 1823
  VARIANT 584..1823: note = Derived polymorphism lacks residues 584 to 1823
  VARIANT 610..1823: note = Derived polymorphism lacks residues 610 to 1823
  VARIANT 636..1823: note = Derived polymorphism lacks residues 636 to 1823
  VARIANT 773..1823: note = Derived polymorphism lacks residues 773 to 1823
  VARIANT 774..1823: note = Derived polymorphism lacks residues 774 to 1823
  VARIANT 783..1823: note = Derived polymorphism lacks residues 783 to 1823
  VARIANT 793..1823: note = Derived polymorphism lacks residues 793 to 1823
  VARIANT 836..1823: note = Derived polymorphism lacks residues 836 to 1823
  VARIANT 863..1823: note = Derived polymorphism lacks residues 863 to 1823
  VARIANT 1064..1823: note = Derived polymorphism lacks residues 1064 to 1823
  VARIANT 1152..1823: note = Derived polymorphism lacks residues 1152 to 1823
MGHAVRTQFTDISNTSTKGDQNGSNSLGPMVDANERKRQRDKKRYASMSIEQKNENNRKRREARQRNKELPIKPESSRDTFPGNCSMIDFTNFATHDIIGPVKNTSSTGNSIERKRQMDRERIATMSVEQRNKFNKKRRETRQRNKGQNVMPNVSGDGDKKENVDPDDDSDWMHRNEGFQANDIVATTDLLTQGITRESRLKRLRLYNQTPRRKEAKIEYMRKRRALQADTLNHTSIAMEDPTYTPEVVHPTTDATKPNGSSVTADDWVIPECIMTPFVLASTQTEDVGTFDMSTEAVRRKHHVTRGERQAILARRNQQFEASIAKNVATLIGDTISHAGINNNGITEQESGVEHLRAKPRVISNGDDDDEAVIFGEDDDDDEGYIFDGQYEEIDEDNEINGTQDESIATDVPDPYDKVYSNLPEETHMLKHVPDCGYCTAKKFEYEPPGFCCRGGKVELAPLETPPQLMRLWDSADSDAKHFRDNIRFFNGHFSFTSLYCCLDSMTTNVRDSGIYTFQAQGMMYHNIKSFGKEGGPEHKHLELYFYDDDPSLEHRYRKCREEQLQKDKDVIKQIVGILHGNPYSEHLRSMGHVENLDDYHIALNLDQTLNQKTYNTPLTSEVAAVWIEGSERRGQFSKSVMLHGKDRSSHGIHSYHGCYDALSYPLFFPRGELGWHANIPKVGVSMDEVDAYRATHRASNANDEDAESPSHLCVSVRDYYCYKFQIRPGAFNPILHGKRLFQQFAVDTYIKIESSRLDFIRKNQDRLRADLYQGLVDSMLDGDIRAEKVGKRTVLSTSFIGGPRDMKRRYMDAMALVRKFGKPDIFLTMTCNPNWDEIRRELLPGQTPQDRPDLVVRVFHAKLQELKHRLTKQDILGKVRAYVYVVEFQKRGLPHAHFLLIMQRKYKLTCPAQYDLLISAEISHNKYPELRKMVIKHMMHGPCGSLNPNCPCTKGHASCKNHYSRPFSDTTLQGKDSYPIYRRRDDGRKEKVRGCELDNRWVVPYNPYLLRLFNCHINVEACGSIKAVKYLFKYIYKGHDRASVVMRDASKADDDVDEIKQYRDARWVTPPEALWRIYGFELSQNSPPVIQLQLHLPNMHMVAFHERQMVERVVNRPGADRSMLTAYFEANRLHEEARGILYRDFPEWYTWQSGKGKVWQRRKRDTGGQVGRIVSAHPAEGERYYLRVLLNHVTGATSYVDLRTVDGLTLPTFHEAAERRGLLESDNTLDECLTERALFQMPSALRRLFATLLVYCEPSDVAVLWQKHLDAMSEDYQRRSQSITRVEQMVLIDIRNMLQSMGKDIKTFPLPPIIDAYDDAIGTAREVYEEESIEPAEGDVALKDSLNEEQRVAYVKIMSAVDTDQGGLFFVDGPGGTGETYLYKVLLATLRSQGKIAVATATSGVAASILPGGRTAHSRFKIPLTIDDGAVCSFTKQSGTAELLRKASLIIWDEASMTKRQAVEALDNSVRDIMGRPGLPFGGKTIVFGGDFRQVLPVVRKGSRAQVVASSLRMSYLWESMSHLKLVSNMRAKNDPWFAEYLLRVGGGTENTNSDGDIRLPDEVCVSYSGSDGDLDNLIDFIFPNLNENMSDSTYITSRAILSTRNNWVDMINVKMIDRFQGEHMVYHSFDSAMDDPHNYYPPEFLNTLTPNGLPPHILKLKIGCPIILLRNIDPANGLCNGTRLVIRGFQRNSIDAEIVLGQHVGKRIFLPRIPLCPSDEEMFPFQFKRKQFPVRLSFAMTVNKAQGQTIPNVGVYLPEPVFSHGQLYVALSRAIARSNIKILAIPAIDGNKKSRKGVRKNPAIYYGTCTKNIVYKEVLTN

SEQ ID NO: 13149 - protein, 188 aa, Zea mays
  VARIANT 31: note = Ancestral polymorphism is C, Derived polymorphism is R
  VARIANT 56: note = Ancestral polymorphism is R, Derived polymorphism is W
  VARIANT 60..188: note = Derived polymorphism lacks residues 60 to 188
  VARIANT 143: note = Ancestral polymorphism is V, Derived polymorphism is M
MALLAPSPRALCVREAAAASPHPHSLATAACSTVGGGVAGRALWLWNGGGTGRRRRERRERFRAEAYFWDVSKPVEMEEIDSMEKLDDALRWSVENNQPIIIDWMASWCRKCIYLVPRMEKIAGEYPGVRFYFVDVNKVPQAVVKRGNVTKMPTIQLWKDGEWKAEVIGGHKAWLVMDEVREMIQKNK

SEQ ID NO: 13150 - protein, 263 aa, Zea mays
  VARIANT 199: note = Ancestral polymorphism is D, Derived polymorphism is Y
  VARIANT 171..263: note = Derived polymorphism lacks residues 171 to 263
  VARIANT 159: note = Ancestral polymorphism is R, Derived polymorphism is W
  VARIANT 113: note = Ancestral polymorphism is G, Derived polymorphism is V
  VARIANT 17: note = Ancestral polymorphism is P, Derived polymorphism is S
MTTSGAPKRPSFKRSSPGKKSRLRTRRVAAGGREGEAEAEAAGTSALARALLPASVGLDAVPPVGRALPRDFFEVDALDLAPRLLGKLLRRDEVVLRITEVEAYRPNDSACHGRFGITARTAPVFGPGGHAYVYLCYGLHMMLNVVADIEGVGAAVLIRSCSPVSGLETIQRRRGQQTEKPILLTGPGKVGQALGLSTDWSNHPLYAPGGLEVLDGPEPESILVGPRVGIEYASPEHVAAPWRFAIAGTPWISAPKNTLRPRY

SEQ ID NO: 13151 - protein, 128 aa, Zea mays
  VARIANT 9: note = Ancestral polymorphism is A, Derived polymorphism is T
  VARIANT 12: note = Ancestral polymorphism is A, Derived polymorphism is T
  VARIANT 16: note = Ancestral polymorphism is T, Derived polymorphism is M
  VARIANT 21: note = Ancestral polymorphism is P, Derived polymorphism is L
MLQLLMAAAFSAAPLTLYVPPVRSLSLFVEAMEVVCRDCSPYSHDVVAHFRVGFSRVLAGLAQPISGRDLCLQATVDRSKGNKTEISKSELIQKSAYCRVSGRDMDLVELSAYGNVRRGPDSGGCKIQ

SEQ ID NO: 13152 - protein, 93 aa, Zea mays
  VARIANT 18: note = Ancestral polymorphism is V, Derived polymorphism is A
  VARIANT 4: note = Ancestral polymorphism is S, Derived polymorphism is R
MRTRHLLLVATPLLLLLAVSSDLTAKVSARCPDPESVTLYPGKPCNRQQCKTDCASKYHGGVGVCLNPKGCYCEYCLDRPSAHAASPLRPRHD

SEQ ID NO: 13153 - protein, 308 aa, Zea mays
  VARIANT 2: note = Ancestral polymorphism is R, Derived polymorphism is S
  VARIANT 14: note = Ancestral polymorphism is P, Derived polymorphism is H
MRTSRLVFLFAIVPLLLLLASSGLTPTKASSAGCPHPRSMILYPDLPCDPDVCAKSCAKGLNNGNGTCMRPLGCDCEYCVPAATVAKRPAAVSTRLTTTTTTMASAGCPHPRSTILYPDLPCDPDVCAKSCAKGLNNGNGTCMRPIGCDCVFCVPETVAKRPAVSTRLTTTTTTMASAGCPHPRSTILYPDLPCDPDVCAKSCAKGLNNGNGTCVRPIGCDCVFCVPETVAKRPAVSTRLTTTTTTMASAGCPHPRSTILYPDLPCDPDVCAKSCAKGLNNGNGTCVRPIGCDCVFCVPTAGQAARTT

SEQ ID NO: 13154 - protein, 90 aa, Zea mays
  VARIANT 33: note = Ancestral polymorphism is H, Derived polymorphism is R
  VARIANT 22: note = Ancestral polymorphism is D, Derived polymorphism is G
  VARIANT 21: note = Ancestral polymorphism is S, Derived polymorphism is P
MRTTSRLMFLFAIAALLLASSDLTTKVAAGCAHPVSVILYPGRRCDRGTCEKSCAKEFNGGKGTCMSPNGCDCEYCARVPRLISSPRNRA

SEQ ID NO: 13155 - protein, 93 aa, Zea mays
  VARIANT 81: note = Ancestral polymorphism is P, Derived polymorphism is L
  VARIANT 48: note = Ancestral polymorphism is R, Derived polymorphism is W
  VARIANT 41: note = Ancestral polymorphism is A, Derived polymorphism is T
  VARIANT 36..93: note = Derived polymorphism lacks residues 36 to 93
  VARIANT 3: note = Ancestral polymorphism is T, Derived polymorphism is I
MKTGLVTLQLLTITMFLVLSSHADSTVARTGPDYFQDTCSARISSGARCQPSKCAADCTRQFRGGVGSCDRSGCMCVYTCPAVSPLAMNESIA

SEQ ID NO: 13156 - protein, 241 aa, Zea mays
  VARIANT 162..241: note = Derived polymorphism lacks residues 162 to 241
MAPAAEALSLSRQHRAAAVTYHGALPRRARRDDGGRVPEDGTDDRRAEEEARRWHCARTLRGDDAHGGEDGVPGRPAGACVHGAVRAKMEKYAAKKSAAQAKEKRAVWEWDYESFVDVSWRVMLGRARAAVGCGARGAVVHAAPRRAGTVPAAVPADAVGLRVQHGADRALLPMARGPLGGGGRRPPAAQRGAHREVPVPGEQRLRGDVRQHVQGPHTGLLHQRVRAPPHHGPKAVVSSEH

SEQ ID NO: 13157 - protein, 376 aa, Zea mays
  VARIANT 75: note = Ancestral polymorphism is G, Derived polymorphism is C
  VARIANT 1: note = Ancestral polymorphism is M, Derived polymorphism is T
MMMMSGRAATAGRYPFTASQWQELEHQALIYKCLASGKPIPSYLMPPLRRILDSALATSPSLAAFPPQPSLGWGGCFGMGFSRKPADEDPEPGRCRRTDGKKWRCSKEAYPDSKYCEKHMHRGKNRSRKPVEMSLATPAPASSATSAAAAATSSSQAPSYHSPAPAVPYHAPYGAAYHHTQTQVTMSPFHLLHLETTHPHPPPPPPPPYYYADQRDYAYGKEVGERAFFSDGAGERDRQQQAAGQWQFKQLGTMEATKQPCTTPLLVPAAGYGHGAASPYGVGQAKEDEEEEETRRQQQHCFVLGADLRLAERPSGAHDAAAQKPLRHFIDEWPHEKGSNKAGSWMGGLDGETTQLSMSIPMAAAADLPVTSRYRT

SEQ ID NO: 13158 - protein, 1003 aa, Zea mays
  VARIANT 278..1003: note = Derived polymorphism lacks residues 278 to 1003
  VARIANT 357..1003: note = Derived polymorphism lacks residues 357 to 1003
MARLLRALAALLVLLLAAASVAVADDGETLLEIKKSFRDGGNALYDWSGDGASPGYCSWRGVLCDNVTFAVAALNLSGLNLEGEISAAIGSLQRLVSIDLKSNGLSGQIPDEIGDCSLLETLDLSSNNLEGDIPFSMSKLKHLENLILKNNKLVGVIPSTLSQLPNLKILDLAQNKLSGEIPNLIYWNEVLQYLGLRSNSLEGSLSPDMCQLTGLWYFDVKNNSLTGAIPETIGNCTSFQVLDLSNNHLTGEIPFNIGFLQVATLSLQGNKFSGPIPSVIGLMQALAVLDLSFNELSGPIPSILGNLTYTEKLYLQGNRLTGLIPPELGNMSTLHYLELNDNLLTGFIPPDLGKLTELFELNLANNNLIGPIPENLSSCANLISFNAYGNKLNGTIPRSFHKLESLTYLNLSSNHLSGALPIEVARMRNLDTLDLSCNMITGSIPSAIGKLEHLLRLNLSKNNVAGHIPAEFGNLRSIMEIDLSYNHLSGLIPQEVGMLQNLILLKLESNNITGDVSSLIYCLSLNILNVSYNHLYGTVPTDNNFSRFSPDSFLGNPGLCGYWLHSASCTQLSNAEQMKRSSSAKASMFAAIGVGAVLLVIMLVILVVICWPHNSPVLKDVSVNKPDNLASASNNIHPKLVILHMNMALYVYDDIMRMTENLSEKYIIGYGASSTVYRCDLKNCKPIAIKKLYAHYPQSLKEFETELETVGSIKHRNLVSLQGYSLSPSGNLLFYDYMENGSLWDILHASSKKKKLDWEARLKIALGAAQGLAYLHHECSPRIIHRDVKSKNILLDKDYEAHLADFGIAKSLCVSKTHTSTYVMGTIGYIDPEYARTSRINEKSDVYSYGIVLLELLTGKKPVDDECNLHHLILSKAAENTVMETVDQDITDTCKDLGEVKKVFQLALLCSKRQPSDRPTMHEVARVLDSLVCPAGPPPKQAQAQAQAQASEKPSTTAPSYVSEYVGLRGGGGGSALSCTNSSSASDAELFMKFGEVISRSTE

SEQ ID NO: 13159 - protein, 119 aa, Zea mays
  VARIANT 17: note = Ancestral polymorphism is A, Derived polymorphism is V
  VARIANT 56: note = Ancestral polymorphism is G, Derived polymorphism is R
  VARIANT 79: note = Ancestral polymorphism is S, Derived polymorphism is T
MFHRLRQATMARRRLLADVPPVHRHRQGAPPSDPLVVGTPDPAARAKPAAPRRGPGAPSRMPPSSLPRSTSMPRGRRRSRSGRPCRLRSRTALVARRLPGSAGLRRRLVGSGPPRRRQR

SEQ ID NO: 13160 - protein, 313 aa, Zea mays
  VARIANT 40: note = Ancestral polymorphism is P, Derived polymorphism is L
  VARIANT 71: note = Ancestral polymorphism is G, Derived polymorphism is D
  VARIANT 75: note = Ancestral polymorphism is E, Derived polymorphism is K
  VARIANT 267..313: note = Derived polymorphism lacks residues 267 to 313
  VARIANT 275..313: note = Derived polymorphism lacks residues 275 to 313
  VARIANT 279..313: note = Derived polymorphism lacks residues 279 to 313
MMRARPKCTFTDAMRESSPPPPAAAASAAAVKEDEWEVRPGGMLVQRRSPDADAPAGAPVPTIRVKVKFNGVYHEIYINSQASFGELKKMLSVRTGLHPEDQKLVYKDKERDSKAFLDMAGVKDHSKMVLLEDPAAQARRLLEQRRADKAERAAKSISRISLDVSALETIIVSKGGKVADADVVALTEALMNELVKLDSVAAEGEVKVQRRMQEKRVQKHVETLDAIRAKNAAASAKANGSMDVDGHAKARAPHRPPPVSQRRNFQQPSPAPPAQSWESFDLLSSVPSTSSAAVTTTSPAVASSIPRFDWELF

SEQ ID NO: 13161 - protein, 167 aa, Zea mays
  VARIANT 85: note = Ancestral polymorphism is A, Derived polymorphism is V
  VARIANT 54..167: note = Derived polymorphism lacks residues 54 to 167
  VARIANT 53: note = Ancestral polymorphism is G, Derived polymorphism is V
  VARIANT 33: note = Ancestral polymorphism is G, Derived polymorphism is D
  VARIANT 19: note = Ancestral polymorphism is C, Derived polymorphism is Y
  VARIANT 7..167: note = Derived polymorphism lacks residues 7 to 167
  VARIANT 5: note = Ancestral polymorphism is S, Derived polymorphism is I
  VARIANT 4: note = Ancestral polymorphism is G, Derived polymorphism is D
MECGSSWRLPAVVVGILLCAALFSPPAAALNIGIQSAGDGVVDGMLGRRENPGEHEAMRKMKNEFMVNWDGLRTREKERVLVLAATNKPFDLDEAVVRRLPRRLMVNLPDASNRRKILSVILAKEDMADDVDLETMTEGYSGSDLKLPFLAMPKEYMFTQKEEKSHN

SEQ ID NO: 13162 - protein, 225 aa, Zea mays
  VARIANT 90: note = Ancestral polymorphism is P, Derived polymorphism is L
  VARIANT 73..225: note = Derived polymorphism lacks residues 73 to 225
  VARIANT 62: note = Ancestral polymorphism is R, Derived polymorphism is H
  VARIANT 61: note = Ancestral polymorphism is R, Derived polymorphism is S
  VARIANT 59: note = Ancestral polymorphism is A, Derived polymorphism is T
  VARIANT 55..225: note = Derived polymorphism lacks residues 55 to 225
  VARIANT 47: note = Ancestral polymorphism is K, Derived polymorphism is N
  VARIANT 37: note = Ancestral polymorphism is S, Derived polymorphism is A
  VARIANT 21: note = Ancestral polymorphism is R, Derived polymorphism is H
MPSPPKDRPSGRVGRLLAVLRPSRAGPLPIQIGFPTSLVVKNHGRLKKAALPVLQAREARRRRRGFSFAVPLQSHHLAVTVPVVRLSASPGGRCRCLAVGSAAARPSAGPAPSPRQRPRPGLPRGQRQNMSPRRGQGKEERIEINGGERAKDVHLEKADLGSVVDEQDDARAGNLDDVGGRGGVVILSPAPSARCETMPGRPQESDGTSTQVATAGVGGGGITVV

SEQ ID NO: 13163 - protein, 381 aa, Zea mays
  VARIANT 14: note = Ancestral polymorphism is P, Derived polymorphism is L
  VARIANT 155..381: note = Derived polymorphism lacks residues 155 to 381
MLSGDIRLFRYALPSLGELGLPIGKHIFVYGRIYPLLPPGEGSTWLGWAQPNEALVFDPNGPRDECITNAIDPRTRMVLFKMLNRGVFNNINGCISTGKEANVYHATKTDGQELAIKVYKTSVLVFKDRDRYVQGDYRFRHGYCKHNPRKMVKTWAEKEMRNLLRVRAAGIRCPAPLLLRLHVLVMEFIGKGGWAAPRLKDAALSDDKLHESYFEIITTMRTLYQTCKLVHGDLSEYNILYFEGHLYIIDVSQSVDLDHPSALDFLKEDCLHVSAQQKILENGGAVPNDDEITPTVMVQEQGQPARNLVEVEEDESESCLSSDEDDSWHEDDPKVGPEERKAARKENKKKVKEEKREARKTKIPKAEKKKRKKMAKAKCKR

SEQ ID NO: 13164 - protein, 1096 aa, Zea mays
  VARIANT 13..1096: note = Derived polymorphism lacks residues 13 to 1096
  VARIANT 29..1096: note = Derived polymorphism lacks residues 29 to 1096
  VARIANT 269..1096: note = Ancestral polymorphism lacks residues 269 to 1096
MEAASCCRVFSTQRCRFPLRRLSAPPWPQPFCTESSGGLVTPSASKRRSRGPVMAAKKAAEGEKQEDGKYKHTVDLPKTTFGLRANSVQREPELQKLWDDNQVLKRVSERNTGTAFVLHDGPPYANGDLHMGHALNKILKDFINRYKLLQNHKVSFVPGWDCHGLPIELKGKFIFLKSMDKETLSALTPIKLRQKAAKFAKATVDAQMKSFKRYGVWADWDNPYLTLSPEYEAAQVFCLLSAFTEYGNDINNLLQNKSHFVCLSILLFQLEVFGQMVMKGYIYRGRKPVHWSPSSRTALAEAELEYSENHISRSIYAAFKITNPSKSGMLDDFFPNVSLVIWTTTPWTIPANAAVAVNPKLIYAVAEVQSVFESESTSGGKQRKVGNILSSEKGKLFVIVASDLITTLESKWGVKLVVHKSFPGSALEHCRYAHPVNSNECSVILGGDYITTESGTGLVHTAPGHGQEDYITGLKYGLPIISPVDDEGNFTAEAGQFGGLSVLGAGNAAVVKYLDEQYSLILEEPYKHKYPYDWRSKEPTIFRATEQWFASVDGFRDAAMDAIRRVTWVPSQAQNRIVAMTSSRSDWCISRQRTWGVPIPVFYHVDSQEPLITEETIEHIKAIVLKKGSDAWWYMTTEELLPDRYRDKASEYRKGTDTMDVWFDSGSSWAAVLAKRDGLNFPADIYLEGSDQHRGWFQSSLLTSIATTGKAPYSSVITHGFVLDEKGFKMSKSIGNVVDPEKIIVGGKNHREEPGYGADVLRLWVSSVDYTTDVLIGPQILRQMSDMYRKLRGTMRFLLSNLHDWKPDNSVPYNDLPKIDKYALFHLETVMTSMKDSYESYQFYKVYQILQRFATVGLSNFYLDVAKDRLYVGGRVSFTRKSCQTVLMAHLLYLVRAISPIMPHLAEDVWQNLPFQYTLQDGSLANFVFDLKWPEKNEEWLSAPKDDVDFLGVILELRSEVNKILENARTGKLIGSSLDAKVYLHTESSDTVLKLKELSSASNDADALHRLFITSQVDILPILNEEITSSVPYTGKFSNPRTGVIWIGVTRADGAKCERCWNYTQDVGSFHDHPTLCVRCYGVIELQTQPAAAAVS

SEQ ID NO: 13165 - protein, 227 aa, Zea mays
  VARIANT 27: note = Ancestral polymorphism is V, Derived polymorphism is A
  VARIANT 29: note = Ancestral polymorphism is F, Derived polymorphism is S
  VARIANT 95: note = Ancestral polymorphism is E, Derived polymorphism is A
MGTVVDAPAVVAEEVTENMLGGKKVTAVFVLGGPGSGKGTQCANIVEHFGFTHLSAGDLLRAEIKSGSENGTMIENMIKEGKIVPSEVTIKLLQEAMIKNENDKFLIDGFPRNEENRAAFENVTKISPAFVLFFDCSEKEMEKRLLGRNQGRVDDNIETIKKRFKTFVESSLPVIEHYNSRDKVKKIDAAKPIPEVFEDVKTIFAPYAPKHLLALPFPSFPLLSPLG

SEQ ID NO: 13166 - protein, 783 aa, Zea mays
  VARIANT 8: note = Ancestral polymorphism is R, Derived polymorphism is H
MERISGPRLAVLLALAVFTAVAAAATDEVRAQSTYIIHLAPGHPALSAARVNGGDEAALRRLLPRRLRAPRPRVLYSYQHAATGIAARLTPQQAAHAAAGEGVLAVYPDQARQLHTTHTPAFLRLTEAAGLLPAATGGASSSAVVGVLDTGLYPIGRSSFAAADGLGPAPASFSGGCVSAGSFNASAYCNSKLIGAKFFYQGYEAALGHPIDETKESKSPLDTEGHGTHTASTAAGSPVAGAGFFDYAEGQAVGMDPGARIAAYKICWTSGCYDSDILAAMDEAVADGVDVISLSVGANGYAPSFFTDSIAIGAFHAVSKGIVVSCSAGNSGPGEYTAVNIAPWILTVGASTIDREFPADVVLGDGRVFGGVSLYAGDPLDSTQLPLVFAGDCGSPLCLMGELDSKKVAGKMVLCLRGNNARVEKGAAVKLAGGVGMILANTEESGEELIADSHLVPATMVGQKFGDKIRYYVQTDPSPTATIVFRGTVIGKSRSAPRVAAFSSRGPNYRAPEILKPDVIAPGVNILAAWTGAASPTDLDIDSRRVEFNIISGTSMSCPHVSGLAALLRQAHPEWSPAAIKSALMTTAYNLDNSGETIKDLATGVESTPFVRGAGHVDPNAALDPGLVYDAGSDDYVAFLCTLGYSPSLISIFTQDASVADCSTKFARPGDLNYPAFAAVFSSYQDSVTYRRVVRNVGSNSSAVYQPTIASPYGVDVTVTPSKLAFDGKQQSLGYEITIAVSGNPVIVDSSYSFGSITWSDGAHDVTSPIAVTWPSNGGAAAM

SEQ ID NO: 13167 - protein, 650 aa, Zea mays
  VARIANT 148: note = Ancestral polymorphism is F, Derived polymorphism is S
  VARIANT 181: note = Ancestral polymorphism is D, Derived polymorphism is Y
  VARIANT 271: note = Ancestral polymorphism is T, Derived polymorphism is I
  VARIANT 282..650: note = Derived polymorphism lacks residues 282 to 650
  VARIANT 462..650: note = Derived polymorphism lacks residues 462 to 650
  VARIANT 474..650: note = Derived polymorphism lacks residues 474 to 650
  VARIANT 596: note = Ancestral polymorphism is S, Derived polymorphism is I
MATATMATAAGAAALLYYTLNRRLQTERLNKEGECSDSRDVTPRAAQGSPSRSRVSRRDVRAPATWLETISTLSETLRFTYSETLGKWPIGDLAFGISFLLKRQGNLSVASIYAGNDSVELKGAEVIADLKYLLNLLTLCWHFSKKPFPLFLEATGYTTEDVLMQEPKAGILKPAFTILLDRDKKSILLLIRGTHSIRDTLTAATGAVVPFHHTIVQEGGVSDLVLGYAHFGMVAAARWIAKLSGPCLAQALQMYPDFKIKVVGHSLGGGTAALLTYVLREQKEFASTTCLAFAPAACMTWKLAESGVHFITTVINGADLVPTFSAASVDDLRSEVTASAWLNDLRHQIEQTRILSTFYRSASALGSRLPSMANAKARVAGAGAILRPVSTGTQVVMRRARSVAQAAWTRPALQLSSWTCIGPRRRNNISTSTVTSEEIIASTGGGSESTSLLTETTAETTETVTSEAVSEVVQSSVSVAVDAVDLVDDKGDSDDDIVDHHGDEDRMTDVELWQQLESELYRKREGEEDDIAEEMAESTIAEEVGGVAEDVLSETKEVHRFYPPGKIMHILFSSREEADRGEEPEDDVTDGEAQSSIGIFLTPRSLYGKLRLSKMMINDHYMPIYRRNIEQLIAELEKDSSDQIGCVRCS

SEQ ID NO: 13168 - protein, 155 aa, Zea mays
  VARIANT 137..155: note = Derived polymorphism lacks residues 137 to 155
  VARIANT 98: note = Ancestral polymorphism is R, Derived polymorphism is Q
MCTVPDARARGDWWDREPLPSPPSRRRGRGDTTAVSGRRGGDRDGGSSADVREIDRGGAWRHHVHALLCLLIGSTDKYLVVEVLQQAGNAARDNKKKQIMSRHIQLAVWNDEELSKLLGTMADRGRRRDANIHRTLQPEKANQKRDIGSIISYEF

SEQ ID NO: 13169 - protein, 233 aa, Zea mays
  VARIANT 56: note = Ancestral polymorphism is R, Derived polymorphism is W
  VARIANT 128: note = Ancestral polymorphism is T, Derived polymorphism is I
  VARIANT 154: note = Ancestral polymorphism is A, Derived polymorphism is T
  VARIANT 186: note = Ancestral polymorphism is G, Derived polymorphism is A
  VARIANT 188: note = Ancestral polymorphism is E, Derived polymorphism is K
MEADIAKPSMAPAEVGIVAGPLPNTVGLEALTGAMDKLEALLRPKEGQSNPVGHKRGTNDKDITAKIKRAMDLSEDLSAHIKKTKDNVAGILNKPQAVATSRRQEPWCRLISQYTMHPTLSIYGALFIIGHGAHHDFRLGVSSTVSHVCRLKQAKRGALLEVFESKVVCVNGKSLDKVAKVTLNGGDKIIFRSPRGALLEVFESKVVYVNGKSLDKAAKVTLNGGDKIIFHSP

SEQ ID NO: 13170 - protein, 1274 aa, Zea mays
  VARIANT 194: note = Ancestral polymorphism is L, Derived polymorphism is Q
  VARIANT 1078..1274: note = Derived polymorphism lacks residues 1078 to 1274
MADVDMADLPQTPRSTAGDDDLSLLDGEGDLAAAILARLGGSPREDFQHLCATAAAMAQAVSDQGVPATPVAYFAAAAAALAPLARAGDAGADRHVAGALLAFLSAALPALPAAVVRARGREVADDVMRVLDFPSTPDSGVRAGLRCLAHLISAGDRANWEAVEPLYTVILRLSTDHRLKVRKQSHSCLHDVLLSFQRQTILIPASEAITRSFERFLLLAGGSSAVNTGVSEEGPKGAKEVLYILNALICCLPLMASKPSNTILKYFKPLLDLHQPILIRSLLDILHAVCESPTVQLKSDVLLDLLCSLGLSVSSERKSGDEMASIARLLHVGTKKIYKQNRDICVVKLPLIFTSLGDILSSEFEEARFSSLEGFKGLIDNCIDETLVSQGIAQMKARHQGLKSDPTIIDKICAILEGLLDVRYSDVWDRSFHVISVAFDKLGEFSADLLPEAVRNLADMQNLSDDDFSFRKQLDACLGSAVAAMGPKNILEILQIQSISDENEWILPILEKHIVGASLQFFLRDILSMVGAIEKNIPKLLKHDKLFSAKRAEGYVYSLWSLLPSCCNYPCDTSSNFRVLQDILCDTLQNHPALHGIVCSSIQVLIKQNKKALSVSREEDILAEDEISKSERRAKERYTQNLAEENLKAIRAFSSKLLEVLCSIFLMSSNDAIGLLQPAISEIASISDKNVVGKFFLDAIRKLLDATKAVNAEPVDDSSMEIEADSNKNSMKRALLLDFAASLMPGLAAKSINVLFSYVKPAIKDSDSLIQKRAYKVLSMLLKDAEFIEKNLDVLSELMISSLPCQFPSKRYRLECLYHLIVYILKDSSMVRKREIISSFITEILLALKEANKKTRNRAYDLLIEIARACENAGNDEGKEGLHQFFGMVAGGLAAGQTPYAISAVVTGLARLTYEFSELIGVAYNLLPQTFLLMQRNNREIVKANLGFVKALVAKSKADILHEHLTGVVEGLLSWQSDTKNSFKAKVKSLIEILVKKCGLDAVKAVMPEEHMKLLTNIRKINERKMRKAKSSEDGDAMSMASGATRQSRWNHTQMFSDFGSDDESDGPFSTQHTATSRSRTESKASTRLSRRRQGDKKLLDKFIDHSTGDPLDLLDQKTVRLALKSAAGKKRAAPDDDDDKFEVDPEGRIIVREEREKWKKKPAPRDDEEADGKSSVRSQSIKKRKTSGSGWAYTGHEYTSKKASGDLKKKDKMEPYAYWPLDRKLLNRRSDRKASARKGMSSVMKITKKLEGKSASAALSAKRSGKTKHKKNK

SEQ ID NO: 13171 - protein, 308 aa, Zea mays
  VARIANT 71..308: note = Derived polymorphism lacks residues 71 to 308
  VARIANT 45: note = Ancestral polymorphism is Y, Derived polymorphism is N
  VARIANT 2: note = Ancestral polymorphism is D, Derived polymorphism is Y
MDAGGEKCGDAAAEGGDLYAVLGLKKECSEAELKVAYRKLAKVFYSMKWGSLMILSNCSTEMAPGQMLVLQQREAHGGSQGEVPRDPGRLFRSQSSFSQHPHTIHPPHCSVPSIFANHPFTLLSDANKRLLYDVGVYDDEDDEESMQGMGDFIGEMAQMMSQAQPTRQESFEELQQLFVDMFQSDIDSGFCNRTAKAHQFQGPAKSRTCSTSPSSSPSPPPTTAKDAEVPSCNGFNKRGSSALDSGKPPKPVEGGAGQNQAGFCFGVSDTKETPKLPGQNASRRRNGRKQKLSSKHDVSSEDETAAGS

SEQ ID NO: 13172 - protein, 171 aa, Zea mays
  VARIANT 21: note = Ancestral polymorphism is R, Derived polymorphism is C
  VARIANT 53: note = Ancestral polymorphism is G, Derived polymorphism is R
  VARIANT 101: note = Ancestral polymorphism is D, Derived polymorphism is G
  VARIANT 114: note = Ancestral polymorphism is I, Derived polymorphism is T
MTELFDTAVTSLLHLPEVLDRLSAADGDRRSAGNHAAHGHGHGRVHGLGGGGGAPVDIVESPREYAFVLDVPGLSKSDIQVTLEEDRVLVMKGGSGKRKRDEEEDMNGEGCRYIRLERGAAPRSFVRKFRLPEDADTGGVAARCENGVLTVTVKKLPPPEKKAKTVQVTIA

SEQ ID NO: 13173 - protein, 245 aa, Zea mays
  VARIANT 199..245: note = Derived polymorphism lacks residues 199 to 245
  VARIANT 194: note = Ancestral polymorphism is D, Derived polymorphism is V
  VARIANT 178: note = Ancestral polymorphism is S, Derived polymorphism is Y
  VARIANT 174: note = Ancestral polymorphism is D, Derived polymorphism is Y
  VARIANT 149: note = Ancestral polymorphism is T, Derived polymorphism is I
  VARIANT 95: note = Ancestral polymorphism is E, Derived polymorphism is D
  VARIANT 93: note = Ancestral polymorphism is L, Derived polymorphism is P
  VARIANT 67..245: note = Derived polymorphism lacks residues 67 to 245
  VARIANT 50..245: note = Derived polymorphism lacks residues 50 to 245
MRRRQLFVPMFWLVEYDTFDIGFITTDEFGNADILEATYPAVAKRLHGDWIQDPAIPVVTGFLGKGWKSGAVTTLGRGGSDLTATTIGKALGLREIQVWKDVDGVLTCDPNIYPHAKTVPYLTFEEATELAYFGAQIVLTSIVLKSNVTMLDIVSTRMLGQYGFLARVFAIFEDLCISVDCVATSEVSVSVSLDPSKIWSRELIQQASVSIPSFIYINNLINLQTGHVLRKSGVNVQMISQGASK

SEQ ID NO: 13174 - protein, 165 aa, Zea mays
  VARIANT 113..165: note = Derived polymorphism lacks residues 113 to 165
  VARIANT 107..165: note = Derived polymorphism lacks residues 107 to 165
  VARIANT 75..165: note = Derived polymorphism lacks residues 75 to 165
  VARIANT 71..165: note = Derived polymorphism lacks residues 71 to 165
  VARIANT 69..165: note = Derived polymorphism lacks residues 69 to 165
  VARIANT 58: note = Ancestral polymorphism is R, Derived polymorphism is Q
  VARIANT 49: note = Ancestral polymorphism is S, Derived polymorphism is N
MAARQQHRHSFEKVYDANSALAALLLADRVWPVFLFPKISSDPSSHRCSCSHGRHRHRRGREGKEGSDQAQAIKQEHQLLSLEAHDCVNAIPDLSNMIRAVQGLVAQCEDLKLKYYEEMDKRKKLYNIVQETKDEVSSGQNANGRTTKKTLSLIESSCRRMIKVY

SEQ ID NO: 13175 - protein, 230 aa, Zea mays
  VARIANT 6: note = Ancestral polymorphism is R, Derived polymorphism is M
  VARIANT 104: note = Ancestral polymorphism is L, Derived polymorphism is P
  VARIANT 174: note = Ancestral polymorphism is P, Derived polymorphism is L
  VARIANT 189: note = Ancestral polymorphism is R, Derived polymorphism is G
  VARIANT 190: note = Ancestral polymorphism is P, Derived polymorphism is L
  VARIANT 204: note = Ancestral polymorphism is I, Derived polymorphism is S
MDGLERSSLSVDQLPDDALVQILSRLGAKSLCRSKCVSKPWRDLIADRLYCKDLPQSLQGFLYFDVGRRGDGHDAAAANAYGGDLAGSRDGMLLRHGHGRFIDLLGKPMPLLDPSFAFLKEQPGVNAIELLDSCNGLLLFGHRRVSDTYDSLGYIVCNPVTEQWVAIPSSGWTPTPAEEIVDEHVKDPRPFIIFDPSLSSNFDIVQFWQDGTVDDVEGVHVKIGYFLYIV

SEQ ID NO: 13176 - protein, 403 aa, Zea mays
  VARIANT 335..403: note = Derived polymorphism lacks residues 335 to 403
  VARIANT 284: note = Ancestral polymorphism is F, Derived polymorphism is S
  VARIANT 253: note = Ancestral polymorphism is P, Derived polymorphism is L
  VARIANT 251..403: note = Derived polymorphism lacks residues 251 to 403
  VARIANT 249: note = Ancestral polymorphism is P, Derived polymorphism is L
  VARIANT 247..403: note = Derived polymorphism lacks residues 247 to 403
  VARIANT 237: note = Ancestral polymorphism is S, Derived polymorphism is T
  VARIANT 221: note = Ancestral polymorphism is T, Derived polymorphism is I
  VARIANT 198..403: note = Derived polymorphism lacks residues 198 to 403
  VARIANT 190: note = Ancestral polymorphism is G, Derived polymorphism is D
  VARIANT 125: note = Ancestral polymorphism is D, Derived polymorphism is Y
  VARIANT 115..403: note = Derived polymorphism lacks residues 115 to 403
  VARIANT 111..403: note = Derived polymorphism lacks residues 111 to 403
  VARIANT 55: note = Ancestral polymorphism is C, Derived polymorphism is Y
  VARIANT 25: note = Ancestral polymorphism is C, Derived polymorphism is F
MPTQQSTSHDAYPKRSYYGGPEHICPYCHVVFWFQECVKNNFCSTQRKIVYNLCCKGGKVNLKPFERPPPLLANLLRFDGAIDKTINNGTAPYVFKINGVVHHKIGTLLPQRGTQPKFAQLYTYDTEHETQNRLGMFETDDGAGGQPDPAMASLLLDMLNENNSLVKVFRYARERLEREGDQKITLILLGCNTCHDVQYNLPSNGEIAAIIVGDYTAGEYTYDVLVHDRECGLKRVSCLHPTYMPLQYPLLFPYGEHGFHLGIRYFGADDVGSSKRKYVTMLEFVRRHLHYRLDAPNPYTCYGRLSDQIDVDAYSTIEGNKLQFIESHQSDLRSETVQGIADAIDKGFVNADSIGGRVVVPVSFTGGRSGRSLNTVYEAGSCGSQTQNVVYKEVLAAADAAAT

SEQ ID NO: 13177 - protein, 331 aa, Zea mays
  VARIANT 96: note = Ancestral polymorphism is A, Derived polymorphism is S
MKPPSSPGCTSLFLLPCILLAAVMYLVLFPDNFRLPAGMFGSSTSSSCNYNNGASAVGRLAAGGSPPTDEAVDLRLLMGIVTTPSTYERRALLRLAYSLQPRPVRAVVDVRFVMCRIEREEDRILVALEIIAHGDVVVLNCTENMNDGKTYAYFSAVPGLFAGDGERYDYVGKTDDDTYYRVAALAESLRGKARRDAYQGYLTPCHWLPEKQYMSGMGYVVSWDVAEWIAATPELRDDHNDWEDVNFGGWLRKGGRYKNVYNEEPRMYDYWDREMATDVNCFRHEHIADTVAVHKLKDRLKWARTLHFFNATQGLKPSKLYHVDLQNVYHV

SEQ ID NO: 13178 - protein, 252 aa, Zea mays
  VARIANT 22: note = Ancestral polymorphism is G, Derived polymorphism is V
  VARIANT 39: note = Ancestral polymorphism is A, Derived polymorphism is V
  VARIANT 48: note = Ancestral polymorphism is D, Derived polymorphism is G
  VARIANT 60: note = Ancestral polymorphism is G, Derived polymorphism is R
  VARIANT 97..252: note = Derived polymorphism lacks residues 97 to 252
MTEMEGSTGSVQIMHLVQPESGSSLDMVPSEPEIVHLTAWDLALFTVGHIQKGILLPKAGTGGAQLVDDLASSFASVLGHFYPLSGCLTASEITNGLVSPSLAITLCCNDKCTKFIHDMAPEVTISRVVLPAEQVAECGSTHGLHPCAGHVGQRARRCHLHCHVVAAQLWPRIWSRILALLKHLMNYCCRTGARTRTHLAPTRSMGANKPRDLYEKLCIPVDNMFFAGEAMSVKYTGTVHSTFSAGVVAADE

SEQ ID NO: 13179 - protein, 332 aa, Zea mays
  VARIANT 186..332: note = Derived polymorphism lacks residues 186 to 332
  VARIANT 219..332: note = Derived polymorphism lacks residues 219 to 332
MPSTRTPPSRKVVAPRIPHPPPPLLPAINTHASHRAADPPPSSPSARRPWLDHFSFPGVGDEDEAVVFFQQRYLVGRGGGWAGPGGRIFFYCGNEGDIAWFAANSGLIWDAAPRFAARGNRSSAASLVSYSKAKAYSDSKSPAYLTAEQALADFAVLLTDLKRNLSEEGSPVVLFGGSYGGTPILQFEDIVPSTIFYDLVSDDFRRKSLSYFLTIKDSWKELDDQANKQDGLLKLSKTFHLCQTLKTSGDLSDWLSSAYSYLAMVDYPLPSEFLRPLPANPIKEVCGNIDSQPKGTGTLERIYAGVNVYYNYTDTVDCFDLNDDPHGMGGWD

SEQ ID NO: 13180 - protein, 69 aa, Zea mays; identical to SEQ ID NO: 6677
  VARIANT 54: note = Ancestral polymorphism is M, Derived polymorphism is I
  VARIANT 46: note = Ancestral polymorphism is I, Derived polymorphism is T
  VARIANT 33..69: note = Derived polymorphism lacks residues 33 to 69
  VARIANT 22: note = Ancestral polymorphism is Y, Derived polymorphism is F

SEQ ID NO: 13181 - protein, 90 aa, Zea mays
  VARIANT 23: note = Ancestral polymorphism is A, Derived polymorphism is T
  VARIANT 79: note = Ancestral polymorphism is I, Derived polymorphism is T
MGRAPCCDKASVKKGPWSPEEDAKLKAYIEEHGTGGNWIALPQKIVGLKRCGKSCRLRWLNYLRRNIKHGDFTEEEEHIICSLYISIGSR

SEQ ID NO: 13182 - protein, 268 aa, Zea mays
  VARIANT 25: note = Ancestral polymorphism is I, Derived polymorphism is S
  VARIANT 31: note = Ancestral polymorphism is L, Derived polymorphism is F
  VARIANT 35..268: note = Derived polymorphism lacks residues 35 to 268
  VARIANT 62: note = Ancestral polymorphism is K, Derived polymorphism is N
MCSTSGGNSAATATQTLSASALERIQLHMRLQGMYGAFGCSGGGGNDDRNAVVGAAAPQWPKLEALLQANRLLPGSLPTDAMATTVSVQQRHHQHLVDHQSLAVGAGNAAAVEGEQQQLSSADAANYMALPGGGFFERPKLGFYSPSAEAEATAAAASVEMNSVAPMVGGGYGGAGFEQYHHHDVLYEFLYSNYGSVGELAQDGHVPTLPELQCPNGAAVDGADEKFSVWTASAACDYGAAGGYQIQLGNSIGSNLHDYVLGGYDQWE

SEQ ID NO: 13183 - protein, 176 aa, Zea mays
  VARIANT 9: note = Ancestral polymorphism is A, Derived polymorphism is E
  VARIANT 18: note = Ancestral polymorphism is L, Derived polymorphism is H
MPRRRFPLASTVTAAVLLAAAVLAGATATADAKTEKSLASRFLEPHNAARRAVGVPALRWDERLAAYARRYAAARAGDCALAHSHGPYGENLFRGSGGAGWNPEAVVGAWVRERALYDRSTNSCRGGGGACGHYTQVVWRGTTAVGCAMAPCAGGRATFAVCSYSPPGNYVGIRPY

SEQ ID NO: 13184 - protein, 175 aa, Zea mays
  VARIANT 27: note = Ancestral polymorphism is S, Derived polymorphism is I
  VARIANT 44: note = Ancestral polymorphism is L, Derived polymorphism is P
  VARIANT 83: note = Ancestral polymorphism is V, Derived polymorphism is A
  VARIANT 95: note = Ancestral polymorphism is W, Derived polymorphism is G
  VARIANT 160: note = Ancestral polymorphism is T, Derived polymorphism is I
MASSRRSSGLSSGAAALGIALLVLAASAGNAGASYYGEMRRQFLAQQNAARASLGLAPLAWDERVAAYARAYAESRRGDCALAHSAGPYGENLFWGSGTGWAPAQAVAAWLSERPRYDYWTNSCYGGSMCGHYTQIMWRSTRRVGCAMVACYGGRGTFITCNYDPPGNYVGLRPY

SEQ ID NO: 13185 - protein, 206 aa, Zea mays
  VARIANT 16: note = Ancestral polymorphism is C, Derived polymorphism is W
  VARIANT 65: note = Ancestral polymorphism is A, Derived polymorphism is V
  VARIANT 100: note = Ancestral polymorphism is A, Derived polymorphism is V
  VARIANT 173: note = Ancestral polymorphism is T, Derived polymorphism is I
MKPLVARLLLCYSLLCLAPAAAPLRLQHDHVRGHGHGHAHPPPYARNATAYGVSAALCPGCGAWADALEFLYYHNLVRLASLEPPLAWSPRLASYAGWWAAQRRGDCALRHSFPDGQFALGENVFWGGPGGAWRPRDAVADWAAEGADYSYADNACAPGRECAHYTQIVWRRTTAVGCARVACDGGGVFITCNYYPPGNVVGERPY

SEQ ID NO: 13186 - protein, 278 aa, Zea mays
  VARIANT 255: note = Ancestral polymorphism is S, Derived polymorphism is L
  VARIANT 208..278: note = Derived polymorphism lacks residues 208 to 278
  VARIANT 173: note = Ancestral polymorphism is S, Derived polymorphism is A
  VARIANT 136: note = Ancestral polymorphism is D, Derived polymorphism is H
  VARIANT 103: note = Ancestral polymorphism is G, Derived polymorphism is R
  VARIANT 42: note = Ancestral polymorphism is P, Derived polymorphism is L
  VARIANT 34: note = Ancestral polymorphism is R, Derived polymorphism is S
  VARIANT 28: note = Ancestral polymorphism is G, Derived polymorphism is C
MADGDGAAATGKLAELPSGAEKGLPRRGKASSGRTLNTAQIPLVASHPDVYEPCDDSFALVDALLSDKAQLLTLQPRLCMEVGSGSGYVITSLAIMLRQLGSGAQYLATDINQHAAETTQATLEAHGVHADVIVTDIMSGLDKRLAGMVDVAVVNPPYVPTPVEEVGCRGIASSWAGGLNGRQVIDRILPAVREMLSERGWLYMVALEDNDPSDICHLMSEMGYASRVILKRCTEEESLYVLKFWRDPHAVTSVSPKSSGSESWFSQLHFKSLWHKGS

SEQ ID NO: 13187 - protein, 182 aa, Zea mays
  VARIANT 167: note = Ancestral polymorphism is A, Derived polymorphism is V
  VARIANT 139: note = Ancestral polymorphism is G, Derived polymorphism is S
MECTSSRRRRSRLSRCLLLVCAVASLLCHSPGPAAAAAAPRRLLQTCPGQDFDVPHAHLRARDNVKPLKYTEELSARAAQWAQQYRSDCEAAAPAPGINVFLGAAGATWLPSDAVAAWAEEEQHYDYGSNSCSTGKACGRYTQMVWRGSKEFGCAVVDCDSGKTLMACLYEPQGNVAGQRPF

SEQ ID NO: 13188 - protein, 356 aa, Zea mays
  VARIANT 267: note = Ancestral polymorphism is W, Derived polymorphism is R
  VARIANT 262..356: note = Derived polymorphism lacks residues 262 to 356
  VARIANT 247: note = Ancestral polymorphism is P, Derived polymorphism is S
  VARIANT 230..356: note = Derived polymorphism lacks residues 230 to 356
MRPGGPPNSRALQPPGTPGRSRRRPDLTLPLPQRDLTSLAVPLPLPPPPSSAPSSGSLSAPASLGAPTPPTSAGAAPPNPPPLCELERVRRVGSGAGGTVWMVRHRPTGRAYALKVLYGNHDDAVRRQITREIAILRTAEHPAVVRCHGMYEQAGELQILLEYMDQGSLESHRIADERFLAHVARQVLSGIAYLHRRHIVHRDIKPSNLLIDSGRRVKIADFGVGRILNQTMDPCNSSVGTIAYMSPERINTDLNDGAYDGYAGDIWSFGLSILEFYLGRFPLGENLGKQGDWAALMFAICYSDSPQAPCNASPDFKNFISLCLQKNPVNRPSAMRLLQHPFVAQPQPQPLAAPPS

SEQ ID NO: 13189 - protein, 1000 aa, Zea mays
  VARIANT 411..1000: note = Derived polymorphism lacks residues 411 to 1000
MQMRFAATSASFVLLCLLAALLGHWPAAAAETVNVGVILDLASAPGRRWRTSISMAVEDYYATHTNSTTRVDLHFRDSSGDAVAAASAAVDLIRNAKAQAIIDGSRTAAAAEFVARIGDRAHVPVLAFSAAPATWTARFSVATAPGDSSQAAPIAGVLENFHWRSAVLLHEDSRSGAGIVPALSDALRGAGATVAHRAAVPADASDDRLDAVLYRASAMTARVFVVHMPFPLALRLFHRAKGAGMMSDGYVWIATSAVGDTGDGDGDALGSDDADAMQGVVSVRQYAPPTSEVSDFARRFKARFQLENNGSQDTTEPTTSTLQAYDTAFAAAAAVEAAGISGSAFEPPTGGGTELDQLGVSATGEKLLKAVLDTTFEGLAGKFRLLDGQPQTPAYEIVNFAADGLTTVGFWTTKSGVSQEFDAGSGEGLKKVSFPGAGESDTRIPDGWAFSPVERSLVIAVPVKHGFQQFVQVYNDTTSDRTMVSGYCIDVFEAAIKALPYPVYYQYAPYYGIGNASSSSYDQMVELIPEEKADAVVGDVSITVVRMGDADFTMPYTESGWSMVVAVQAQTATGMFFFLKPLTPALWLVSLAAFIFTGFVIWVIEHRINPEFRGTPLQQFGIIFHYAFSTLVFAHRENVVSNLSKFLMVIWVFAVLILTSSYTASLTSMLTVQKLRPAVTDVNDLIDNGDYVGYQEGSFVHGELLQMKFDPSRLRSYSTPAEYADALSKGSAGGGVAAVFDEVPYLKVFLSQYCDGYTMSGPVYKGTGLGFAFARGSPMATEVSRAIVGLTEGDDMDLIERKWFGVPGSCVDGVDADNASLTLWNFSGLFLITAVAATLVLLAYLVTFIYRERHEVRAAAEPGSGSVSLKRFRAWLQHYDRKDMSAPHFRQQQGWSDSPSTNGGSSHGRKREGAEQEDATATRDFGGPRASPLSDHSRMDSVSRSPLERKGSNEFRTPFEQRMGEAAAASGERRSSTPERKQSLKFAQDTEERKKLPLSP

SEQ ID NO: 13190 - protein, 477 aa, Zea mays
  VARIANT 109..477: note = Derived polymorphism lacks residues 109 to 477
MASRLLTRSAASRLVSHLHRKTPGITPCLLTRGPALASLLGPTDGLPHAADSTLLRVPMRWLSSPSSEAVAEAPMTADGLTVDSIADKGWTILPEAESDWRSHAAAVAQSVKVIKKRLKWGWILERTKQLAVVLEKPDLWEDPVFAGRVSREQGELMGKIKSVNQFEQELIEHIEMLRLAREENDNELEMESMKALADMRRSAKEKELNALLSGDNDSCSCFIEVQAGAGGTESMDWAAMVMNMYRSWAQRRGYKITVVEEMSGEVAGIKRATIKVDGEYAFGYAKAEVGVHRLVRISPFDSGKRRHTSFAAVAVIPILGDTTSRYQIKDSDLRIERFRSGGPGGQHANTTESAIRIVHIPTGISATSQNESDVLLLIEKCRSQHMNKASAMAVLQSRLDQLEIARQAQMNAEHTQSLNEISWGNQIRSYVLHPYRMVKDLRTNYEVSDPDSVLEGDLDDFILNYLSSSLDEADVST

SEQ ID NO: 13191 - protein, 492 aa, Zea mays
  VARIANT 351: note = Ancestral polymorphism is I, Derived polymorphism is S
MERAEEAQPAAERRAPSTAPSARVSIWESVRACGVWGKELDKAELRRQVVMPRYLRRAVAAAVKAKDEAAGVAVAAAAAEDRAGEDADGPAVAPVVVFVNSRSGGRHGPELKVRLHELITEEQVFDLSVVKPSDFVHHGLSCLERLADQGDNRAKAVREKMRIVVAGGDGTVGWVLGCLSDLYKMKREPVPPTGIIPLGTGNDLARSFGWGGSFPFGWRSAVKRYLSKASRSPICRLDSWQTVIQMPEGEIEELPYALKKVEPVDRLEISQENGTELSEKASFYKGVFYNYLSIGMDAQVAYGFHHLRDEKPYLAQGPVANKLIYAGYSCTQGWFCTPCTASPQLRGLKNILRLSIKKANCSEWEQVKMPSSVRSLVVLNLYNYGSGRHPWGDLRPEYLEKKGFVEAHSDDGLLEIFGLKEGWHASFVMAELIKAKHIAQAAAIKFEMRGGEWNRAYVQMDGEPWKQPLLQEHSTIVEINKVPYHSLMINGE

SEQ ID NO: 13192 - protein, 270 aa, Zea mays
  VARIANT 198..270: note = Derived polymorphism lacks residues 198 to 270
  VARIANT 195: note = Ancestral polymorphism is M, Derived polymorphism is I
  VARIANT 145: note = Ancestral polymorphism is G, Derived polymorphism is C
  VARIANT 1: note = Ancestral polymorphism is T, Derived polymorphism is M
MRNLTRPVHHSHSKDQDHILPLAMAAAAATATTTSPARASWRPTVPATSASAAGVCFRVGAKRFSPGLRTASTCRHRHRGRTRLTTAHVKSGEAEGRPSTEESATGIGGPDEDSLRRELETAIEEEDYARAAALRDELRVLQEDCRAAVLAANARFYAAFKDGDLAAMRRAWARGDHVYVVHPSAGRISGYEMVMQSWEMVCDAGYEFPLQVDLQDVEVRVRGGVGYVTCLEMVRTKGSSSWGKQLATNVFEEVDGEWLMCVHHASHFDE

SEQ ID NO: 13193 - protein, 188 aa, Zea mays
  VARIANT 51: note = Ancestral polymorphism is R, Derived polymorphism is C
  VARIANT 35: note = Ancestral polymorphism is G, Derived polymorphism is D
MRPLDEKETTQVFEKLFKFTGPNLKHLLERPAVEGPDAEPGRYCLRLHRNRVYYASEALVRRATAVSRPRLAGVGTPIGKFTHHGAFHLTVHALDLLAAHARRRVWLKPDTERSFLFGNSVPKSSLARITENTKAGDGVVVMSMADVPLGFGIAARSAQDCRKADTNAVVVLHQSDAGEYLRKEEELM

SEQ ID NO: 13194 - protein, 104 aa, Zea mays
  VARIANT 29: note = Ancestral polymorphism is N, Derived polymorphism is I
  VARIANT 63: note = Ancestral polymorphism is S, Derived polymorphism is P
  VARIANT 66: note = Ancestral polymorphism is L, Derived polymorphism is M
MEHGYHLGLRHNMLITRRLSQVTRINKGNLLCRMFCIRCLFILLAFISNFKMHSTNKITICMSTWLTLLLPMIEEMYSCYRENGCPQEKCRTLCIKGINKMLMG

SEQ ID NO: 13195 - protein, 502 aa, Zea mays
  VARIANT 7..502: note = Derived polymorphism lacks residues 7 to 502
MGALLPWLAWLLVSLVGVYLLGHLVQARRRRGLPPGPHPLPIIGSLHLLGNQPHRSLARLAKTHGPLVSLRLGSVTTVVASSPAAAREILQRHDAAFSNRSVPDAPGAHARNSTVWLPNAPRWRALRKIMGTQLFAPHRLDALQHLRRDKARELVDHVRRLARRGEPVNVGRVAFTTSLNLVSRTIFSRDLASLEDDGASRKFQEVVTDIMEAVGSPNVSDFFPALAVADLQGCRRRLARLFARLHRIFDEEIDARLRGRDAGEPKKNDFLDLLLDAAEDDDNTAGLDRDTLRSLFTDLFSAGSDTSSSSVEWAMVELLRSPGSMAKACDELATVIGPRKDIEESDIGRLPYLQAVVKETFRLHPAAPLLLPRRAQADVKMMGYVIPEGSRVFVNVWAMGRDEETWPEPEKFLPERFLGKKTQQAVDLRGGDFDLIPFGGGRRICPGMPLAIRMVHLLLASLLNQFAWRLPAELERNGVDMAENFGITLTKAVPLCAIATEI

SEQ ID NO: 13196 - protein, 232 aa, Zea mays
  VARIANT 66: note = Ancestral polymorphism is V, Derived polymorphism is I
  VARIANT 48: note = Ancestral polymorphism is R, Derived polymorphism is H
MARVYVGNLDSRVTSGELEDEFRVFGVLRRSLFFKLYSGALRTLPVIHIFMLDLVANCCSQCSVWIARKPPGFAFIDFDDRRDAEDAIRDLDGKNGWRVELSRNSSGRGGRDRYGGSESKCYECGETGHFARECRLRIGSGGLGSGRRRSRSRSRSRSRSRSRSRSRSPRYRRSPSYSRSRLKLITLLAGAIALVIALQGAVVLRQLARAAIAGHHSTTATSNGGRYWCSRS

SEQ ID NO: 13197 - protein, 215 aa, Zea mays
  VARIANT 145: note = Ancestral polymorphism is R, Derived polymorphism is C
  VARIANT 139: note = Ancestral polymorphism is A, Derived polymorphism is D
  VARIANT 108: note = Ancestral polymorphism is A, Derived polymorphism is D
  VARIANT 106: note = Ancestral polymorphism is R, Derived polymorphism is G
  VARIANT 98..215: note = Derived polymorphism lacks residues 98 to 215
  VARIANT 95: note = Ancestral polymorphism is T, Derived polymorphism is N
MASPPSIHGRSAPLRPKSRGWKAEEKAVSCGGGGASEIPELAVIRELHLRYPINQSVRQSGKSWGAMQASEQQQRRTLMLPSVYRAQYVTSTFPTRRQSLRSSSTRSASSSPPNSFMVLVIIPNILPFLWWVMSSANDASACPIRLWHRNLILDSIEGLQCRHRHSWKSSTDGHRAPRWAVLSTAARTACVGAILTPAPTSAPATQHADDTSSSL

SEQ ID NO: 13198 - protein, 851 aa, Zea mays
  VARIANT 87: note = Ancestral polymorphism is S, Derived polymorphism is L
  VARIANT 146: note = Ancestral polymorphism is W, Derived polymorphism is R
  VARIANT 147: note = Ancestral polymorphism is P, Derived polymorphism is S
  VARIANT 191: note = Ancestral polymorphism is D, Derived polymorphism is V
  VARIANT 215..851: note = Derived polymorphism lacks residues 215 to 851
  VARIANT 290: note = Ancestral polymorphism is V, Derived polymorphism is G
  VARIANT 296: note = Ancestral polymorphism is P, Derived polymorphism is L
  VARIANT 415..851: note = Derived polymorphism lacks residues 415 to 851
MPSISCHNLLDLAAADDVPLPSPTPLRLPRVMSVASPASPTSPPAPAPPRRVIVSHRLPLRASPDPAAPFGFAFSVDAGTVAYQLRSGLPANAPVLHIGTLPAAAAEAASDELSDYLLANFSCLPVYLPTDLHHRFYHGFCKHYLWPLLHYLLPLTPSSLGGLPFQRTLYHSFLSANRAFADRLTEVLCPDEDLVWIHDYHLLALPTFLRKRFPRAKVGFFLHSPFPSSEIFRTIPVRDDLVRALLNADLVGFHTFDYARHFLTACSRLLGLDYQSKRGYIGIEYYGRTVTVKILPVGIDMGQLRSVVSAPETEDAVRRVTEAYKGRRLMVGVDDVDLFKGIGLKFLAMEQLLVEHRELRGHAVLVQIANPARSEGRDVQGVQDEARAISARVNARFGTPGYTPIVLIDAPVTPQEKAAYYAAAECCVVSAVRDGLNRIPYIYTVCRQESTALGDDSPKRSVIVLSEFVGCSPSLSGAIRVNPWSVESVAEAMNAALRMPEAEQRLRHEKHYKYVSTHDVAYWARSFDSDLQRACKDHFSRRHWGIGFGMSFKVVALGPNFRRLSVEHIVPSYRRTDNRLILLDYDGTVMPENSIDRTPSSEVISVLNRLCEDPKNRVFIVSGRGKDELSRWFAPCEKLGIAAEHGYLTRWSRDAPWDTSGLAADFDWKKTAEPVMQLYTEATDGSYIEHKESAIVWHHHEADPDFGSCQAKELLDHLENVLANEPVVVKRGQHIVEVNPQGISKGVVVDSLLSSMVRTGKPPDFVLCIGDDRSDEDMFESIVCPASNSGVKLPASSEVFACTVGKKPSMARYYLDDTVDVVKMLDGLASAPSQQRSRPAVQLRVSFEGSL

SEQ ID NO: 13199 - protein, 91 aa, Zea mays
  VARIANT 64..91: note = Derived polymorphism lacks residues 64 to 91
  VARIANT 50: note = Ancestral polymorphism is R, Derived polymorphism is I
  VARIANT 17..91: note = Derived polymorphism lacks residues 17 to 91
MLRSLRLGRSAPLATLQKVETQQARTDCIVEILAPLQSRNKQDACPNPYREQLLDAVQRHFTAQPKQLDELQVIVGFMQAAKRMKTTMKVA

SEQ ID NO: 13200 - protein, 221 aa, Zea mays
  VARIANT 166: note = Ancestral polymorphism is R, Derived polymorphism is W
  VARIANT 136: note = Ancestral polymorphism is A, Derived polymorphism is V
  VARIANT 124: note = Ancestral polymorphism is S, Derived polymorphism is F
  VARIANT 123: note = Ancestral polymorphism is R, Derived polymorphism is W
  VARIANT 112: note = Ancestral polymorphism is R, Derived polymorphism is L
  VARIANT 72: note = Ancestral polymorphism is Q, Derived polymorphism is H
  VARIANT 42: note = Ancestral polymorphism is G, Derived polymorphism is D
  VARIANT 35: note = Ancestral polymorphism is S, Derived polymorphism is F
MAMMRGKKAAVMWGWSGSKVNGCKVGARALTDTPFAVLCGGGNSLPTTGADGSKRRVCYFYDAEVGNCYYEHCHPMKPHRIRMTHALLGRYGLLDQMQVFRPHPARDRDLCRFHADDYVSFLRSVTPETQQDQIRALKRFSVGEDCPHLRRSLQFLPDVRGGLRWRLEVSEDGRGAWHGGDDGRQGCDLAYDGIRAPKRDLRAWLAGGIRQARRVVWEREI

SEQ ID NO: 13201 - protein, 222 aa, Zea mays
  VARIANT 13: note = Ancestral polymorphism is R, Derived polymorphism is H
  VARIANT 25: note = Ancestral polymorphism is G, Derived polymorphism is E
  VARIANT 37: note = Ancestral polymorphism is A, Derived polymorphism is E
  VARIANT 38: note = Ancestral polymorphism is A, Derived polymorphism is T
  VARIANT 77: note = Ancestral polymorphism is L, Derived polymorphism is M
  VARIANT 107: note = Ancestral polymorphism is A, Derived polymorphism is V
  VARIANT 114: note = Ancestral polymorphism is R, Derived polymorphism is K
  VARIANT 195..222: note = Ancestral polymorphism lacks residues 195 to 222
MGAVLADAEALERADLILLRFGGDGPEEGDVIVGVEAAEVAVAGRVRAEHLHLVEEAVAAEQRVGHADAVRLHRVAMLVVAVAHLRVVEVADAALRPVRASGRQGVAAAAQHGKGCVSQGASTNFASINCSAQSIRCASASSHLAAWAFCVGAASSPTFASTPSPHHRSLFASHHRHVALKFKTCRVGRNGVLRLALSVSSLRWTSTARSSFSLIRCGAAPS

SEQ ID NO: 13202 - protein, 80 aa, Zea mays
  VARIANT 29: note = Ancestral polymorphism is T, Derived polymorphism is I
  VARIANT 19..80: note = Derived polymorphism lacks residues 19 to 80
MTIKNTLKDPHGVLKNWDQDSVDPCSWTIVSCSLENFVTGLEVPGQNLSGLLSPSIGNLTNLETILLQNNNITGLIPAEI

SEQ ID NO: 13203 - protein, 545 aa, Zea mays
  VARIANT 279: note = Ancestral polymorphism is E, Derived polymorphism is D
MAITAPTPDIRGERQSGQDVRTQNVMACGALSNIVKSSLGPVGLDKMLVDDIGDVTITNDGATILKMLEVEHPAAKVLVELAELQDREVGDGTTSVVIIAAELLKRANDLVKNKIHPTSIISGYRLAMREACKYVEEKLAVKVDKLGKDSLINSAKTSMSSKLINSDSDFFATLVVEAVQAVKITNAKGEVKYPIKSINILKAHGKSAKDSYLLNGYALNTGRAAQGMPTRVTPARIACLDFNLQKTKMQLGVQVLVTDPRELEKIRQRESDITKERIDKILKSGANVVLTTKGIDDMSLKYFVEAGAIAVRRVRKEDLRHVAKATGATMVSTFADMEGEETFDSSFLGHADEVVEERIADDDVILVKGTKNTSAVSIILRGANDFMLDEIDRSLHDALCIVKRTLESNMVVAGGGAVEAALSVYLENLATTLGSREQLAIAEFAESLLIIPKVLSVNAAKDATELVAKLRAYHHTAQTKADKQHYSSMGLDLSKGIIRNNLEYGVIEPSMSKVKIIQFATEAAITILRIDDMIKLTKEEGNEEE

SEQ ID NO: 13204 - protein, 513 aa, Zea mays
  VARIANT 226: note = Ancestral polymorphism is S, Derived polymorphism is T
  VARIANT 247: note = Ancestral polymorphism is F, Derived polymorphism is S
MMGQDGVGGGVIGALLYAALAVLALRLVLSYKSAAHAVRRAWRWADEWAQAYQYYEVPRLAVDGAENPLFRKAAAYVASLPSLEDADAACVLSSAAKSNDFALQLGPGHTARDAFLGARLAWTNAGGDGRLVLRVRRHDRTRVLRPYLQHLESVADEMEARRRELRVHANAGGGAPRWASAPFTHPATLDTVAMDPDLKARVRADLESFLKGRAYYHRLGRVWRRSYLLYGAPGTGKSTFAAAMARFLGYDVYDVDLSRGGCDDLRALLLDTAPRSLILVEDLDRYLRGGDGETAAARTARVLGFMDGLSSSCGEERVMVFTMSGGKDGVDPAVLRPGRLDVHIHFTMCDFEGFKALASNYLGLKDHKLYPQVEEGFHAGARLSPAELGEIMLANRGSASRALRTVISALQHVAPSPPPQRTVTAARPPRLTSRWSGHLDEASVATATSEASAAGQSPRGGGGFAKDAPIREIKKLYGLIKYRSRKDAGVVPVDDSAASPDGRDSDVSPEKDR

SEQ ID NO: 13205 - protein, 57 aa, Zea mays
  VARIANT 32: note = Ancestral polymorphism is Y, Derived polymorphism is H
MGAPPRPALLHALPLPCRLPSPNYCYHSFIYYAYTPTIQAPIHCLPVYGYSGGGGGG

SEQ ID NO: 13206 - protein, 538 aa, Zea mays
  VARIANT 348: note = Ancestral polymorphism is S, Derived polymorphism is Y
  VARIANT 362: note = Ancestral polymorphism is D, Derived polymorphism is H
MTTPSTAPAPLASLLRVSAAAVPVARRRPKSPAAAAAARWEGGGGRRRCRAAVVEEAGVLLPKEGEGEGEGEEAPDAAAGRYDWREEWYPLYLAKEVPDDAALPLTVFDRQLVLWRDAHGVLRCHEDRCPHRLAKLSEGQIVDGKLECLYHGWQFDGDGKCVKIPQLPEGAKIPRSACARNYEVRDSQGVVWVWMSDANPPDEGKLPWFEPYARAGFTDLSTVHELPYDHSILLENLMDPAHVPISHDRTDWTAKREDAQPLFFDVTERTPRGFAGYWGRTGTPHLRNLLRFEAPCVLTNTLEFADKDGREQCFSAHFLCRPAGQGKSMLLVRFGSTLRSPLAKVLPSWYFHQNACKVFEQDMGFLSSQNEVLLREKLPTRELYLNLRSSDTWVAEYRKWMDRAGHGMPYYFGHSTLSPPPVPAVVEQAPAGAVAGISASFPAKGGVGMVHAPNPTNRYFRHVVHCKGCRATVKKYTSLKTVFAALAAAALSAAILAATRQWKAVLVAASAVLAAASYACDAVLSLITTNFIRTHRRL

SEQ ID NO: 13207 - protein, 102 aa, Zea mays
  VARIANT 42: note = Ancestral polymorphism is S, Derived polymorphism is P
  VARIANT 64: note = Ancestral polymorphism is E, Derived polymorphism is K
MAAAPGAPEERLGVLTPQCLREKTGISEPRHAPVPEPNSPVSVGFLRSDRVISSLACFVFLRSEVHRDGNYHRAVNVWIYSESTGELLLQRRADCEELWPGQ

SEQ ID NO: 13208 - protein, 1768 aa, Zea mays
  VARIANT 504..1768: note = Derived polymorphism lacks residues 504 to 1768
  VARIANT 250..1768: note = Derived polymorphism lacks residues 250 to 1768
  VARIANT 243..1768: note = Derived polymorphism lacks residues 243 to 1768
MAPKAGKAKPKARGDRKKKEEKVLPTVLDVTVETPDYTLLTLKGISTDRILDIRKLLAVHVDTCHLTSFSLSHEVRGGQLKDTVEIAALKPCHLTIVEEDYTEELAVAHVRRLLDIVACTTVFGAKKPEPKPDAADAAAESAKAGSPSPGKTAPGGGEEPMYPPPKLEQFYDFFTFSHLTPPLHYIRRSSRPFVDDKREDDFFQIDVRVCNGKPVTIVASQEGFYPAGKRALISRSLVGLLQQTSRAFDGAYKALMKAFVEHNKFGNLPYGFRSNTWVAPPVVADSPSVFPPLPTEDETWGGSGGGQGRDGKHDHRPWVKEFAILAAMPCKTAEERQIRDRKAFLLHSLFVDVAVLKAVASIQQLISNHTSLHETENGTIGSVLHTEQVGDMKIMITKDKTDASSKLDVKLDGSQAPGMSSDELAQRNLLKGITADESATVHDTATLGVVIVKHCGYTAVVQVPVDTELPAASVAQQEIHIEDQPEGGSNALNVNSLRMLLHKSCAQAPGVQRLQTSDPQDNEATQTFVRKILTDSLQKLENEVPIVTRPIRWELGACWVQHLQNPTSEKTETKKSDETKDVPTVKGLGKQFGQLKEIKKKTDDKGGKGTYVKGNNSPNTDNGHTDNTASVKDDKDIILQRLLPEAAFQRLKESETGLHVKSLDELIEMSHKYYDDTALPKLVADFGSLELSPVDGRTLTDFMHTRGLQMRSLGRVVELSDKLPHIQSLCIHEMVVRAFKHIVRAVIAAVDDINDMADSVASCLNILLGPFLEENNDKDCGEDHNLRKRWLEVFLIKRFGWKWKDEYCLDLRKYAILRGLCHKVGLELITKDYDMDMPNPFRKSDIISVVPIYKHVACSSADGRTLLESSKTFLDKGKLEDAVSYGTKALAKLVAVCGPYHRMTAGAYSLLAVVLYHTGDFNQATIYQQKALDINERELGLDHPDTMKSYGDLAVFYYRLQHTELALKYVNRALYLLHLTCGPSHPNTAATYINVAMMEEGLGNVHVALRYLHEALKCNQRLLGADHIQTAASYHAIAIALSLMEAYSLSVQHEKTTLRILQAKLGSEDLRTQDASAWLEYFESKALEQQEAARNGTPKPDASIASRGHLSVSDLLDYINPDDELKAKEMQRKQVRAKVGSSIKGRTGQNQSELVDDEDQRSPAPNNDKNLLTENGNSGVKENGTFVEHVKDEISSDTAIHIPQDGFTEECTSDEGWQAAVPKGRSTGSRRTGAGTRRPNLAKINTSSLNSENGRYKGRGISNFSSPRVSPSEAAVSIGSRPLAKKLAKSSSFNSKAVSTAVSSNTGENSFNLNSKPASPAIATAAAKVIPSTTPSASQTVRKSLSYKEVAIAAPGTLAKASSDVHTEEKDTGDQGASPESSNSKSPKEINGHPSGEKDGAIEVSPQDDTSQVSKSPDGGKPEQTDVLIGSNQPDTVHKKSSDPAETSVAKDIDLPAPVISSGTQTEADTPNDEAPTAIEANDSSSNDDERDSGADTPEQLSSGGENEKSSLSESEKNDTPREGAKETTSKLSAAAAPFNPSSVPAFGSMAVPGFREHGGLLPSPANVPPMLSIPLRKHPHQSATARVPYGPRLAGGYNRSGHRGLRKKPVLTSGEAPTETNTSGPRIMNPNAPEFVPGQSRSPNGHPASPNGPLASPGGIPSSPQDLLSSPDSTLESPVTASPQVSECSQISPEGDVEGVGVKQNMDDTNHPESKDGEVEPEQTKAPEGTEEGAAVKDAAEELIAAEQPKSWADYSDGEVEVVEVAS

SEQ ID NO: 13209 - protein, 104 aa, Zea mays
  VARIANT 3: note = Ancestral polymorphism is T, Derived polymorphism is A
  VARIANT 4: note = Ancestral polymorphism is E, Derived polymorphism is Q
  VARIANT 45: note = Ancestral polymorphism is A, Derived polymorphism is D
  VARIANT 88: note = Ancestral polymorphism is T, Derived polymorphism is I
MATELTAAQLRAYDGTDPSKPIYVSVRGKVYDVTSGRGFYGPGGAYAVFAGREASRALGKMSKDEADVSGDLSGLTDKELGVLADWEIKFQAKYPVVARLAADA

SEQ ID NO: 13210 - protein, 211 aa, Zea mays
  VARIANT 97: note = Ancestral polymorphism is L, Derived polymorphism is F
  VARIANT 18: note = Ancestral polymorphism is R, Derived polymorphism is S
MEEPVPADPPRIFWKSRSSGSANGRSLQQEPDKDATEETNEQAQEEPMKTDDATDTAAAAAATAEPYPKANLSEKRKALFEPLEPINGKRGAAETLLPPPDFEPASYPKGWLVGKKRKLVNVDVVESMRRIAIQEMNRKDREINGLNEQLEEDSRVLELLQKQLADERRKRTEIEKENSMLHEQVTMLMNMLDENEGFDEDGEAPPPDSFD

SEQ ID NO: 13211 - protein, 317 aa, Zea mays
  VARIANT 270: note = Ancestral polymorphism is N, Derived polymorphism is K
  VARIANT 209: note = Ancestral polymorphism is I, Derived polymorphism is T
  VARIANT 108: note = Ancestral polymorphism is Q, Derived polymorphism is L
MVGVALAPAVSRVPCRPGASFHASRPSSSARLPARPRARARAPPERLVVVARYSSSYEVEGEEEEEDEEGLGGGGGWGRRDRGPDPDYDPALDIERIESSTVRLLDEQKRMVGVVSVSEAVQIADDNDLILAILSMDGDPPVLRLFDERDYKKHRYEQQKKKKIQQKRSVAKRMGLKELKMGYNIDIHDYSVRLKAAKKFLKAGDKVKIIVNLKGRENLYKKEAIELLRRFQNDVGELATEESKNFAERNIYLVLVPNKIAIQKEQDELNKKGAVREEKDQSDSDEPEENDQPDSDVPLTELLEESMEPEAEVSANV

SEQ ID NO: 13212 - protein, 442 aa, Zea mays
  VARIANT 374: note = Ancestral polymorphism is P, Derived polymorphism is A
MEVEILESCMVKPSDDIGTPPPPMHVVWLSNLDLLVARSHTPTVYVYRPSPDPDFFSPGVLSAALSKALVRFYPLAGRLAQDGAGRPQIHCTGEGALLVTARADATLQDIPGGFAPSDELRQMLVPSAADGEDRAGILAMFQVTSFKCGGVCVGAAIHHTAADGLAALDFVNTWAAIASKGVDEAAPAPRPWLDRTLLRARSPPDVRFDHSEYSPRGGGGPKTARVPFDSAILPMSKTQVDALRAGKKVSTFKAVVAHVWRCACIARGLAGDEDTRLYMTADARSRVRPPLPEGYLGNAIFRASAVATAGDVVSEQLDAVAGRVSGATARLDDEYVRSLVDYLEQVVGDVAGLRKGEWVMPETDLWVISWQGLPIYDADFGWGRPAFMGRACLQFSGLVYLVPGPDGDGRLDVVVAMEPKSLARFKELLYELKGAGVPCTAD

SEQ ID NO: 13213 - protein, 323 aa, Zea mays
  VARIANT 282: note = Ancestral polymorphism is R, Derived polymorphism is Q
MRSHTLSFQAGLVEPFSGTICLYNRDRREKLSEDFYFHILPIDMQDGSLDRRGVFSLDTHSPSVCLLIQLEKAATEEGGVTPSVYSHKEPVGHMLTQLTMADTSDVPIEDPLSILNSRTDDNHALELRDKELLVSELQNTLDQKSKQLGETEIKLSAMMDEVNSLKKELEQTRGLLDESQMNCAHLENCLHEAIEEARTNKCSADRRAVEYDALRSSALRIHGLFERLNNCITAPGVTGFAESLHSLAASLASSVKKDEADTTVQFQQCIKILADKVYLLTRQSAELLERYLAMQAVHGGITKELDEKKELIKNLYNKLQQEK

SEQ ID NO: 13214 - protein, 603 aa, Zea mays
  VARIANT 135..603: note = Derived polymorphism lacks residues 135 to 603
  VARIANT 89..603: note = Derived polymorphism lacks residues 89 to 603
  VARIANT 78..603: note = Derived polymorphism lacks residues 78 to 603
MATAAASTTTSAAVLAFRLLRRLPRRLSVSRAPPAALASSSSSSSRRLPSLARHPLGHRTRMGHTAAAAAAAAEPALGLTKPNAVEPPQVTFSAKDIEFSEWKGDILAVAVTEKDLSKDADSKFENAVLKKLDGQLGGLLSEAAAEEDFTGKTGQSVVLRLAGQGFKRVGLIGLGQSAPSTAAASRGLGESVASVAKAAQASSAAIVLASPSGIQEEFKLTAAAAVASGTVLGLYEDSRYKSESKKVHLKQVDIIGLGSGAEVDQKLKYANDLSSGVIFGRELVNSPANVLTPAVLAEEASKIASTYSDVFTATVLDVEKCKELKMGSYLGVAAASANPPHFIHLCYKPTDGNVKRKLAIVGKGLTFDSGGYNIKTGPGCSIELMKFDMGGSAAVFGAAKALGQIKPPGVEVHFIVAACENMISGTGMRPGDIVTASNGKTIEVNNTDAEGRLTLADALVYACNQGVEKVMKLHLEIIDLATLTGACVVALGPSIAGIFTPSDELAKEVAAASEVSGEKFWRLPLEESYWESMKSGVADMVNTGGRQGGSITAALFLKQFVDDKVQWMHIDMAGPVWSDKKRAATGFGVSTLVEWVLNNSSSS

SEQ ID NO: 13215 - protein, 394 aa, Zea mays
  VARIANT 262..394: note = Derived polymorphism lacks residues 262 to 394
  VARIANT 236: note = Ancestral polymorphism is R, Derived polymorphism is G
MDEGAEGAAPAVAVGHETLRQGGDGGEDGVGDSDDYAASCPPHPRFVHGLCSRCGAEKEEEDGGVAPPPGVAVGHETMRQGGDRDGDYYAASCPPHPGFVHGVWEAAGGDALPGVAVGYDVTNQGRGDEDDNSDEDEDDDTDTVVEYIHGEGPVLPVPAIEEAMSIVSASDRATLMRERKLILILDLDHTLLNSTSLYDLSPVEQAKGFTPYTFGDTSIDLFRVDIDNLSMLVKLGAFARGFLKQANALFEMHVYTLGIRAYARAAVRLLDPNGIYFGGRIVSRNESTKENTKSLDVIQGADPAMVVILDDTDGVWPGYPDNLILMDRYRYFASTCRTFDYDIPSLAEQGLEEREHDGSLAVVLGALQRIHQGFFDGHRADVREVIAKVRSQVC

SEQ ID NO: 13216 - protein, 523 aa, Zea mays
  VARIANT 399: note = Ancestral polymorphism is T, Derived polymorphism is M
  VARIANT 350: note = Ancestral polymorphism is E, Derived polymorphism is D
MVAMARKDEEEGPADRVPHLPWMRYPVDIDTFSGRPVTQLPRLDPRLVEALQRMGIESFFPVQEAAWLETIGPGAFERDICINSPTGSGKTLAYALPIVQMLCTRKVRCLRALVVLPTRDLALQVKEVFDAIAPVVGLSVGSAVGQSSIADEVSSLVQKPRQEFYPTIDKEYVQMEPRTKIDILVATPGRLMDHINMTNGFSLEHLQYLVIDETDRMLREAYQSWLPTVIQLTHSIGQDHSCHDIDGKTLLHPLTTIRRSGVERGFKSKCYPRLAKIVLSATLTQDPSKLSQLELHHPLLLNSGKKRYRIPTKLESYKLICKSNLKPLSLIVLLQELQGNKCLVFTSSVESSHRLSTLLRFFENLPFKFSEYSRLQRESTRRKTLEAFKEGKIDVLIGTDRMARGIHIDGLRYVINYDMPPYVKTYIHRAGRTARAGESGSCFTFLRKHEVKTFDKMLKKADNAGCNLHSLPEESIETLRPAFSGALRKLEGALESEAVKKYDLGDKTPGASKRKRPNQLCKQ

SEQ ID NO: 13217 - protein, 243 aa, Zea mays
  VARIANT 213: note = Ancestral polymorphism is S, Derived polymorphism is I
  VARIANT 196: note = Ancestral polymorphism is K, Derived polymorphism is N
  VARIANT 191: note = Ancestral polymorphism is R, Derived polymorphism is C
  VARIANT 148: note = Ancestral polymorphism is P, Derived polymorphism is L
  VARIANT 124: note = Ancestral polymorphism is R, Derived polymorphism is W
  VARIANT 92: note = Ancestral polymorphism is K, Derived polymorphism is M
  VARIANT 33: note = Ancestral polymorphism is P, Derived polymorphism is L
  VARIANT 28..243: note = Derived polymorphism lacks residues 28 to 243
MDEESKSTKVKLFISGVVHNKEDARTKSYVHVPAEINNMEKDSFELYIPGNGSGHDLPETKAAKQKVADMAAKLASELMPSDVAKALWGTTKSSSKINKEVQELLRLTLSKARVKLADNTFFNRIIMDTNSMDPFNGLYVGAFSPYGPEIVQLHWKFDHWNSSDDVEFFEYAEAVKLTGDLSVPAGQITFCAKIGKGKRLEIGARIQRNSIASYKGQGRIAQPGFKNPRWVDGELLVLNGKVD

SEQ ID NO: 13218 - protein, 450 aa, Zea mays
  VARIANT 290: note = Ancestral polymorphism is A, Derived polymorphism is V
  VARIANT 320: note = Ancestral polymorphism is R, Derived polymorphism is Q
MHVLCLLTSLFGKELSGVEQREARDPMAAAEGQWVLMATGRTPTNIAVIKYWGKRDEALILPINDSISVTLDPDHLSATTTVAVSPSFPSDRMWLNGKEISLLGGRFQSCLREIRKRARDFEDKEKGVKIKKEDWDKLHVHIASYNNFPTAAGLASSAAGLACFVFTLGKLMNAKEDYGELSSIARSGHVLGSGSACRSIYGGFVKWCMGEKDDGSDSIAVQLADETHWNDLVIIIAVVSSKQKETSSTSGMRDSVETSPLLQYRAQTVVPGRVLKMEEAIKNRDFESFAKLTCADSNQFHAVCLDTSPPIFYMNDTSHRIISLVEKWNHSEGTPQVAYTFDAGPNAVLIAQNRKTAAHLLQKLLYYFPPQDNDLSSYLVGDKSILGVAGLHSMKDVEALPAPPETKIPDQKFKGDVSYFICSRLGAGPKVVSDEGQALIDSVTGLPKGV

SEQ ID NO: 13219 - protein, 96 aa, Zea mays
  VARIANT 18: note = Ancestral polymorphism is E, Derived polymorphism is G
  VARIANT 20: note = Ancestral polymorphism is A, Derived polymorphism is D
  VARIANT 25..96: note = Derived polymorphism lacks residues 25 to 96
  VARIANT 64: note = Ancestral polymorphism is P, Derived polymorphism is L
  VARIANT 80: note = Ancestral polymorphism is G, Derived polymorphism is V
METETEAAAARRAKESLELAFQMSQILDTGLDRHTLSLLMALCDRGANPEALAALVRELSSAAPPTSAAASSPVSNGAAGPASAIAPTFSSGLRRP

SEQ ID NO: 13220 - protein, 79 aa, Zea mays
  VARIANT 30: note = Ancestral polymorphism is D, Derived polymorphism is E
MAMSDLTATVIPKPDGADDESVEIREVWADNLEEEFALIRDIVDEYPFVAMDTEFPGIVCRPDRKGGKCARRLTERSSM

SEQ ID NO: 13221 - protein, 616 aa, Zea mays
  VARIANT 476..616: note = Derived polymorphism lacks residues 476 to 616
  VARIANT 319..616: note = Derived polymorphism lacks residues 319 to 616
  VARIANT 188: note = Ancestral polymorphism is M, Derived polymorphism is R
  VARIANT 44..616: note = Derived polymorphism lacks residues 44 to 616
  VARIANT 36: note = Ancestral polymorphism is L, Derived polymorphism is P
MRPEERDAAVGRVRDQFPVGMRVLAVDDDPVCLKVLENLLRRCQYHVTTTNQAVVALSMLRQNRDLFDLVISDVHMPDMDGFKLLELVGLEMDLPVIMLSVNGETKTVMKGITHGACDYLLKPVRLEELRNIWQHVVRRKFSNCDRANNDGYEECNRPSNADFDLAHSQITAGPPDQKAVPKRILELMNVERLTRENKYRLYLKRLSAVASQQASIVAALGGNDPFMRMSAFEGLHGYQSFVSSAALPSFSPQGLLNRNNPASFAIQGVSASRPIQIATGNTTMSHSIGDPNDKYHLSLPGTSCLQGNLAQGLPTPVGQVQLPQKWIHEETDDLSTILSASGRANSGVPGTLQSVTNSHLLQQGFVERRQDKVVIQPSSSASSDRPEGTVGVSSSLMDSCATQQRVVPLSAFSSSASPMNGSFCSNGVAELGATSSGGTSIFPSNDLRIERDSKVGASSFGSVILLSPDTVPNQKYLNFGGGSDLRSNMEGGNAGNLLNPKLLWSCLPASQPPNLIGSHHPMSQRLNLGGSMVRQTTASASAAAPQTRIDMFISGDAPKSASDLSFPKVHSELSSSSCSFDGLLNSIIKVEKDDASFSDDLGCDLYSLGASSVNLR

SEQ ID NO: 13222 - protein, 1497 aa, Zea mays
  VARIANT 926..1497: note = Derived polymorphism lacks residues 926 to 1497
  VARIANT 104: note = Ancestral polymorphism is L, Derived polymorphism is S
  VARIANT 99..1497: note = Derived polymorphism lacks residues 99 to 1497
  VARIANT 53: note = Ancestral polymorphism is V, Derived polymorphism is I
  VARIANT 1: note = Ancestral polymorphism is M, Derived polymorphism is T
MGNKIARTTQASATEYYLHDLPSTYNLVLLDVVSRGRFLKSVRCKHDEGLLLVKVYFKRAGESIDLKEHERRLERIRNAFKGIEGSHVWPFQVWLQTDKAAYLLRQYFFSNLQDRLSTRPFLSQVAKKWLAFQLIHAVEQSHSKGICHGDIKCENVLVTSWNWLYLADFASFKPTYIPDDDPSDFSFYFDTGGRRRCYLAPERFYESGGESQVAADAPLQPSMDIFSLGCVLAELFLEGQPLFELSQLLAYRRGQYDPIHTLEKIQDTGIRDMILHMIQLDPKKRVPCRSYLQKYESVVFPFYFSKFLHKFFSDIVPLDSDARVEKTQENFGKIQEIMMGSSTIEQIERSTSCEHSEPSGRKGMEGEILNSPGNYRNSTSVFKKNTPVDHQHIIGDINFLLKEVEGRSNNTSTKVTKDTYHFVAPSITCANGVQSSHLVNPAGRQIGTGLMGHKHVVSHVKISKSNIRSLVATYDDQSDTYSFDIFQQTDSKVSCEGMVLLASLLCSCIRSVKKPELRRASLILLKFSSTYIDDDSRLQLVVPYVIAMLSDPSAIVRCAALETLCDVLCLVQDFPISDAVIFPEYILPMLSLLPDDTEESVRVCYASNIHKLALTAYRFLLRSRSIADIRPLDESVVAHRSQSADSPAKRQDNFFRQLAELRKSIYEIVQDLVMGQKQTPNTRRALLQDIGYLCYFFGHKQSNDFLLPILPAFLNDHDEQLRAVFFGQIVYVCYFIGARSVEEYLLPYLEQALSDDMEAVLVNALDCLTMMCRSGYLRKRVIVGLLVKILPLLRYPINWVKQSAVRFVAACSESLGSVDTYVYLSPHLRQFLHMEPPSLASETALLSCLKPPLPKSIFYEGLEHAQDIGDILLKSSGKKEQIVHGGRYPGTAQSGSLANLEDILRPKGPNISSSMSLYVKNSVSFEKSLYSGFALHASAANSSFYDGLSKGIPSYSFCTDNKRGLGETHMVPDSSVYKASIRLPWLEPNRPAMQTRDDHFSSTRQDFSINDSMKSNSSLQGDIIPNSDTGGLPFSRSAVNLETGWKPRGILVAHLQEHRSSVNDIAVSNDNTFFVTASDDSSIKIWDTRKLEKDIAFRSRLTYSMGNSRALCTTMVHGTSQVIVGASDGTLHLFSVDCARSVGTVVERYAGIVDVKRNEIKEDAILSVVNCSTDSFSPTVLFSTEHCGIHKWDTRTNSESWSFKSSPEEGYISALVVGPCGNWFISGSSRGVLTLWDNRFLVPVKSWNYSTLSPIEKLCLLIPPPSSISSAGRPLVFVAAGCNEVSLWNAENGNCHQVMKSFLISIYITRCAGRMFRTASTDNEAVMSKAPSRPVNKPVIKDIRRAGNYKYRIDELNDPPVRHPGIRSLLPLPGGDLLTGGTDLKIRYWDQARPEQSFCIAGPSAKEVRSAKGDILEKAVGNDESYDIRSSFGIQVVQEMYKQSSSVSGLTPKTQLAVAAADSAGCHRDAILALASFNLSSQRLVSGSRDGAVKVWK

SEQ ID NO: 13223 - protein, 51 aa, Zea mays
  VARIANT 17: note = Ancestral polymorphism is M, Derived polymorphism is T
MPSHKTFRIKKKLAKKMRQNRPIPYWIRMRTDNTIRYNAKRRHWRRTKLGF

SEQ ID NO: 13224 - protein, 470 aa, Zea mays
  VARIANT 110..470: note = Derived polymorphism lacks residues 110 to 470
MATAAAFSVSSPAASAVAARSKAELRAVPCRHSVFGGVNQARTRTGCRVGITRKNFGRVMMALAVDVSRFEGVPMAPPDPILGVSEAFKADKSELKLNLGVGAYRTEELQPYVLNVVKKAENLMLEKGENKEYLPIEGLAAFNKATAELLLGADNPVINQGLVATLQSLSGTGSLRLAAAFIQRYFPEAKVLISSPTWGNHKNIFNDARVPWSEYRYYDPKTVGLDFEGMIADIEAAPEGSFVLLHGCAHNPTGIDPTPEQWEKIADVIQEKKHMPFFDVAYQGFASGSLDEDAFSVRLFVKRGMEVFVAQSYSKNLGLYSERVGAINVVCSAPEVADRVKSQLKRLARPMYSNPPIHGAKIVANVVGDPTMFGEWKQEMELMAGRIKNVRQKLYDSLSAKDKSGKDWSFILRQIGMFSYTGLNKAQSDNMTDKWHIYMTKDGRISLAGLSLAKCDYLADAIIDSFHNVN

SEQ ID NO: 13225 - protein, 209 aa, Zea mays
  VARIANT 27: note = Ancestral polymorphism is A, Derived polymorphism is G
  VARIANT 143: note = Ancestral polymorphism is G, Derived polymorphism is V
MVIMAGMLPGVEFARRRRRASSLCLYAPSSKEWSSACMETTATATARAWTTLGLGSGAREAKERLDQKLRAQRQPVVLKRHEMSTSPTITKAHDDATCRCSGGLHRHHSSACSSDTGVLLRREVVSSPKPNKKGGGGGGGRFGWCRLLAGGRRGPPAAAEAGCAVCLEELRAGDVVARLPCAHRFHWSCAVPWVQAASRCPVCRAHARV

SEQ ID NO: 13226 - protein, 653 aa, Zea mays
  VARIANT 22: note = Ancestral polymorphism is E, Derived polymorphism is D
  VARIANT 198: note = Ancestral polymorphism is E, Derived polymorphism is G
MDSSSATAATVAPVVTSAPPLEDCLRLLRGERDEQKLAGLLVAANVCRAGDADAVANVYRAVGPRFLRRLLNTGLGKVEGGKEEEREAYMRLAVTVLAGLARVPEVAADEGVVSTVPLVAEVVAKSTDPAITEECFELLSLIAIASEDGAYEFCEPGVIDMIFLQILSLTDGSKCVELAINLLQLLVHKLKVDTMSSEKLQGMTRMVTCLARIFAVLHTAVKFDALHMLTFLLSQKESGEGLFCSPPMAQNSQSTSCAEWAVAVVFGSTLPKSHGAECFQIGVSSEKLHALLLAECMMSILGEDWLSEDFEVQDNQNVLSVDKFVLLVLESARVEVAVLLNELAYLKYESSKISQTDEAISQKQRNLAILFSLIERIIKMISNASSGEGAPIHTIRESTIMQAITGLNETINLVLDFLQDAKDHGQWKGDDLLAAARIVGSYLAEAPYACKEKTGNLLEFIFSIEGQDESSSFYSICFMLPMLSQITMEVDGCRTLASFGGHKAVIDCLVKMTEQGGMTIDNGSMFLACDTIINFMSNMKSVHIPVDYCFIRLLKALVTWAGTTDASSVTMTASCLCVMLLDMTSEKFLLSCSHFDANILGSLSEIIIRSLQQDIPDDDSEQFKQKQIIVSGYKRWADRFPRVKDVVEQHVSV

SEQ ID NO: 13227 - protein, 162 aa, Zea mays
  VARIANT 70: note = Ancestral polymorphism is A, Derived polymorphism is S
  VARIANT 63: note = Ancestral polymorphism is G, Derived polymorphism is R
  VARIANT 35: note = Ancestral polymorphism is D, Derived polymorphism is Y
MDDGDWITARYLLSSILGRNPLVVDYVDEESFPVDLPPPPAPSPSSSGGRRAEPPPPVRAPAGVAGTVCAVCTEEIAAADPVARLPCAHWYHHGCIAPWLGIRPTCPMCRAELPPREADAGEDGPARAKPPPAGTSAGATVAAARARRDAPYELLAGGVLSG

SEQ ID NO: 13228 - protein, 340 aa, Zea mays
  VARIANT 19: note = Ancestral polymorphism is F, Derived polymorphism is S
MASTESYIVLVLWLSCLSFSLGSDPLDNVQMERVCENTVAVDFKQTKLNNFVPFIRSGEWSDIGGRDYMEDAHVCISDLAKNFGYDSVEDEVISFYGVFDGHNGKDAAHYVRDNLPRVIVEDADFPLELEKVVKRGLSSGTTALTAMIFGRSLLVANAGDCRAVLSRRGTAIEMSKDHRPCCMNERKRVESLGGYVDDGYLNGQLAVTRALGDWHLDGMKEVGEPGGPLSAEPELKMVTLTKDDEFLIIGSDGIWDFFSSQNAVDFARRRLQDHNDLRLCCREMVDEAVRRGASDNLTAVMVSFHPDAPPPSRANKRTGRVTRSISAEGLHSLRVLLEGQ

SEQ ID NO: 13229 - protein, 100 aa, Zea mays
  VARIANT 62..100: note = Derived polymorphism lacks residues 62 to 100
MRTTTSLPSAAAAATVLMLLLLTAAVEVEAIRPLEAVKPQQQANVAINVVSGPPAAFSSPAKRSVSVDGQEVVKATLTAHKLPGFHEDYYGASVHEPRHH

SEQ ID NO: 13230 - protein, 116 aa, Zea mays
  VARIANT 6..116: note = Derived polymorphism lacks residues 6 to 116
MASAPCSNSSPAARAPRSAAAGNKKPTTCLCSPTSHPGSFRCSRHRNGAAAPGGEAAHGASRGGTAGRAAKGRSVRALLLQRIGGGPSELGGRRRRCRRGVGDFQPRPSRLRLMNQ

SEQ ID NO: 13231 - protein, 439 aa, Zea mays
  VARIANT 386: note = Ancestral polymorphism is P, Derived polymorphism is S
MAALCSASPAISAAASLGSPARVVASFLRLRLRLRAAKRSCSHAPAPSWRARRRFAAAAAEAEECSGVETLIPPDNRIPATIITGFLGSGKTTLLNHILTAHHGKRIAVIENEFGEVDIDGSLVAAQTAGAEDIMMLNNGCLCCTVRGDLVRMIGELVNKKKGRFDHIVIETTGLANPAPIIQTFYAEDVVFNDVKLDGVVTLVDAKHARQHLDEVKPKGIVNEAVQQIAYADRIIVNKIDLVKEPEVLSLVERIRGINHMANLKRAEYGKVDLDYVLGIGGFDLESYQFRTVGIKEIHSGYRIESAVAEKSHEDHAEHDHEHHEHENEHDHDHHHHHDHDHDHHAHDHTHDPGVSSADMWLGNLLLEHSEDIYRMKGLLSVSGMPQRFVFQGVHDIFQGSPERMWEPNEPRINKIVFIGRNLNKEELDKGFKDCLLKK

SEQ ID NO: 13232 - protein, 47 aa, Zea mays
  VARIANT 20: note = Ancestral polymorphism is G, Derived polymorphism is S
  VARIANT 7: note = Ancestral polymorphism is R, Derived polymorphism is H
MNLAFDRELIGPAMYFGLMGDGQPIGLVLQPFDWIKKTFFEKPQPEA

SEQ ID NO: 13233 - protein, 173 aa, Zea mays
  VARIANT 20: note = Ancestral polymorphism is G, Derived polymorphism is D
  VARIANT 90: note = Ancestral polymorphism is S, Derived polymorphism is F
MASGSMKREISETHDTLRFGLNAGVKADLAPPHPLQSSIQSEAKFWADKKKFGTEAIYGSALNIRKDLDAQILSRIAIFTDKILYTVSAFGVSLLPCVPVLELETSSWFQRPPGALPSSLLGYEALTGSLDDFGFEDYLNMPQDSEGFRQPDMHHGMEVRLGLSKGPICPSFS

SEQ ID NO: 13234 - protein, 318 aa, Zea mays
  VARIANT 181: note = Ancestral polymorphism is K, Derived polymorphism is T
  VARIANT 170: note = Ancestral polymorphism is G, Derived polymorphism is S
  VARIANT 165: note = Ancestral polymorphism is A, Derived polymorphism is V
MGKASKDKRDIYYRKAKEEGWRARSAFKLLQIDQEFNIFHGVKHVVDLCAAPGSWSQVLSRNLYVPAKQSSDCKEGDLPLIVAIDLQPMAPIEGVIQVQGDITNARTADVVIRHFDGCKADLVVCDGAPDVTGLHDMDEFVQSQLILAALAIVTHVLKVGGKFVAKIFRGKDTSLLYCQLKLFFSQVTFAKPKSSRNSSIEAFAVCENYSPPEGFKEEDLYHLLEKVGTPSGAGDLDCRSGWLEGPNKVYIPFLACGDLSGYDSDRSYPLPSSTDGGSYRSLDPVQPPIAPPYKTALQMKKASSHGAGADAIKPSADS

SEQ ID NO: 13235 - protein, 525 aa, Zea mays
  VARIANT 204: note = Ancestral polymorphism is S, Derived polymorphism is N
MAASMASPRGRSIRETVLETVAAYHQQQRAKGKLRKSLTYAGGELSSAGRARGDGPASTSVSSLCGPDDDDEPFWEEEEGTVELVQLGANRAKNVLILMSDTGGGHRASAEAIKDAFRIEFGDEYRVGGCARALSLCSFITRAVLLHHGLSSTADFVITINRLVCQVFVKDLCKDHAGWPLNNMESSYKFMVKHVQLWKVAFHSTSPRWVHNFYLAALASFYAKKVEAGLKKYKPDIIISVHPLMQHIPLWVLKWQGLQNRVVFVTVITDLNTCHPTWYIQLMIRKTYSKAICSLDLTIRRKKRRFHADDDLRRELELDPELPAVLLMGGGEGMGPVKKTARALGESLFDKELGKPIGQLIVICGRNKTLSSSLQAVEWKIPVKVRGFETQMEKWMGACDCIITKAGPGTIAEALIRGLPIILNDFIPGQEVGNVPYVVDNGAGVFSKSPKETASLVARWFGPDSEELKKMSEKALKLAQPEAVFDIVKDMHELSQEQGVISQISSSLTSSFFLPSPESTPLQLI

SEQ ID NO: 13236 - protein, 403 aa, Zea mays
  VARIANT 371: note = Ancestral polymorphism is E, Derived polymorphism is G
  VARIANT 322: note = Ancestral polymorphism is P, Derived polymorphism is A
  VARIANT 187: note = Ancestral polymorphism is P, Derived polymorphism is L
  VARIANT 166: note = Ancestral polymorphism is G, Derived polymorphism is A
  VARIANT 130: note = Ancestral polymorphism is A, Derived polymorphism is T
  VARIANT 106: note = Ancestral polymorphism is I, Derived polymorphism is N
  VARIANT 53: note = Ancestral polymorphism is A, Derived polymorphism is V
MEEEEGFLHVLRALRDAARRVEAGETRGPALQALLALEAGADDLLAGDPDLTALRRLLCRLRALSCSLDLCASGSLRARCGARRAVARVAGAVAGEIQAWVDREAIARLVAALSSHGLGGARALLAELEARLLSAGGRFDPRLQRALLRHGVLQALEARLGDPAVGDGCAAAVLALVRFNKDVFVGPVLMGPAVGALVASASGSPAPLRALNGLVDAIRSPLVDELHARGELPRLVALLCAPDPRAHGPALGFALRVGYYGRKEVVDALLAEGLVKRLLCLQRSDLGGSLADTDEGEDEEGCPKAKPEDAKTGGFLLVPCLPLVYLWGRRQGDSAADADADTEERPFVSAVARFAVQVEVGVGLSPREKREAKLEILRRVREAAVSPAEEATVLAEVLWGATP

SEQ ID NO: 13237 - protein, 62 aa, Zea mays
  VARIANT 43: note = Ancestral polymorphism is R, Derived polymorphism is S
  VARIANT 15: note = Ancestral polymorphism is R, Derived polymorphism is S
MGKVHGSLARAGKVRGQTPKVAKQDKKKKPRGRAHKRMQYNRRFVTAVVGFGKKRGPNSSEK

SEQ ID NO: 13238 - protein, 293 aa, Zea mays
  VARIANT 69: note = Ancestral polymorphism is T, Derived polymorphism is A
  VARIANT 141: note = Ancestral polymorphism is A, Derived polymorphism is V
MPRPEFQAPPDVFYNESEARKYTTSSRIIEIQSRISERALELLALPNDGVPKLLLDIGCGSGLSGETLTEHGHHWIGYDISKSMLDVALERETEGDLLLADMGQGLGLRPGVIDGAISISAIQWLCNADKSSHDPRLRLKAFFGSLYRCLARGARAVLQFYADNVKQSEMIVTFAMRAGFAGGVVVDWPHSSKAKKSYLVLTCGPPSVTTSLPKGKGENGEGCSDDDDNESSGEDGDRTVGIYERNRPKKRQKTKKNGKGKDWLLRKKEQMRRRGHDVPADTKYTGRKRKGYF

SEQ ID NO: 13239 - protein, 91 aa, Zea mays
  VARIANT 50: note = Ancestral polymorphism is I, Derived polymorphism is K
  VARIANT 24: note = Ancestral polymorphism is R, Derived polymorphism is C
  VARIANT 23: note = Ancestral polymorphism is E, Derived polymorphism is G
  VARIANT 3: note = Ancestral polymorphism is S, Derived polymorphism is L
MASLSCASTLPWTPASYPRPSAGRCLTASRRAPSLVIVAQGKVKKYRQVILTDDIEEVGKKGDTLKVRAGFYRNFLLPKGKATLLTPEVLK

SEQ ID NO: 13240 - protein, 569 aa, Zea mays
  VARIANT 388: note = Ancestral polymorphism is V, Derived polymorphism is G
MFTSWSWRRTSDISCAVTMTGGPTLFYPPPCLLPSIPKNCPPLARHGPCIPITICRADQRHQNPQGSLMAPTSMLPFAPSNTSLPYSSRATTAAAFAPRGLHHAAAGRSGGGQRLACAAPRRRRGGGLVVRASADYYATLGVPRAASNRDIKAAYRKLARQYHPDVNKEPGATEKFKEISAAYEVLSDEKKRALYDQYGEAGVKSAVGGSGGAYTTNPFDLFETFFGASMGGFSGMDQSAFRTSRRSTAIQGEDIRYDVILGFTEAIFGTEKDIILSHLETCDTCGGSGSKAGSKMRICSTCGGRGQVMRTEQTPFGLFSQVSICPTCAGEGEVISEYCRKCSGEGRIRVRKEIKVKIPPGVSKGSTLRVRGEGDAGPKGGPPGDLFVCLDIEEPSDIKRDGINLYSTVSISYLEAILGTVMQVCVTVPFNFFHEQVRTVDGTSDLRIPPGIQPGDVIVLAKQGVPSLNKPSIRGDHLFTVKVAIPKRISGRERELLEELASLSNGRFARTDTKPKPAQPKAIHQEKEVGASQEDTSKSKEAEGDWLKKLTDFAGSIVNGAAKWLNDNL

SEQ ID NO: 13241 - protein, 206 aa, Zea mays
  VARIANT 48: note = Ancestral polymorphism is R, Derived polymorphism is C
  VARIANT 196: note = Ancestral polymorphism is A, Derived polymorphism is S
MELELGLAPPSARRPTPMTIDQQQQQQRHLAEDELSSTSSDHHPCAARSGKRGFAEAFQETAAAATTTTLPLFDDGSSCGGRSGGGKRPLVGWPPLSSARSRACGGGAAKYVKVKKEGDAIGRKVDLSLHASYDELLATLARMFPTNNGSQDDKEISSKSTAAATTTTSHRDVVVTYEDGEGDWMLLGDVPWDDFARSVKRLKLLG

SEQ ID NO: 13242 - protein, 263 aa, Zea mays
  VARIANT 32: note = Ancestral polymorphism is G, Derived polymorphism is C
MLELRLVQGSLLKKVLEAIRELVNDANFDCSGTGFSLQAMDSSHVALVALLLRAEGFEHYRCDRNLSMGMNLNNMAKMLRCAGNDDIITIKADDGSDTVTFMFESPKQDKIADFEMKLMDIDSEHLGIPDSEYQAIVRMPSSEFMRICKDLSSIGDTVVISVTKEGVKFSTSGEIGSANIVCRQNQTIDKPEEATIIEMQEPVSLTFALRYMNSFTKASSLSEQVTISLSSELPVVVEYKIAEMGYIRFYLAPKIEDDEEMKP

SEQ ID NO: 13243 - protein, 330 aa, Zea mays
  VARIANT 134: note = Ancestral polymorphism is P, Derived polymorphism is L
MLAAARAKLLCCAVGGGGGSGSGTAAGAVMDAQQQLDLVMRHQSMATVCESEDALGSSESDPARPARPRGKRSRAAEVHNLSEKRRRSRINEKMKALQTLIPNSSKTDKASMLDDAIEYLKHLQLQVQVTKLTPHCSPISACFPSFFLQMLSMRNGLYLPPGNLSGAPETLAPLEMCAALNQSGAKASNSGVVVLPGNKIPVARLLLDPPNHDQRHENPLVLQSVPSSSTAVEPRFLQQPAQPNLQSFQLAVPPEMIFDEADMMLKHRLASGRETTSLPVGHEAKPGRQEACMVNSDISNRGSLGKEVFMPYLHSLQSGDTEGGLRAGSN

SEQ ID NO: 13244 - protein, 374 aa, Zea mays
  VARIANT 207..374: note = Derived polymorphism lacks residues 207 to 374
  VARIANT 302: note = Ancestral polymorphism is A, Derived polymorphism is V
MAHASTGSSNGNAIAGGVSIYACFALGSSNSLECYEPGANTWRRVGALPGVPDGHILKGFAVAALGESVYVIGGRLCRRERGAAAGECQDTDVAVRADVLRYDARRGEWHHCAPLLVPRFDFACAPCRGRICVAGGQCSLSGARGTAAAEVYDAEKGQWSALPDMSTLRYRCVGVTWQGSFHVVGGFAETTLTAASSDASVATTVLQSSALERSSAEVFHCARGTWEILPGMWQLDVPPNQIVAVADRLFSSGDCLNCWKGHVEVYDGELNIWSIMDHSALPDLSLLASLPSSAQRLYLTMAAVGTQLYFLAGYQVPSADDSFRTVSLVHSFDTGAAPGLVPAWRSFRPEMSQEDAEVGGKELFSQCCSVQLSS

SEQ ID NO: 13245 - protein, 340 aa, Zea mays
  VARIANT 81: note = Ancestral polymorphism is S, Derived polymorphism is Y
  VARIANT 108..340: note = Derived polymorphism lacks residues 108 to 340
  VARIANT 203: note = Ancestral polymorphism is R, Derived polymorphism is H
  VARIANT 215: note = Ancestral polymorphism is L, Derived polymorphism is S
  VARIANT 273: note = Ancestral polymorphism is T, Derived polymorphism is I
  VARIANT 313: note = Ancestral polymorphism is K, Derived polymorphism is M
MRMRAVVITCAGGPEVLEAREVEDHPALGEGEVLLEVAAAGVNRADTVQRMGRYPPPAGASPYPGLECSGTILALGPNVPSRWAVGDKVCALLSGGGYADKVVAPAGQLLPIPEGVSLTHAAGLPEVACTVWSTVFMTSHLSPGESFLIHGGSSGIGTFAIQIAKHLGIKVFVTAGSEEKLAACKALGADVCINYRTEDFVERIKQETNGKGTTSMLSFLAASVDVILDNIGGSYLQRNLNSLGVDGRLFIIGFQGGIAAEVNLQAVLARRLTIQAAGLRNRSLANKAEIVSEVEKNVWPAVAAGKVKPVIYKTFPLCEAAEAHRLMEASTHIGKILLLP

SEQ ID NO: 13246 - protein, 932 aa, Zea mays
  VARIANT 603: note = Ancestral polymorphism is N, Derived polymorphism is Y
MGVTRAHIVRGDSLEGMLGEYGGGKGGGGKPARGGGTVRNTSRLVAALTCLQFAFAIYATFLLYYMSPAVDLRVNVKPDLAWATRIAQHWKQLIAAQPGAGALSPEEACEHESIDFEQKKSTDEVMIRLKRELYDDVLAFQRRSLGAETLPELLRMRSRWAAPGSGPNADADANVPRVTVILNHFKRRTLCAQLDQLRRQTLPFHRAWVLSFGSPNEASLRRIVESYNDSRVSFVASGYDFKYYGRFQMALQSESDFVYVLDDDMIPGARMLEILCHVAGTDKYGSAVLGSIGRILPFRQKDFTFPSYRKFRSKEAGLYLPDPAYNITVDRIVQVDFLSSSWFLPADLVKTLFIETPFTFMTGEDLHLSYQLQKYMGAGSFVLPVDPNDKETWGDSEHRLAYVSETTVIFKDIVQVRDEQWWRALTSGYVTQWAAMHPQKVDALFYAHSLGEVRALAPLLERFRTTPGRKAYLVVSGGGHCPCEEAATVLKWPKVVCRDRRFKIFDLGIGALSGPSRSEVPVLQAVYASMRGIVQMHNPSVVVALADIDDKVKEALRMAAAAATVNRTALVLVPRSSVSKVLWMATLKPASLPNWNRMRISVNIITQNRAKSLLRLLTSLRSAYYLGDEVPISFNMDSRVDAATLKVVNSFDWPHGPKTLRRRIIQGGLIRAVSESWYPSSDDDYGLLLEDDIEVSPYYYLWIKYALLAYRYDPGVSLPELSSISLYTPRLVEVVKERPKWNATEFFKKVHPNTPYLHQLPCSWGAVFFPKHWREFYAYMAARFTEDAKQNPVQIPRSRTNGWQASWKKFLIDMMYLRGYVSLYPNFPNQTSFSTNHMEPGAHISAKGNVLKHDKTDFEVPLVADDFSVLLPAGKMPPASKLPVVNLFNQAVSLKGLKAAGAKLGQDVFECTAKELVAVDRITGLPTNCTAF

SEQ ID NO: 13247 - protein, 1700 aa, Zea mays
  VARIANT 1444..1700: note = Derived polymorphism lacks residues 1444 to 1700
  VARIANT 1389..1700: note = Derived polymorphism lacks residues 1389 to 1700
MVAARGARSGGSVAAAALVSVLLVGCLVAGGQGAEIRRQKNVQAALRAKWAGTPLLLEASELLSTEWKDLFWDFIDLWKDLEKGSECLTAKCCAQKIVEDAHILLNEPLSSIFEFSLTLRSASPKLVLYRQLAKESLSSFPIDDSPENISGHGTGKTFDGAVDPGSSGGTCCWVDTGNVLLFNSADLHEWLGGLGKLAMDSTEQPELFEFDHIYRRTNITAPVAIFYGAVGTKCFKELHVQLVEASKQILHANFIWLLAIKDFKSISRVESTRYALRPVLPSGCETTSTFCGSVGAVDAVTLSGYGVELALKNMEYKAMDDTAIKKGVPLEDPKTEDLSQEVRGFIFSKILERKPELNAEIMAFRDYLLSSAVSDTLEVWELKDLGHQTAQRIVQASDPLQSMQEINQNFPSIVSSLSRMKLDDSIKDEIIANQRMVPPGKSLMALNGALINIEDLDLYLLMDMVHGELSLADQFVRLKLPQSAVLKILSAPPPAESNSFRVDFRSSHVHYLNNLEEDAMYRRWRSNIQELLMPVFPGQMRYIRKNLFHSVYVLDPASACGSDGTLTNNDGEDTSILITRLFLYIKETYSTQLAFQFLGNIHKSRNGEDDYNEELVEAHHVEGAFVDSLLSTAKSHPQDVLLKLQKENMYKQEAEESSHFVHKLGLYRLQCCLLMNGLVHEASEEATMNAMNDELPRIQEQVYYGHIQSHTDILEKFLSENSYKRYNPSITGKNAEKKFVSLFASYHQDSFIFNDMKYLQSPGTTDDAKPVTHLLAIDLSSKVGTKLLYEAILYLMDGSDRARVGLLLYVHTGGSSPILLLKDIFDRTISSFSYKEKVLVFLHGLLKFYDAQPLPASSVADDWTRTMMEKVYTLAAETALPVDDYKAWFKSFSADTVLKGMDKLSDFLFGQLGLVFGSNAVITNGRVFIMNEGKSFLANDLGLLESMEYDLRTKYIFEIIEEVEFASVDPDDLTNQFYSDIAMLISSSMSVRERTSERAHFEILHAEHSAIKLNNANSSIHIDAVIDPLSPTGQKLAPLLRILWKQIQPSMRIVLNPISSLADLPLKNFYRFVLPSMDDFSSTDHSVHGPKAFFANMPLSKTLTMNIDVPEPWLVESVIAIHDLDNILLENLGDVRTLQAVFELEALLLTGHCMEKDRDPPRGLQFILGTKQRPHLVDTLVMANLGYWQMKVSPGVWYLQLAPGRSADLYELPPKLIAIDSLRGKLMHIEVQKKKGKEHEDLLNAADDYHFQEKTDNKGWNKNLLKWASSLITGDASSKSKADKTTRRPARSEEGRRPTADEQDTRGKAQRQGLALAWADLSRRGLGGATRKEMERWLMGSGHHAVVEEGGPWPRLRASAGRGGCAAREQRRYERFLKIMILSVLKKTQRPVKFWFIKNYLSPQFKDVIPHMAREYEFEYELVTYKWPTWLHKQKEKQRIIWAYKILFLDVIFPLSLRKVIFVDADQIVRADMGELYDMNLKGRPLAYTPFCDNNKDMDGFRFWKQFFVDTFFYPLKGFWKDHLRGRPYHISALYVVDLAKFRQTASGDTLRVFYEQLSKDPNSLSNLDQMSCIETLSVIYRVQKLGDKTPGQIHMDLPNYAQHTVPIFSLPQEWLWCESWCGNATKARAKTIDLCNNPMTKEPKLQGARRIVPEWTGLDSEARQFTARILGDDVEPADATPPPSEAPKPEDDQDVKDEL

SEQ ID NO: 13248 - protein, 739 aa, Zea mays
  VARIANT 637..739: note = Derived polymorphism lacks residues 637 to 739
MESRWRRAKMSLGLNLCVYVPRTLEGDDAASPSTASSTAALVSPVASSSSAATSTDTTPTAAASNGKANGAAAAAAALMPTTPTPTSAGLRLSKSGSKSFKKTCAICLTTMKPGQGHALFTAECSHTFHFHCISANVKHGSSSCPVCRIKWKELPFRGPLPAELPQGNARINPVHGYQNGGHMTIPRPLPLPRARSFGRLHHLATLLPDADPGTFNDDEPLDLSCEEANGTQQGCLRTVEIKAYPEFTQVPENTSERNFTVLVHLKAPPAQHLLQSSSDLGDGNGVSTTRAPVDLITVLDVSGSMAGTKLALLKRAMGFVIQNLGSSDRLSVIAFSSSARRLFPLRRMTESGRQQSLLAVNSLTANGGTNIAEGLRKGSKVIEERQSKNPVCSIILLSDGQDTYTVSPTAGVHKGATEYCALLPSTTTNGSQQVPVHVFGFGADHDSVSLHSISQTSGGTFSFIETEATIQDAFAQCIGGLLSVVAQGLHVKVESLHPDVHFGSIRSGSYSSRVSDDSRNGSVDVGDLYAEEERDFLVSVNVPPGCGETALLKVGCVYKDPLMKETVNMSGVQVKISRPAFVSAQSVSVEVDRQKNRLHAAEVMAEARLSAERGDLANAVSLLEDCRRMITGSASGQSGDRLCQALDAELKEMQDRMASRQRYEASGRAYVLSGLSSHSWQRATARGDSTDSASLVQAYQTSSMVDMLLRSQTMSRPSTPRPAPQIRHAKSFPARPQPR

SEQ ID NO: 13249 - protein, 292 aa, Zea mays
  VARIANT 19: note = Ancestral polymorphism is R, Derived polymorphism is W
  VARIANT 73: note = Ancestral polymorphism is L, Derived polymorphism is M
  VARIANT 111: note = Ancestral polymorphism is L, Derived polymorphism is M
  VARIANT 113: note = Ancestral polymorphism is I, Derived polymorphism is T
  VARIANT 190: note = Ancestral polymorphism is G, Derived polymorphism is A
  VARIANT 197: note = Ancestral polymorphism is L, Derived polymorphism is F
METPRLVVGRRRGATPRFRRRRLPHPRGGAHCFPFARARPPVLITRCFYFPSSSCVRIPHPAPLRAATLSQLLRTRVRVCVAVPQLFRSSHSCFRVGNTAILEAPVTSDILCINKQRLMAMGEPKKLQDENNLLLEEIRVLQTEIKGIPLESTQFNSGSHTCVLVTLFLPMLDSYMAISTRDIFLLILDGCSKLDILLKMKAIKYGSVPVQISFPSDESRESEEHDWHNTALSQYIISTYGDPSLSQVLDDFNNDPLHCQTSPEKQPPVAGELTLLVTEKTHAHTRTQVGTL

SEQ ID NO: 13250 - protein, 767 aa, Zea mays
  VARIANT 434..767: note = Derived polymorphism lacks residues 434 to 767
  VARIANT 50: note = Ancestral polymorphism is G, Derived polymorphism is S
  VARIANT 31..767: note = Derived polymorphism lacks residues 31 to 767
MASNTLRFLQAIAPIVLLARLAQASAQPQRQPSQLLPPGVARPGCRDRCGNITIPYPFGIGAGCYREEYGFELLCDDARSPPRLTISGGYQLASLSLSAGEVRIYLNATRKCYNVTTGAFVDRNDDASLALGSASPYRVSPTKTRLVATGCPTIGYFVDGAGYFVSGCTSVCRPAQYAVEGQGPCTGVGCCQSAIPSDIYYYEPNTLSLQLQAGKLDPILGANVTTCQYVFLADADWFSYTDSVFFNRTDDFAAPVVFDWAVRNVGNCSAAKLNMTDYACRSRDSECVPSSNGAGYRCNCSQGYEGNPYLDGGCRDIDECLRPDEYQCYGNCTNLPGHYICKCRPGTDGDPRQRNGCRPKDKFTPALKVVTGVSVGVFLSVFMCFWLYLGLQKRKLIRTKQRFFEQNGGVILQQQMRSYTSAGAGPGGFKIFSEEELEKATNSFAADRVLGRGGHGVVYRGVLEDKTVVAIKRSKMMEEAETKEFAREMLILSQINHRNVVKLLGCCLEVQVPMLVYEFVSNGTLYHYIHDKDRKTDITLDTRLRIAAESAEALAYMHSSASPPILHGDVKTANVLLDDKLTAKVSDFGASKLAPADEAEIATLVQGTCGYLDPEYLMTCQLTDKSDVYSFGVVLLELLTGKKALYFDGPEEDRSLVSCFMTATKAGRHKELLDSQVRNEMRAEVLEEIAHLVMRCLSMSGEERPTMKEAAERLERLRRYQQHPWAQDGNLEERQTLLPMEQRDLPSMFRQQDILDLEEGSAYTYSL

SEQ ID NO: 13251 - protein, 50 aa, Zea mays
  VARIANT 8..50: note = Derived polymorphism lacks residues 8 to 50
  VARIANT 19: note = Ancestral polymorphism is G, Derived polymorphism is S
  VARIANT 35: note = Ancestral polymorphism is A, Derived polymorphism is D
  VARIANT 36: note = Ancestral polymorphism is E, Derived polymorphism is K
  VARIANT 37: note = Ancestral polymorphism is R, Derived polymorphism is S
  VARIANT 38..50: note = Derived polymorphism lacks residues 38 to 50
MCGLLPPRGYGWGGDLPIGEDFFQMREKEKFEKEAERQKDQGNVEDKSQV

SEQ ID NO: 13252 - protein, 296 aa, Zea mays
  VARIANT 156..296: note = Derived polymorphism lacks residues 156 to 296
  VARIANT 136: note = Ancestral polymorphism is G, Derived polymorphism is S
  VARIANT 120: note = Ancestral polymorphism is V, Derived polymorphism is G
  VARIANT 97: note = Ancestral polymorphism is G, Derived polymorphism is D
  VARIANT 96: note = Ancestral polymorphism is T, Derived polymorphism is I
  VARIANT 93: note = Ancestral polymorphism is W, Derived polymorphism is G
  VARIANT 70: note = Ancestral polymorphism is F, Derived polymorphism is L
  VARIANT 41: note = Ancestral polymorphism is G, Derived polymorphism is D
  VARIANT 39: note = Ancestral polymorphism is G, Derived polymorphism is D
  VARIANT 36: note = Ancestral polymorphism is R, Derived polymorphism is W
  VARIANT 32: note = Ancestral polymorphism is V, Derived polymorphism is L
MGLRDIELTLPPGFRFYPSDEELVCHYLHGKVANERLAGAGAAMVEVDLHTHEPWELPDVAKLSTNEWYFFSFRDRKYATGLRTNRATKSGYWKATGKDRVIHTPCSRPAAGGGHHRAVVGMRKTLVFYRGRAPNGVKTSWVMHEFRMENPHTPPKEDWVLCRVFYKKKADAMDYADCSDQDAIAVHVPRGSADPGYCYSPPPFPALGGSHHHGGSLNDDFHGGMALLQQQQHNGVFDFHGGQPHPHGGGGGLLAGPPATAVGSRDGGDQCGSGVLMDLGLDDHYAYNSYNSLLQM

SEQ ID NO: 13253 - protein, 468 aa, Zea mays
  VARIANT 34..468: note = Derived polymorphism lacks residues 34 to 468
MDHVVGGKFKLGKKIGSGSFGELFLAVNVQTGEEVAVKLENVKTKHPQLHYESKLYMLLQGGTGIPHLKWFGVEGEYNVMVIDLLGPSLEDLFNYCSRKFSLKTVLMLADQMINRVEYMHQKGFLHRDIKPDNFLMGLGRKANQVYIIDYGLAKKYRDLQTHKHIPYRENKNLTGTARYASVNTHLGVEQSRRDDLESLGYVLMYFLRGSLPWQGLKAGTKKQKYDKISEKKMLTPVEVLCKSYPSEFISYFHYCRSLRFEDKPDYSYLKRLFRDLFIREGYQFDYVFDWTILKYPQIGSNPRMRAGERTSGAAGPSMDKIEKATGEAGGRRNLSGPVNQTDSYAQRPRETVSMSLKEIMHSTDRSGERTMERPRTSSRTGSASRRAVASSSRQASSVEPSEQQYSRASRLFSSNSGSRPSSTQRVNPSPGEARATSLSRAAVARGARDEPLHRSLELLSLGGGGKRK

SEQ ID NO: 13254 - protein, 587 aa, Zea mays
  VARIANT 19: note = Ancestral polymorphism is P, Derived polymorphism is Q
MEHDLAGLAALSGQRFTEPHVKCLMRQILEGLSHCHARGVLHRDIKGSNLLIDDNGLLQIADFGLATFFDPGKRSRRAREPRGLTMEEPTESRPAGAEDLANGAKDPEGPPPEVEEEEVEEPPRSATAKQEEAKEVLGSEGSRPFTMRELLGELREDGETAVGGSTARSAFGDGNGVGSADAEGSSYSQDSAQFSSHHDVAMDLINSVTGVDEEGRSRQRILSFAAKRYVNAIESNPDDPDAYYNWALVLQESADNVDPNSSSSKDALLEEACKKYAEATRLSPTLYDAYYNWAIAIADRAKMRGRTKEAEELWKQAILNYEKAVQLNWNSPQALNNWGLGLQELSAIVPARDKQTIIKTAISKFRAAIQLQFDFHRAIYNLGTVLFKFHDNDTRAFSFIMLQYGLAEDTMRSGKPDVSPNELYSQSAIYVAAAHALKPNYSVYRSALRLVRSMLPLPYLKVGYLTAPPANNSIAPHGDWEVSQFILNHEGLQQADASDQPPSQSPGHLDRGRKPVRINVADIVSVSACADLTLPSGAGLCIETIHGPTFLVAHSWEALDGWLDAIRLVYTIFARGKSDVLAGIITG

SEQ ID NO: 13255 - protein, 182 aa, Zea mays
  VARIANT 34: note = Ancestral polymorphism is C, Derived polymorphism is S
  VARIANT 158: note = Ancestral polymorphism is K, Derived polymorphism is E
MASENKVFRFEEVAKHNVTKDCWIIIAGKVLFFCSSPILGSPSPLWWHRILDGWRHAFGGFVGYGFVKLFGVLVGGMVYDVTPFMDEHPGGDEVLLAVTGKDATADFEDIGHSDSARDMMEKYHIGQIDASTIPAKRTYVHPQQAPSHSDKNNDLLIKILQFLVPIMILGLAFGIRQYTKSE

SEQ ID NO: 13256 - protein, 559 aa, Zea mays
  VARIANT 237..559: note = Derived polymorphism lacks residues 237 to 559
  VARIANT 144: note = Ancestral polymorphism is S, Derived polymorphism is L
MWAWGCVERVAAGFLGGPLAAGGRWNTAVAVGVTAAAGLVLVAIVVSSRRGGLKSPWWRRRRKAPLTAQEWCDLFTPQGKLQDGGVKLLKKVRSGGIEPSIRAQVWPFLLGVYSLDSSEAQRDVVKAQNRKGYLLLRKHCLRKLAYIMEESKQSTKTVKVNHEGSNSSEKGDESGCVSPFESEDVLENSGMGEATTEEGIPCLSTEQEVQDDTSETKPEQMNGNQSSSSSSDEEGSERSVVTQVEASHKNLASVCESSFEDGQESIPRYSNTGGNMDDVVLSKAARPVKSARATEDFETWQRIIRLDAVRANDEWISYSPSQAAVSKERAIESAKAVFLKDYDHLEPYRIHHASRLVAILEAYAIYDQEIGYCQGMSDLLAPLLAVLEDDDEAFWCFAGFMRKARHNFRLDEVGIRRQLNMVARIIKYKDFHLYRHLEMLQAEDCFFVYRMVVVMFRRELTFEQTLCLWEVMWADQAANRAEIANSSWRKLQLGAPPTDDLLLYAIAASVLQKRKLIIESYNSMDEIIRECNSMAGQLDIWKLLDDAHDLVVTLHDRIE

SEQ ID NO: 13257 - protein, 548 aa, Zea mays
  VARIANT 131: note = Ancestral polymorphism is H, Derived polymorphism is Y
MAETGESSPNPAAAPEDTHHEGSEVPAAAVAAVHAQPQLQPQPRPPPQPSKVRLMVSYGGRIQPRPHDNQLAYVNGETKILSLERPVLFADFAARLTTLVGNARDVCVKYQLPGEDLDALISVTNDEDLEHLVVEYDRAHNNGPAAGSGSGRGGATPRLRVFLFPVQPPPPPPPAGLLEPKADQRLYIVEALNTVSLPSSKLDPPPVPSHQSSPPQQQKRESVFAQQSSSPPPPPPQAKHEAVFVQQAPPQPQTAFQMPPPPQPSHVVLTAAGPDYLFGLDNGFVPPPAVKVKDPAGDPPTVRENVPVEIPAKNDDRHPNPAGDHVAVSPVVSPAEYQRQIQELEKLQVADNATHQPPPPATAPAPTHGPVPAALPRNGSDDSLARAYPPVTATPTSNAEYYIPKFPEKPPVPPLSSAPPPTTYVQVQGRYASVAPGSGADHAPVFFIPAPHGYFAAAASPGATSYPAVYAVAPPSATANGSAPSAVVSNATAYAPAPTQVAYDSNGRAIYYTSMLPQYPSAVNGMSAPGGVLGTEPAKQVAVKPTVS

SEQ ID NO: 13258 - protein, 301 aa, Zea mays
  VARIANT 32..301: note = Derived polymorphism lacks residues 32 to 301
  VARIANT 160: note = Ancestral polymorphism is C, Derived polymorphism is Y
  VARIANT 201..301: note = Derived polymorphism lacks residues 201 to 301
MSSVDEFQTQPYQYNCDTMFNLCGNTESQKFWNISNVCWMNFLQDSWYSNVLYLGNEDEVPILTMTCPASDIERYKSGELRLAPSSLILPKDVLGHRRRPMSPKASPRKHPSAGTKDEFWVWHLPADQKTRPSLGGVVQAFCCYGEMRCRVSPPSVSGSCGRSSADPYDVPEFGWRDIRRYKQFRSVDTNISTGDDSALGQRLKALLWKLSLVDLAGFSHQHNRLPFWINTYYSCMMNLQGKGHHPVIQMEMKFKTIRILSHERLQMRFNFIRSLDCIFCIPLACMAGLAMSGFSIFGHYT

SEQ ID NO: 13259 - protein, 58 aa, Zea mays
  VARIANT 35: note = Ancestral polymorphism is S, Derived polymorphism is I
  VARIANT 33: note = Ancestral polymorphism is G, Derived polymorphism is A
  VARIANT 29..58: note = Derived polymorphism lacks residues 29 to 58
  VARIANT 27..58: note = Derived polymorphism lacks residues 27 to 58
MPLLQKALPPELADNVLRATYIVNAYGGRSILAISAARGLINHILYESEKITGRKFSG

SEQ ID NO: 13260 - protein, 344 aa, Zea mays
  VARIANT 258: note = Ancestral polymorphism is V, Derived polymorphism is E
MATESAAEIVCRLPEQCVAHAISLTTLGDACHSSAVSPAPFRPAADSDAAWARFLPPDHADDVLARADERPVAAGCCASKEDPFSRLCDCSPVLLEDGATMALVRNVAPVRSIRSGARCFVLSARALSIAWGDDPSCWTWAASPPGSRFPEVAELVDVCWLEISGKLSLSLLSPGTTYAAYLVFTMADDSYGLECHVGMPPPKATVTVSSGGASGTTTTTSSGSKAVTSTTTAEHAICLHHMQGEEEEAAHRRKQQYVRLRRGYGGGRKTTVLTTTREADPDIRCPRRRGDGWAEVEMGEFHVAGDEGDAAVVEVRVQEVDCRRWKRGLVVLGVEIRPKQHTPC

SEQ ID NO: 13261 - protein, 302 aa, Zea mays
  VARIANT 96: note = Ancestral polymorphism is L, Derived polymorphism is H
  VARIANT 114: note = Ancestral polymorphism is A, Derived polymorphism is S
  VARIANT 122: note = Ancestral polymorphism is G, Derived polymorphism is S
MESTAAPAACEIARLPDDLLSAALGRTGPLDACRAAAVSPAFRAAADADAVWSSFLPPDLPPLADGELPADATATKKQLFMRLSDPARPVLLADGLTSMWLDRATVAKCYMLSARKLTIIWGDTPQYWRWIPLTDSRFSECAELQHVCWLEIRGKIPCDMLSRNTTYAAYMVFKMSDESYGLDYPLQEAEVSIGATRSTRQVCLGYVDDDEDGEEVPQNYRSFGAVGTVFRPRIGRRNRRQPPGVHVLHPQTRAGGWMEMEMGEFRNEEGEDGEVSVSLMETRGGNWKRGLTVQGIEIRVKK

SEQ ID NO: 13262 - protein, 464 aa, Zea mays
  VARIANT 307: note = Ancestral polymorphism is S, Derived polymorphism is Y
MELLALLTVLLLAHTAAYLAWQAVSRRRRACCYLLDYACHKPSDDRKVTTETAGAVIERNKRLGLSEYRFLLKVIVNSGIGEHTYCPRNVLQGREESPTHGDALEEMDEFFADAVAGVLARTGVRARDVDLVVLNVGSFSPAPSLVSRLVRRFGMRDDVMAYNLSGMGCSAGLVAVDLARGVMLTRPRTMALVVTSESCAPNWYVGTDKSMMLGNCLFRCGGAAALLTNDRAFRARAKMELRCLVRANIGAHDDAHAAAVHREDADGRLGVSLSKALPKAAVRAFTENLQRLAPRILPARELARFASRLLLRKLLPAGTPRNKHAGGSPKIDFKAGVDHFCLHPGGTAVIEAVRKSLGLTAHDVEPARMTLHRWGNTSASSLWYVLSYMEAKRRLKRGDRVLMVTFGSGFKCNSCYWEVTRDLADAGAWEDCIDQYPPETLVNPYMDKFGWVNDVQGQGSGFVF

SEQ ID NO: 13263 - protein, 96 aa, Zea mays
  VARIANT 11: note = Ancestral polymorphism is L, Derived polymorphism is P
MPPRAVPSSSPLPLALAAVAIVVVALAVSSCSATTDAPGLGVGAREMVARDDPKCEEMVPCTFRRCIQYCVSIGLQPKGFCNSKPNMQVYCCCVIP

SEQ ID NO: 13264 - protein, 644 aa, Zea mays
  VARIANT 88..644: note = Derived polymorphism lacks residues 88 to 644
MPSRRRRRGDLAVAVAVLATVALAAGADGGAEFDYRKLSGIIIPGFASTQLRAWSVLDCPYSPFDFNPLDSVWLDTAKLFSAVNCWLKCMLLEPYNQTDHPECKSRPDSGLSAITELDPGYITGPLSSVWKEWVKWCVEFGIEANAIIAVPYDWRLPPSMLEERDLYFHKLKLTFEIALKLRGGPSLVFAHSMGNNVFRYFLEWLKLEIAPKHYIQWLDEHIHAYFAVGAPLLGSTEAVRGALSGTTFGLPVSEGTARLMFNAFGSSLWLMPFSKHCKADNIYWKHFFEGKGGCPHKQQCDEDEYISDYGGWPTDLVNIEVPSARDMGAYPSITDITENITSIMECGKPTLLSFSAREVSDGTLFKTIEDYDPQSKALVYQLEKYYQGDPVLNPLTPWERPPIKNVFCIYGIDSKTEVGYYFAPSGKPYPDNWIITDIIYELEGSLLSRQVSYNSLSWCKNWLGPKVNITRAPQAEHDGSDLQTAMNIDHHHGDDILPNMTRVPHVKYITYYEDAESLPGWRTAVWELDKANHRNIVRTPVLMRELWLEMWHDLHPDSKSKFVTKAFRGPLRNEDCRWDYGKARCGFPEHCEYRYAPVFSVLFSVLETRPFLVTRKSRYTFGDVHLGMSCRLRNTSANLLQQYL

SEQ ID NO: 13265 - protein, 360 aa, Zea mays
  VARIANT 52: note = Ancestral polymorphism is I, Derived polymorphism is N
  VARIANT 277: note = Ancestral polymorphism is A, Derived polymorphism is S
MGIGWRGLNRMMERFKDNMEFTKLKPKMAGIDPDDVYSEVPYEKGFQFLWRIEREIGRPTFDEFLKKYIATFKFQSIDTETFLEFLKTNVPGIENKIDLHLWVEGTGIPPDAMEPDSATYKKICSLAAEFKSGKLPSEYEVAKWSGQEWELYIENLPADVEASQISSVLLHMTIVIDKILEKGTVEYLIVHTAILEYFTIADKTSASDAICQLIPLLTQGALIIDGDEPTNAPELPKKAKAKKKRSKEPLIVRIMQTREGLKLGISCLKYGSAKMIAKIVVVCNDAIIGHSEHQYVATGMPTKAALKLWSRKCISAKETVMEEASPETVEEPLLVSAIRGKKVERAPIWLMRQAESASRF

SEQ ID NO: 13266 - protein, 175 aa, Zea mays
  VARIANT 7: note = Ancestral polymorphism is G, Derived polymorphism is D
  VARIANT 25: note = Ancestral polymorphism is C, Derived polymorphism is S
  VARIANT 40: note = Ancestral polymorphism is A, Derived polymorphism is D
  VARIANT 133: note = Ancestral polymorphism is T, Derived polymorphism is I
  VARIANT 143: note = Ancestral polymorphism is N, Derived polymorphism is K
MAAAAMGLVRELLQPQGTTSTRRLCSTGVGVGVAAGFLSAGTVASASSACPAYPWSQDGARGGHKVFMQHDCAACHSGLPYAGLADEALAAGGEVEAKAAEIVVVHDHEEEAALTTATTLHGGACPPDLSAVTKMLEGLRRGNLYSADEIKTTMSLASPVWLQFLQSYVRIPQAP

SEQ ID NO: 13267 - protein, 416 aa, Zea mays
  VARIANT 250..416: note = Derived polymorphism lacks residues 250 to 416
MGITCSHTSTMNRLHSGRVPPCLSSAITPVPAFSEASFPSFTEQRSSFAERKLPVSSVASIGTSMAAYDTMSTHMLASNFTNESPNRQLCSGSYVTEPSDPDTPLLATHSSLMADSTPLFVDFSEVSEHICLNQGQLLGLFDYPASVDFYKSKNMTIFGQQIQDTITVDPNTHLTPQNELFSGSSMQLQKTVGSAESVLKTVDARSATPQSYLYCHTESERSVPEPFNCDKLGADSLPFSNTAPKPRMRWTPELHECFVDAVNKLGGSEKATPKAVQKVMKVDGLTIYHVKSHLQKHRIVQHRSETSGGVPGRRGSHTEVDDDSIPQSKGEGGVEGGLVSQIGLQKQLHEQLEIQRRLQLQVEEHNKYLETVIAKQNESLKKLRALRGFRDRVRRVLQDSEAPGVRAHCAQAQQRS

SEQ ID NO: 13268 - protein, 535 aa, Zea mays
  VARIANT 132: note = Ancestral polymorphism is M, Derived polymorphism is V
MATCSRPLFVSDSAASASPSRASFRRLRTVAVVSIWEPLPHPPLRAAACRFARTKQCSRRSTECLASGPSVSRLTRPIRRMLSRYSSLMVTLHGNLSRCYKAMSALRPDGVSRHFMSAGGFERVVLGVVLVMSISGASYTAPSSSALTEENLLFLEAWRAVDRAYYDKSFNGQSWFRYRENALRNEPMNTREETYAAIKKMLSTLDDPFTRFLEPEKLKSLRSGTQGALTGVGLSIGYPMAINGSPSGVAVMTATPGGPAEKAGILPGDTILAIDNRSTEDMDIYDAAERLQGPEGSSVDLSIRSGTNTRHVVLKRQTVNLNPVRSRMCEIPGSKDSSKIGYIKLTTFNQNAAESVKEAIKTLRDNNVKSFVLDLRNNSGGLFPEGIQIAKIWMDKGVIVYICDSQGVRDIYEADGADTIAASEPLVVLVNKGTASASEILAGALKDNKRAVVYGEPTYGKGKIQSVFGLSDGSGLAVTVARYETPAHTDIDKVGVIPDRPLPASFPTDEDAFCSCLRDSTAACNLNAAQLFAKS

SEQ ID NO: 13269 - protein, 225 aa, Zea mays
  VARIANT 106: note = Ancestral polymorphism is T, Derived polymorphism is K
  VARIANT 103: note = Ancestral polymorphism is M, Derived polymorphism is K
  VARIANT 94: note = Ancestral polymorphism is I, Derived polymorphism is K
  VARIANT 68: note = Ancestral polymorphism is G, Derived polymorphism is W
MAATAMDHDGGDDVVTPGELLGNSLTLAAGRGAYADGRSVRASVTGRRRIVPPAPGSDDQRSTVEVVGHKAHGAVPQPGSVVIARVRCSEILGIIWLEVGRCMCLKVRAITLVVVYRLSLLQVTKVMARMASADIMCVDSKAIREKFTGMIRQQDVRATEIDKVDMYQSYRPGDIVKAMVVSLIDENDAVQIISVFFSCYQPWLGLLALRLSTSTFLSCRNFLNL

SEQ ID NO: 13270 - protein, 742 aa, Zea mays
  VARIANT 13: note = Ancestral polymorphism is L, Derived polymorphism is R
MGGVGAGSLALLRLLLLLLLRAEASALHATILPSPAPSPSKAPEARSFGPRISPSHPPSALPPGSPGVDARHHSHKHPHHRESNQGPSPSSAPTPEAGCSSYICTEPLTATPIGSPCGCVEPISVIVDLDLAPYLLFMSIAELEVEVAAGTFLKQSQVKIMAAVASIQDDQKTRVTIYLVPLREQFDTYTASLISDRFMEKKVQINSSIFGDYKVINISYHGLQSPPSSLPGGSDPSGTEEYPITAEVPDQKKKHNKSDILVIVVVLGSSLGLLMTCAVLLILLVRWKKLGRLHEAMTPATIPAVNRRYGTRPTLSTSMVSSASASVFSTVATCTTSVKTFSLAQLQKATDGFDSRRVLGQGGFGRVYHGTIEDGNEIAVKLLTREDRSGDREFIAEVEMLSRLHHRNLVKLIGICIERSKRCLVYELIRNGSVESHLHGADKAKGKLNWDVRMKIALGAARGLAYLHEDSNPHVIHRDFKASNILLEEDFTPKVTDFGLAREASNATQPISTRVMGTFGYVAPEYAMTGHLLVKSDVYSYGVVLLELISGRKPVNISESKDPENLVTWARPLLSHKEGLEKLIDPSLDGNFNFDNVAKVASIASMCVHTDPSQRPFMGEVVQALKLIYNDPDEACDDSYSPRNSSDQDGDYEGDLVFESGSWGFGASGCLDYRNSLPFVTMDYSSGRIEGPHDPRAALSAGSHAQSPVLQNRSGPLRMKKKLASFYRSRGSISEHGHLPRH

SEQ ID NO: 13271 - protein, 1267 aa, Zea mays
  VARIANT 1039..1267: note = Derived polymorphism lacks residues 1039 to 1267
MPPAAVARLRELVPAPGTEEELELDVAGAAALVECCSGLLRPGGGGDGDAGAALEALEALCAAGGGGAMRRHADGLAPLVVARLGDGHAAVREAARRYLVLLMEMKEMNARTENTEPNSNVPNDQHVHYTTIEMESSNTSQARKNSKEKVSARDISLLAGEGDITRKLVEPIKVFSEKDLLREIGKVVSTLQPDNEWSIRITAMQRVEGLVLGGAADYSAFPMLLKQLMTPLITQLLDRRSSVVKQVARILPRIIEFAKNDRSAVLRARCCEYATLMLEYWVDTPEIQRSADLYEDLIKCCIADATSEVRSSARACYRMFSRIWPDRSHQLYSSFEPPRQKMINDEDTETPQAHLPPVKISHLQPSSFVPAVIDKVVKVDSGISFSSGDLQTSDILYLQCDDIIAKGLDAGNNDDTLTIGSSFEDKITLRELETRDRDTEKNDSGNSTGVNSSARDQPTATPITIEAPSEMSLDDATVVTIVQDKAECKLNVEPINQQVQAQEDPSDLTCLSPAVNSKGAGNLLKENPVEVSSDAGSSGKVGTHKKSAVSKKPRGSYTPNFRRPLLSKQMTNWFYASTKSDIHEKQLILGEMVNNMDVPSSITEALSLGLNPRSDWMMKVYAFSFLRQCLLERGSKGTQEVAQNFEKVMRLVCRYLDDPHHKVAHAALSSLADIMPVFKKPFEHYLDKTLPHIFSRLNDPKESIKQQCLAILKHANESYPIDSLLPALLRSLDEQKSPKSKLAVLEFANASFVKCEVNSESYCSSSFLKPWFGKLAHLFNDKNKKLKEVTVVGFSSIYSHYDPTSMLSFLVTLSMEEQKRLKRAMKQLIPSIESDMEEFLQQKRHKQKTPSFDIFTAKSPLHPAFQSAKSPLHPAHRSSKSPLHPRFAESPGHSAYKYAKSPLHPSYQPANSPLHPSYQSNYVKADDCFSSALQCLPDTSLEVQEDRTGRIEIESPNKSYGHKAEMMDKKSCTVRSKNDLPRRSDFSVISNNIVQNASSRDSRSTKILDEPNDSELHINTRKNKVTRTRNDLQDHEYYLVCSLSATVTCYKCPMSLFLQILATDFTKLDTTSSCTRFQNLHQMSSSLLEMLDDPDMATRELALSLLAEILEKHQKAMENCVELLVVKLLHATKDGALKVVNQAHICLTTVVTQFDPLRCLGAIASQLASQDEKVLIVSINSLSKLVMRFSEDNLMAHLPTFLPALVDASKNRSPYVRKAAMVCVVDAYLKLGPALLPYLEGLDSAQLQLITTHASRLSQARLIASDG

SEQ ID NO: 13272 - protein, 943 aa, Zea mays
  VARIANT 172..943: note = Derived polymorphism lacks residues 172 to 943
  VARIANT 331..943: note = Derived polymorphism lacks residues 331 to 943
MKGAQDKRHRKKQDLQVLGPFPGCLGRMINMLDLSNGVVATKMLTEKAHRDGTYFSYSVCSLVSPAGKDRSNTFKMAINPPAQTEDKQRDSQTRRNFPTKRSNSPTKRTGAMPVKMLMEQDMWKERRPDEEPLNVVARLMGLHEPPGQQSNFPLGRQLDKKYQCGGFEENYWNLKSKKESKCHQNQKAGPRHQHTWNGSGDQPSRISSSQSMHQENETCEKRMSIVREKFAEAKRLATDEKLLHSKEFQDALQFLSSNRDLFLEFLDEPNPLLSSNRYEFQPVAPPSEVKQITILKPSEPAKRKDSIFVGRQLFSDGDGGESERNRYRRHQSSDVSPANSNLSEPTKIVVLKPGFPSSHDSRIARSSLSSAEDSEDESMMAVDETMCSRRLAKEITWQMRMRLKDRQDEESMLSCEYPDFYIGDDSFSKSEVEIPKEMCGETSGELEFGTPTSGRSWDFLSRSGSPFSASCSSQASHRREPSVVREGKKKILERLSMVSSTVNIEEEMEGRRSTGTLGDMLTISKVKDQEEIGAETLGSPAPELEPEEPFSCLPRSRSLPLSLSYGVAESNGITSGTHEAEKERIRKSSSFREKVSSLFSKNKKSTREKVDPSVSNRLKHGGAVTTGDVKEICNHLALDNLQKQHTCLNTDEKNTVQGLVTSSCETNSAADIPAKDISSISSLGVPGIFGGLQDEPSPVSVLDGPFICDNNRRLLYSSENFITSSPQALSRSPLIGSFSRSLSWEDPPLEVMSPNSLRLSRLFSKADEDLDSLTFIQKLVHSRGTGRESCILADPLDPSLLEKISDYEEDGIKFGKRRPKQRLLFDAVNEALIELASMAELAAYPWGRSCSSEHGDCKNGSSSNSAAEEIWRVIRNWSILEKYPPGEAIERNLLLEMILKREVAEAASADTTRLETFDLNTTVCAMVLDGLVEETVVDLTNYC

SEQ ID NO: 13273 - protein, 146 aa, Zea mays
  VARIANT 55: note = Ancestral polymorphism is G, Derived polymorphism is D
MTTLRNLKIKTSTCKRIVKELRSYEKEVEKEAAKTADMKEKGADPYDLKQQVLTGPLILRAFFYHYFFSVTELTHSALVIAKHTKENVLAESRMMVPDCHKRLETALADLKATLAELKESNEQGAEIGEAESTIAEVEAVVKPAED

SEQ ID NO: 13274 - protein, 1529 aa, Zea mays
  VARIANT 1179..1529: note = Derived polymorphism lacks residues 1179 to 1529
  VARIANT 1220..1529: note = Derived polymorphism lacks residues 1220 to 1529
MAAQASIAAGSQVWVEDPGVAWIDGEVVKVNGDTVTVRCSNDKTVCWQVSALLGLYIKEVTVKASNVHAKDPEEAPCGVDDMTKLAYLHEPGVLQNLKARYDMNEIYTYTGNILIAVNPFRRLPHLYDTQMMQQYKGAEFGELSPHPFAVADVAYRLMRNEGISQSILVSGESGAGKTESTKMIMRYLAYMGGKAASEGRTVEKQVLQSNPVLEAFGNAKTVRNNNSSRFGKFVEIQFDQKGKISGAAVRTYLLERSRVCQISDPERNYHCFYMICAAPPEERERYKLGDPSTFHYLNQSNCIKLEGLDESKEYLETRKAMDIIGISSEEQEAIFRVVAAILHLGNVEFAEGDDGDSSKPKDEKSLSHLRTAAELFMCDEKALKDSLCQRIIVTRDENIVKTLDPEAAKGSRDALAKTVYSRLFDWLVNKINNSIGQDPNSKCLIGVLDIYGFESFKTNSFEQFCINLTNEKLQQHFNQHVFKMEQEEYTKEEINWSYIEFIDNQDVLDLIEKKPGGIIALLDEACMLPRSTHETFAQKLYQTYKNHKRFAKPKLSRSDFTICHYAGDVTYQTELFLDKNKDYVVAEHQALLSASKCAFVSGLFPFLSEDSSKSSKFSSIGSRFKQQLQSLLETLSATEPHYIRCVKPNNLLKPAIFENQNVLQQLRCGGVMEAIRISCAGYPTRRTFYEFIDRFGILAPDVLSGSSDEVSAVRRLLDKIDLQGYQIGKTKVFLRAGQMAELDARRNEVLGRSASMIQRKVRSFLAQKNFIALRRSALQIQTVCRGELARRVYHNLQREAASLKIQTLYRMYTARKAYNELSASAVTIQSGLRGMCARKELHFRRQTRAAIIIQSRCRQFLARLHYSRTKKAAITTQCAWRGKAARKELRKLKMAARETGALQAAKNKLEKQVEELTWRLQLEKRMRADLEETKSQENAKLQAALQEVQQQYKETKEILVQEREAAKKAAEIAPVIKEVPVIDTELMNKLRDENDKLKTMVSSLEKKIDDTEKKYQETSKISEDRLKQAMDAETKIVDLNMAMLRLQEKISTMESEEKVQRQALLSTPVKSMSEHLSIPIAPKAHHLENGFHEVEGLKEPQSAPPAIKEYGNGDPKMKKSIVDRQLENVDALIECVGTNLGYCAGKPVAAITIYKCLLHWKSFEADKTSVFDRLIQLIGSAIENEDDNDNLAYWLSNTSSLLFLLQRSLKAAGAPGSVSRKKPPQPTSLFGRMAQGLRSASFANMHVEATDVVRQVEAKYPALLFKQQLTAYVEKIYGIVRDNIKKELSSLISLCIQAPRTMKASMLRVSGRLSSQSQSQSNHWQKIIESLDKLLKILQDNHVPPVLAQKIFTQIFSYINVQLFNSLLLRRECCSFSNGEYVKAGLAELELWCAKATTEYAASSWDELKHIRQAVGFLVIFQKFRISYDEIVNDLCPILSVQQLYRICTQYWDDKYNTQSVSSDVLSNMRVLMTEDSNSDESGSFLLDDNSSIPFSVDDITNSMQEKDFTDIKPADELLENPAFQFLQD

SEQ ID NO: 13275 - protein, 383 aa, Zea mays
  VARIANT 296: note = Ancestral polymorphism is I, Derived polymorphism is T
MAAAAIHQFAECITCHAWSPDQSMIAFCPNNHEVHIYKFFTDKWEKLHVLSKGIGGYIYIFSFDLRYVWTQEGSDWIPTLVILKLNRAALCVQWSPKENKFAVGSGAKSVCICYYEQENNWWISKVIRKRHESSVTSLAWHPNNIYLATTSTDGKCRVFSTFIKGVDTRGSQSSTSTNSKFGEQIAQLDLSSTWVFGVRWSPSGKTLAYAGSRSWHNSMVYVIDEVESSPVAQNLTLRDLPLRDVLFVSERTLVGVGFDCNPMIFAADDTGLWSFVRFLDEMKAAPSASKASQVYTLHELIIPGGTTFQLSEALGKLYGQSKQGASSDTVEPSKARGGAHENCITCIVPLRKGSDGTIKRFSTSGLDGKVVVWDLENHVSIAK

SEQ ID NO: 13276 - protein, 461 aa, Zea mays
  VARIANT 366..461: note = Derived polymorphism lacks residues 366 to 461
  VARIANT 136..461: note = Derived polymorphism lacks residues 136 to 461
  VARIANT 14: note = Ancestral polymorphism is H, Derived polymorphism is P
MEKAIDRQRVLLAHLLPSPSAASSQPQLAASACAAGDSAAYQRSSSFGDDVVVVAAYRTPICKAKRGGFKDTYPEDLLTVVLKAVLDNTRINPADIGDIVVGTVLGPGSQRANECRMAALFAGFPETVPVRTVNRQCSSGLQAVADVAAAIKAGYYDIGIGAGLESMSINSIAWEGQVNPKISAFQKAQDCLLPMGITSENVAHRYGVTRQEQDQAAAESHRRAAAATASGKFKDEIVPVPTKIVDPKTGEEKEVVISVDDGIRPGTTASGLAKLKPVFKKDGTTTAGNSSQVSDGAGAVLLMKRSVALKKGLPILGVFRSFAAVGVDPAVMGVGPAVAIPAAVKSAGLEIGDIDLFELNEAFASQFVYCCNKLGLDRSKVNVNGGAIALGHPLGATGARCVATLLNEMKRRGRDCRFGVVTMCIGSGMGAAAVFERGDAVDGLSNVRDIQAHNFLSKDAK

SEQ ID NO: 13277 - protein, 665 aa, Zea mays
  VARIANT 236: note = Ancestral polymorphism is V, Derived polymorphism is M
MSLHHCRAATTPAMPATGLSSAGASPFRLPASSSSAQGHLRLSPPAATASATACRRRLLLRCAASSGGGGGSGSDPVLEEQRRRQAELAARIASGEFTVQGPGSAAAHFPPHPPSFFTTGIDARDRLEFTRWIAPLVGRLSKLGPPGELAAALLTRVAGAGGPEIPQAVGSINAVVGQAFFVPLYDLFLTYGGIFRLNFGPKSFLIVSDPAIAKHILRENSKAYSKGILAEILEFVMGTGLIPADGEIWRVRRRAIVPALHQKYVTAMIGLFGEASQRLCEKLDKAAVDGEDMEMESLFSRLTLDVIGKAVFNYDFDSLSYDNGIVEAVYVTLREAEMRSTSPIPTWEIPIWKDISPRQKKVNEALKLINSTLDELIAICKRLVEQEDLQFHEEYMNEQDPSILHFLLASGDDVSSKQLRDDLMTMLIAGHETSAAVLTWTFYLLSKYPKVMAKLQDEADSVLGDGLPTIEDVKKLKYTTRVINESLRLYPQPPVLIRRSLEDDILGGYPIGRGEDIFISVWNLHHCPKHWDDAEVFNPERWPLDGPNPNEINQNFSYLPFGGGPRKCVGDMFATFETVVATAMLVKRFDFQMAPGAPPVDMTTGATIHTTEGLKMTVTRRTRPPVIPNLEMKIITDSQESTLSAPSMVVSAASVASGEDQGGIS

SEQ ID NO: 13278 - protein, 298 aa, Zea mays
  VARIANT 39..298: note = Derived polymorphism lacks residues 39 to 298
MDHDRLNLPSTSAISLEVMGHQLHISQDPNSKHHGTTVWDASMVFVKFLEKNSRKGRFCPSKLKGKRVIELGAGCGLAGFGMALLGGDVTTTDQAEVLPLLMRNVERNRSWISQSNPDSDSVGSITVAELDWGNKEHIKAVEPPFDYIVGTDVVYSEHLLQPLMETITALSGPKTKILLGYEIRSTTVHEKMMEMWKSNFIVKTVSRSKMDVKYQHPSIHLYMMDLKAPLIPEVEAADNGNYEEEVEVAVNQEEDEDPGVKSESCSGSSPEAKSGSLDDWEIRRCGAMAARLLKDVKL

SEQ ID NO: 13279 - protein, 180 aa, Zea mays
  VARIANT 141: note = Ancestral polymorphism is Q, Derived polymorphism is H
  VARIANT 143: note = Ancestral polymorphism is G, Derived polymorphism is C
MGKKSGRSGADAPKATAFVLKVAMHCRCDGCVPKIRAAVNKLTLRCEGIQSLDQSALDTKGELALVATADPERLRRRLREATGKSVDIVFPKPAAANGGSSGREEANAAVQAQAQAQAQALLLAAGLQQQQQHGRPWYALQQGGYGPPPEPYVASYPATAWGAYPHNGLDDAYGGGWFGY

SEQ ID NO: 13280 - protein, 247 aa, Zea mays
  VARIANT 21: note = Ancestral polymorphism is A, Derived polymorphism is V
  VARIANT 36: note = Ancestral polymorphism is R, Derived polymorphism is L
  VARIANT 43: note = Ancestral polymorphism is R, Derived polymorphism is C
  VARIANT 53: note = Ancestral polymorphism is G, Derived polymorphism is S
  VARIANT 65: note = Ancestral polymorphism is R, Derived polymorphism is T
MASWDNLGELSNIAQLTGLDAVKLISLIVRAASTTRLHKRNCRRFAQHLKLIGGLLEQLHVSELRKYLEMREPLEQLEDALRWGYLLVNSCQDRSYLYLLAMGWNIVYQFRKAQSEIDNYLRLVLLITLVDNARIRDRLEYIERDQCEYSFDEEDKKVQDALLNPDPCTNPTIVLKKTLSCLYPNLPFNEALQKEKKETNVKAPEKKGSNYSKSKGETAKSFDDDGDYPKKQNDEYPKKQKDTCSTQ

SEQ ID NO: 13281 - protein, 280 aa, Zea mays
  VARIANT 190..280: note = Ancestral polymorphism lacks residues 190 to 280
MAAAASPATAAAVREAAPAHRQIGIRPGHGPAPFRIGFLAKPSSRWAAISVPPGPRRAAPAASAARERVTEEEERPVSVELEPIASEQQLDWVLGEARQLQLPIVLLWMASWCRKCIYLKPKLEKLAAEYHPRIRFYCIDVNCVPQKLVNRAGVTLLEFLCCGWFPVGVETGSLRFIGPGNFVISCRLCYQLAFPSLILQLCNCVHTQVTKQIPSTFVKLTRTLMAPFVGTCEICTAGLEQKMPCIQLWSDSRKQAEVIGGGHKSWLVIDDVRRMIEQEE

SEQ ID NO: 13282 - protein, 1000 aa, Zea mays
  VARIANT 262..1000: note = Derived polymorphism lacks residues 262 to 1000
  VARIANT 391..1000: note = Derived polymorphism lacks residues 391 to 1000
MAPSQAAAVVAGPTFEDLERDLQAVLMDQNHTSPTDDLSIFRSGSAPPTVEGSRTAIGALFPGPQLHANSLGDGGGGGGTDAGVDMLTEEEIRSHPAYLSYYYSNEHLNPRLPPPMVSKEDWRAAQRFQAVSGGIGDRRRPSEVGSGNSLFSVQPGAHGEKALLNHRVGRGERNGLARQQSSEWLGRGADGLIGLSDVSGHGSRRKSFADALQENISRTAATAGHLSRSNSRNALEGPTPIRSSDSPKPQLQHRSESMNGLRSGSTSPSLVRVQSLGSSMSHTFASAVGSSISRSTTPDPQLIRRTPSPCLPPVGVRMGSSDKKVEAAAVASLNHDNADIAATLSSLNLSGNKMSIVENQAQNHVYQNFGDQTDVLFNVPKEHMQFSPQILSQNTDDGSFNAPEYVVFPNGGSNFSNSHASKLASHSNIKFSMQPPHGNLNKKGSLMSSPGSVSHYHNLNGDSHGIDVSGQYMKTHAGGFTSSMLNNQLNPDGDYGNVLSNNGVSGYQGQQETMYAQYLQANSDSPLGAAASMSPFQGRGFTGSGHLDSPGYQKAYLGTLFAQQKLQYGMPYLGKSGALNQSIYGSDPAFGIGMTYLTSPPSSQYISSPRGHVRQADRPTRLPAVRNTAGGSLGSWNSENGLMDNGYGSSLLEEFKTNKSRSFELLDIIGHVVEFSSDQYGSRFIQQKLETASIEEKNMIFPEILPHARTLMTDVFGNYVIQKFFEYGTETQTKKLATLLKGYVLQLSLQMYGCRVIQKALEVVEVEQQTQIALELDGSIMKCVRDQNGNHVVQKCIECIPQEKIQFIISAFYGHVVEFSMHPYGCRVIQRVLEHCDDESTQNAMMEEIMQSVVTLTEDQYGNYVIQHVLQHGKPEERSTIITQLAGQIVKMSQQKFASNVVEKCLTFGNPEQRQILITEMLGTTDENEPLQAMMKDQFANYVVQKVLEICDDQNRELILSRIKVHLNALKRYTYGKHIVARVEKLIAAGERRIGAPSSC

SEQ ID NO: 13283 - protein, 187 aa, Zea mays
  VARIANT 17: note = Ancestral polymorphism is A, Derived polymorphism is E
MATTRLLPLLRRRLAAAIAGSPAPYSLRGPSFPAPAAAGLRSLLKAAGASDTATEPQDQQHSETTPPPASVPTPESGLKVRDTSNLKISPRHDLAMIFTCKVCETRSMKMASRDSYENGVVVVRCGGCNNLHLMADRLGWFGEPGSIEDFLATQGEEVKKGSTDTISFTLDDLAGSQVSSKGPSEQN

SEQ ID NO: 13284 - protein, 266 aa, Zea mays
  VARIANT 41: note = Ancestral polymorphism is A, Derived polymorphism is V
  VARIANT 32: note = Ancestral polymorphism is V, Derived polymorphism is L
  VARIANT 30: note = Ancestral polymorphism is L, Derived polymorphism is P
MHFDKSGVSVEELLNMMDPALLDDVIRRLLEVKNLKPGKNAQLSESEIKQLCAAAKEIFLHQPNLLELEAPIKICGDVHGQYSDLLRLFDYGGYPPQANYLFLGDYVDRGKQSLETICLLLAYKVKYPENFFLLRGNHECASVNRIYGFYDECKRRFSVKLWKTFTDCFNCLPVSALIDEKILCMHGGLSPELNKLEQILNLSRPTDVPDTGLLCDLLWSDPSNEATGWAINDRGVSYTFGPDKVSEFLEKHDLDLICRAHQVAVL

SEQ ID NO: 13285 - protein, 330 aa, Zea mays
  VARIANT 208: note = Ancestral polymorphism is L, Derived polymorphism is V
  VARIANT 184: note = Ancestral polymorphism is G, Derived polymorphism is V
  VARIANT 163: note = Ancestral polymorphism is G, Derived polymorphism is V
  VARIANT 132..330: note = Derived polymorphism lacks residues 132 to 330
  VARIANT 127: note = Ancestral polymorphism is K, Derived polymorphism is M
  VARIANT 113: note = Ancestral polymorphism is R, Derived polymorphism is C
  VARIANT 100: note = Ancestral polymorphism is V, Derived polymorphism is M
  VARIANT 42: note = Ancestral polymorphism is R, Derived polymorphism is S
MTATSAFESSPEMERFLCERLLNTEQPIAERFRALFSLRNLRGDAPRRALLQGLDFGVSVRYILVSTKERAARDPSNLLAHEAAFALGQMQDAEAIPALVAVLKDLSLHPIVRHEAAEALGAIGLEKSIPVLEESLTTDPAVEVQETCELALGRIEENKKVNGAESTTTSPFLSVDPALPSKHGLSVDQLRGLLLNEQESMYQRYAALFALRNDGGDAAVSAIVAALSVKSALLRHEVAYVLGQLQNKAASDALSTVLKDVCEHPMVRHEAAEALGSIADQESIALLEEFAKDPEPIVSQSCEVALSMLEYERSGKSFEFLFLQTPHVQS

SEQ ID NO: 13286 - protein, 329 aa, Zea mays
  VARIANT 27: note = Ancestral polymorphism is T, Derived polymorphism is S
  VARIANT 61: note = Ancestral polymorphism is N, Derived polymorphism is S
  VARIANT 95: note = Ancestral polymorphism is D, Derived polymorphism is G
  VARIANT 184: note = Ancestral polymorphism is T, Derived polymorphism is N
  VARIANT 207: note = Ancestral polymorphism is F, Derived polymorphism is L
  VARIANT 226..329: note = Derived polymorphism lacks residues 226 to 329
MPLSAASSILLLHALVSLTLLLGDMTTTTPAAAVPAAVDVNTTAFTMHDSAASASPHGAENFEMYYCFLCTERHPLLIHYCPIYWDECHLNCWDDDTPTSMVTVQGKECYVMKLYMSGRYVIVQRLSCDGVASCFLTCGGGELADKVAAASILLLLHACSLSLLAAARVPDPVEHGDVNTAMLTNGSASATPSSPDSSSNGNFDMYFCFLCSGRDPLLIHHCPIYWDECHLICDDDMSTATPTPPAVAVSSSSSSRPVPMVQVQGDDDCYVMKLYMSGRYVIVEHRPCKYIAWCFLTCGGGELAAADRKAVTATAIQGTSLPAELCGTQ

SEQ ID NO: 13287 - protein, 277 aa, Zea mays
  VARIANT 117: note = Ancestral polymorphism is D, Derived polymorphism is G
MAQRGELGRQLPLRGPLKALEADIHHANAMADAIQRNYGGSCVQMRLSFSSLAPLFLYFIQWLDCGCCYALPSYLGLFHILICKVYADGDSSVSTYERRASLREFYGDCLKRIRSTDLWVLTNSNDVIDPAHLEKENVSLVNDGPVTMQIDSPSPQDAARSWYIEIWSALYCSDDSLHPMYKIVTSLSNPYVNIIFGVVVDDRYTGEIHVTIIATGFPQSFQKSLLADPKGARIVESKEKAATLAHKAAAAAVQPVGAMLQELEKEIDDVDAQIRNL

SEQ ID NO: 13288 - protein, 374 aa, Zea mays
  VARIANT 93: note = Ancestral polymorphism is S, Derived polymorphism is F
  VARIANT 213: note = Ancestral polymorphism is L, Derived polymorphism is P
  VARIANT 256: note = Ancestral polymorphism is F, Derived polymorphism is S
MEAPGSPYASSPESAPKRAPRSPPQQQPPSEEGDDKEKPIHLRFLVSNASAGCIIGKGGSTINDFQSQSGARIQLSRSHEFFPGTNDRIIMVSGLFGEVMKAMELILEKLLAEGEEFNEAEARPKVRLVVPNSSCGGIIGKGGATIKSFIEESHAGIKISPQDNNYVGLHDRLVTVTGTFDNQMNAIDLILKKLSEDVHYPANLSSPFPYAGLTFPSYPGVPVGYMIPQVPYNNAVNYGPNNGYGGRYQNNKVGGSLWVALLVISHLWTCSAVVTISVDTLQPSTPMRSPASNEAQESLTIGIADEHIGAVVGRAGRNITEIIQASGARIKISDRGDFISGTSDRKVTITGTSEAIRTAESMIMQRVSASSERL

SEQ ID NO: 13289 - protein, 818 aa, Zea mays
  VARIANT 23: note = Ancestral polymorphism is K, Derived polymorphism is M
MGGGPRTFPGGLSKWQYKRMHEKLARQKQRGLLRHEKQLYLARLRSEIRASRLPGAAAEAPPGGEGPTSSRAHIRALADRFRRPGAEDLWNEDDGPLRRVKRPPTGIASGVRHQQQQLDSGKPRGGPSWEDLTSLDQPRPLDRGKGPTSAAFNPRREYLTVVAPWCPRWDPRPLGFVAPKKSYPVMTRCSVSCQPCVDLRPLVASGLTEDGNGRKDTPLAQFNQERFYSVAARRFGRKWRPDSSDQDDKGTSAPKKNLRFGKKFGASSEEDSEIDESGDTGAIRRRWSSAALRNCDVKKERRVLKSYEEESNDLAGRIQELREEIRNREVLGTERRRYESRGESLLTSKRFDQCGVSALTVKALTDAGYVQTTVVQEAALPICLEGKDVLVKAKTGTGKSAAFLLPAIESVLNAMKSNTNQRVSPIFALVLCPTRELAIQLTAEANVLLKYHEGIGVQSLIGGTRFKLDQRRLESDPCQILVATPGRLLDHIENKSSFSVRLMRLKLLVLDEADHLLDLGFRKDIEKIVDTLPRQRQTLLFSATIPKEVRRVSQLVLKRDHVFVDTVGLGAVETPTKVQQSCLVVPHELHFHTVHHLLREHIDREVDYKVIVFCTTAMVTEFMYIMLRDLKLNVREIHSRKPQLYRTRISEEFRGSNRIVLVTSDVSTRGVNYPDVTLVIQVGVPPDREHYIHRLGRTAREGKSGKGILLLAPWEQYFLDEIGDLPIDKYPAPDIDQEMKQKVDDSIEMVDMSIKEAAYHAWLGYYNSIADIGRDKRMVVDLANRFGASIGLEKPPAIYRKTALKMGLKDVPGIRIRK

SEQ ID NO: 13290 - protein, 349 aa, Zea mays
  VARIANT 125: note = Ancestral polymorphism is H, Derived polymorphism is Q
MAGKEERKRVLVVGGSGYLGQHLLAASSTVDRLDVAFTHHSPAPPQPLLETLPSVRAFRADLRSGDGFEAISASFGQPHVVVNCAAMSVPRACELDPPAAMATNVPSSLVNWLLSFGNEDSLLIQLSTDQGTVLRHFFFICGACMYILDSYASPVLIVYEGVKSFYKEEDETMPVNMYGKSKVAAEKLIVEKCSNYAILRSSIIYGPQTISPVAKSLPIQWMDGVLSQGQQVEFFSDEFRCPVYVKDMVDVILSLTKTWFPDDGKKVQVLLNVGGPDRVSRLQMAESVAVVRGYNPSIIKSVSASSVNRGVASPPDISMDITKLTQILGIKPISFQDGVRSTLDAEDST

SEQ ID NO: 13291 - protein, 443 aa, Zea mays
  VARIANT 363: note = Ancestral polymorphism is A, Derived polymorphism is T
  VARIANT 254: note = Ancestral polymorphism is W, Derived polymorphism is R
  VARIANT 116: note = Ancestral polymorphism is R, Derived polymorphism is G
  VARIANT 81: note = Ancestral polymorphism is D, Derived polymorphism is N
  VARIANT 61: note = Ancestral polymorphism is R, Derived polymorphism is T
  VARIANT 47: note = Ancestral polymorphism is A, Derived polymorphism is S
  VARIANT 17: note = Ancestral polymorphism is N, Derived polymorphism is S
  VARIANT 15: note = Ancestral polymorphism is L, Derived polymorphism is I
MEGDGTNLDAAIESLLNVEKQMRLAGDVAGTRKAVIDIVELCYKAGAWKTLNDQIVLLSKRRGQLKQAITAMVQKAMEYIDLTPGIDTSIELIKTLSSVSAGKIYVEIERARLIKRLAKIKEEQGQIYEAADLMQEVAVETFGSMAKTEKIAFILEQVRLCLDRQDFVRAQILSRKISTRVFDADPSKEKKKPKEGDSIVQDAPADIPSLLELKRVYYELMIRYYSHNNDYLEICRCYKAIYDIPAIKEDPTKWIPILRKICWYLVLAPHDPMQSSLLNATLEDKNLSEIPNFRLLLKQLVTMEVIQWTSLWEFFKEEYEKEKDLLGGALGAKASEDLRLRIIEHNILVVSKYYARVTLERLADLLCLTLQEAEKHLSDMVNSKSLVAKIDRPMGVVSFRTTQDSNGTLNSWATSLEKLLDLVEKSCHEIHKETMIHKTALKV

SEQ ID NO: 13292 - protein, 531 aa, Zea mays
  VARIANT 502..531: note = Derived polymorphism lacks residues 502 to 531
MAAPAPAPKQEELQPHAVRDQLPSVSYCLTSPPPWPEAVLLGFQHYLVMLGTTVIIPTALVPQMGGGNEEKARVVQTLLFVAGINTLVQSFLGTRLPAVMGASYTFVAPTISIVLAGRYSGIADPHEKFVRIMRGTQGAFIVASTLQIIMGFSGLWRIVVRLLSPLSAAPLVALVGFGLYELGFPSVAKCVEIGLPQILLLVALSQYIPHAAPLLSTAFERFAVIMSIALIWLYAFFLTVGGAYKNAAPKTQFHCRTDRSGLVGGAPWISVPYPFQWGAPTFDAGEAFAMMAASFVALVESTGAFIAVSRYASATPCPPSVMSRGIGWQGVGILLGGIFGTANGTSVSVENAGLLGLTRVGSRRVVQISAGFMIFFSILGKFGAVFASIPGPIIAAIYCLLFAYVGTAGVGFLQFCNLNSFRTKFILGFSLFMGLSVPQYFNEYTSVAGFGPVHTRARWFNDMVNVVFSSKAFVGGAVAYFLDNTLQRRDGAVRKDRGHHFWDRFRSFKTDPRSEEFYSLPFNLNKFFPSF

SEQ ID NO: 13293 - protein, 279 aa, Zea mays
  VARIANT 120..279: note = Derived polymorphism lacks residues 120 to 279
  VARIANT 113..279: note = Derived polymorphism lacks residues 113 to 279
  VARIANT 108: note = Ancestral polymorphism is K, Derived polymorphism is N
MMPLSQTDFSPSQFTSSQNAAADSTTPSKMRGASSTMPLTVKQVVDAQQSGTGEKGAPFIVNGVEMANIRLVGMVNAKVERTTDVTFTLDDGTGRLDFIRCSTFSVGKSPCFCADVHWLSRNGMYIAVIGSLKGLQERKRATAFSIRPITDFNEVTLHFIQCVRMHIENTELKAGSPARINSSMGVSFSNGFSESSTPTSLKSSPAPVTSGSSDTDLHTQVLNFFNEPANLESEHGVHVDEVLKRFKLLPKKQITDAIDYNMDSGRLYSTIDEFHYKAT

SEQ ID NO: 13294 - protein, 168 aa, Zea mays
  VARIANT 17..168: note = Derived polymorphism lacks residues 17 to 168
  VARIANT 21: note = Ancestral polymorphism is L, Derived polymorphism is M
  VARIANT 22: note = Ancestral polymorphism is Y, Derived polymorphism is S
  VARIANT 27: note = Ancestral polymorphism is R, Derived polymorphism is W
  VARIANT 35: note = Ancestral polymorphism is L, Derived polymorphism is I
  VARIANT 104: note = Ancestral polymorphism is P, Derived polymorphism is S
MSGSAFNAFKSRVPVAWSPRLYITLVRGLPGTRRLHRRTLEAMRLRRCHRTVEHRTTPSLLGMLTQVKRLVAVETEEMYNARKQAEAERRAPRPPLVVSHQPQPPAPKPAAAAAGIRSLSSQFSGIIIDLPVFGSAGFQTIALGLLAQRDLATDLIDLLKIVVWCNLH

SEQ ID NO: 13295 - protein, 419 aa, Zea mays
  VARIANT 246: note = Ancestral polymorphism is P, Derived polymorphism is L
MASAAAALYRSPSLLSRRHLLIRLLSTQTQLVTPPTPTTPADLSRLKSSIRDAATTPDALATLFLSGLPHPAFLADRPLFALSVHRLASAGRRDLVASVLSSSLTALPSPHPSEGFLLRLISLYSAAGMPDHSLAVFRLVKPASDRALSALLSAYHDNRLYDRTVRAFNTLPAELGIKPGLVSHNVLLKALVASGDVAAAHTLFDEMPDTAGVQPDIVSCNEILKGYLNAGDADAFDRLVKEIAGPKRRLKPNVGTYNLRMALLCSKMRSFEAEELLDVMGANGVPPNRTSFNTVIKGLCNEGEVGAAMALFKRMPEVPRQHGKGVSPNFETYIMLLEALVKKNLFDPALEICKECLRNKWAPPFQAVKGLVQGLLKSRKAKHAREVFMAMRKAVKGDAKQEWIKVEAQFPMLLADKKA

SEQ ID NO: 13296 - protein, 524 aa, Zea mays
  VARIANT 50: note = Ancestral polymorphism is S, Derived polymorphism is L
  VARIANT 148..524: note = Derived polymorphism lacks residues 148 to 524
MQSIATAAALQLLCRPSLSAAQLRQVDGHLLRSSTLLLADRFLPNQLLRSLLPAHPLGALRLFPRLRRIIPDFRPNNYTFSFLLKAAADSSAPPYLEPESPFGSHAIVPCLHALAVVLAWDAHAYVANGLIHAYATHGVLPAARRLFGGAVASRAADVCSWTSLLTACAKAGHVDEARALFDGMPRRNDVAWSAMLSAYVAAGSFGDAVRLFEDMLRSCVRPNRAAVVGVLTACGALGALDQGRWVHALLVGGGGHGVAMDGVVATALVDMYAKCGSLETARQVFAAAPRGQRDVFAYTAMISGLSDHGRCGEAIDLFGQMLVEGVRPNEVTFICVLTACGRAGLVGRAKEVFRSMGAVHGMEPGVEHYGCLVDVLGRAGQLADALEAVRSMPMRPDSYVLGALLNACAAHGDVEAGEQVVRWLAELGLDHSGVHVQLSNMYAGWGKWEEVLKVRRDMEERRVAKVPGCSMLEVGGVVCEFVAGDRSHPLMPEIMSASRDLHGQLRQLDHDYLSLGPLCLQSSL

SEQ ID NO: 13297 - protein, 470 aa, Zea mays
  VARIANT 149: note = Ancestral polymorphism is G, Derived polymorphism is E
  VARIANT 81: note = Ancestral polymorphism is A, Derived polymorphism is D
  VARIANT 78..470: note = Derived polymorphism lacks residues 78 to 470
  VARIANT 25: note = Ancestral polymorphism is E, Derived polymorphism is V
MQHARNRELREEVYRAYLTRASSSELDNTNIICQILKLRLEKAKLLGYKNYAEVSMAQKMATVERVEELLEKLRAASWDHAVKDMEDLKVFAKDSGSPEANDLTHWDLTFWSERLRESKYDINEEELRPYFALPKVMDGLFTLAHKLFGVTVEPADGLAPIWHSDVKFYCVKDSSSSPVAYFYFDPYSRPSEKRGGAWMNVVFSRSRVLARNGLAARLPVAHIVCNQTPPVGEKPSLMTFREVETVFHEFGHALQHMLTKQDEGFVAGIRGVEWDAVELPSQFMENWCYHKNTLLSIAKHYETGETLPEEIYAKLVAAKNFRAGTLSLRQIRFASVDMELHTSYDPNGSVSIYDVDQRVAERTQVLAPLPEDRFLCSFSHIFAGGYAAGYYSYKWAEVLSADAFSAFEDAGLDDEKVCFRAIEETGRRFRDTVLALGGGKSPLEVFVSFRGREPSPEPLLRQNGLLPVAA

SEQ ID NO: 13298 - protein, 443 aa, Zea mays
  VARIANT 316..443: note = Derived polymorphism lacks residues 316 to 443
MAAPTTSRRGPGGARNMDDENLTFETSPGVEVVSSFDQMGIKDDLLRGIYGYGFEKPSAIQQRAVLPIINGRDVIAQAQSGTGKTSMISLTVCQIVDTAVRDPGIRALPPRSEQYMVFSVYSRAELEFELASLLCSLRVQALILSPTRELASQTERVMLAIGDHLNVQVHACIGGKSIGEDIRRLENGVHVVSGTPGRVCDMIKRRTLRTRAIKLLVLDEADEMLSRGFKDQIYDVYRYLPPELQVVLISATLPHEILEMTSKFMTEPVRILVKRDELTLEGIKQFFVAVEKEEWKFDTLCDLYDTLTITQAVIFCNTKRKVDWLTEKMRTNNFTVSAMHGDMPQQERDAIMGEFRSGATRVLITTDVWARGLDVQQVSLVINYDLPNNRELYIHRIGRSGRFGRKGVAINFVRKDDIRILRDIEQYYSTQIDEMPMNVADLI

SEQ ID NO: 13299 - protein, 239 aa, Zea mays
  VARIANT 2: note = Ancestral polymorphism is L, Derived polymorphism is V
  VARIANT 6: note = Ancestral polymorphism is P, Derived polymorphism is L
  VARIANT 9: note = Ancestral polymorphism is R, Derived polymorphism is P
  VARIANT 54: note = Ancestral polymorphism is D, Derived polymorphism is Y
  VARIANT 97..239: note = Derived polymorphism lacks residues 97 to 239
  VARIANT 115: note = Ancestral polymorphism is E, Derived polymorphism is K
  VARIANT 167: note = Ancestral polymorphism is H, Derived polymorphism is Y
  VARIANT 200: note = Ancestral polymorphism is K, Derived polymorphism is N
MLSRKPVLPQQFLKFIEETYHQLTISLPDSFQYLQPLRYALASILRYLAPEFVDAKAERFDNRIHKGLFDLLLTWSEDSGSSWGHESSSDNRREIERYKSNQYTRSLDKFSFDREMTQQLAMNWVSMNIMPLLYGPCFDDNARKMSGRFQYKLSSRLAKDHPDLSEYLCKEIMHQVLAPWIENLNFVRLKESGWSERLLNSLYYVTWKHGDQFPDDIEKLWKQYSQYHPSFELLDHQRD

SEQ ID NO: 13300 - protein, 512 aa, Zea mays
  VARIANT 275: note = Ancestral polymorphism is V, Derived polymorphism is A
MDAAAVHKRKRPEEADPSAGELDLSAADAVEVLDLRAAKRLLLAFERRLRDNLEARMKYPDDPARFADSEIALHAETDRLRLLAGAPELFPDLVPIGLASSLASLLTHDNVDLAAAAASLLADLTDSEDPSDLAAVQALADALVDANALDLLVHNLSRFSETDPDEAEAVHNTLAVLENLLDLRPNLADKVCGGTKLLRWLLSRVKAREFDANKQYASEILAILLQNSPANQKRLGQINGVDALLQAVAMYKSRDPKTSDEEEMLENLFDCLCCVLMPLENKERFVKAEGVELMIIIMKQKKLAYSSATRTLDFAMTKFPPACERFVDVLGLKTAFAAFMGKIPVNKKNKKESYQEELEERIISLIASLFGGITKGSRRMRLLGKFVENECEKIDRLMELYTRYSDRVKEETERLDSLDLEDLEMDDDERYNRKLEAGLYTLQLIALILGHIWHSGNSQMRARVELLLKQNKLTKQDVKSILEEYHDNIGDLDGPEEKERAQVRTKEIIDAL

SEQ ID NO: 13301 - protein, 142 aa, Zea mays
  VARIANT 127: note = Ancestral polymorphism is P, Derived polymorphism is S
  VARIANT 115: note = Ancestral polymorphism is G, Derived polymorphism is E
  VARIANT 98: note = Ancestral polymorphism is T, Derived polymorphism is I
  VARIANT 88: note = Ancestral polymorphism is I, Derived polymorphism is V
  VARIANT 87: note = Ancestral polymorphism is T, Derived polymorphism is I
  VARIANT 85: note = Ancestral polymorphism is D, Derived polymorphism is N
  VARIANT 72: note = Ancestral polymorphism is S, Derived polymorphism is F
  VARIANT 48: note = Ancestral polymorphism is E, Derived polymorphism is G
  VARIANT 1: note = Ancestral polymorphism is M, Derived polymorphism is I
MHMTDFIFVDLILSSNCILLFVKIIRNKQTGHSEGYGFIEFSSRAAAEHTLMNFNGQMMSNVEMTFKLNWASASTGDKRGDSGSDHTIFVGDLAHGVTDSMLEDVFRAKYPSVRGANVVVDRMTGWPKGYGFVRFGDLNNAL

SEQ ID NO: 13302 - protein, 104 aa, Zea mays
  VARIANT 22: note = Ancestral polymorphism is A, Derived polymorphism is V
  VARIANT 23: note = Ancestral polymorphism is A, Derived polymorphism is T
  VARIANT 30: note = Ancestral polymorphism is A, Derived polymorphism is V
  VARIANT 52: note = Ancestral polymorphism is T, Derived polymorphism is A
  VARIANT 54: note = Ancestral polymorphism is L, Derived polymorphism is M
  VARIANT 61: note = Ancestral polymorphism is A, Derived polymorphism is V
  VARIANT 81: note = Ancestral polymorphism is Q, Derived polymorphism is R
  VARIANT 86: note = Ancestral polymorphism is S, Derived polymorphism is T
MKNYGLVTYHETALLFDEMHSAAANKQRVAVVVAHELAHQWFGNFVTMEWWAHLWLNEGFATWVSYLAADQFFPEWNVWTQFLEESTIGFKLDALAGSHPIEVT

SEQ ID NO: 13303 - protein, 232 aa, Zea mays
  VARIANT 182: note = Ancestral polymorphism is G, Derived polymorphism is D
  VARIANT 162: note = Ancestral polymorphism is G, Derived polymorphism is S
  VARIANT 115..232: note = Derived polymorphism lacks residues 115 to 232
  VARIANT 113: note = Ancestral polymorphism is P, Derived polymorphism is S
  VARIANT 108: note = Ancestral polymorphism is T, Derived polymorphism is S
  VARIANT 77: note = Ancestral polymorphism is W, Derived polymorphism is S
  VARIANT 73..232: note = Derived polymorphism lacks residues 73 to 232
  VARIANT 72: note = Ancestral polymorphism is G, Derived polymorphism is R
  VARIANT 65: note = Ancestral polymorphism is G, Derived polymorphism is S
  VARIANT 36: note = Ancestral polymorphism is P, Derived polymorphism is S
  VARIANT 34: note = Ancestral polymorphism is P, Derived polymorphism is L
MAYGDRVTTFEDSEKESEYGYVRKDMKHWPLIAPLSSYGRGRDEPGPRYNNFIGGSNLTDVIITGKNGTINGQGQVWWDKFHAKELKFIRGHLLELLYSDNIIISNVTFVNAPYWNLHPTYCTNVTISGVTIPAPVNSPNTDGIGPESSSRVKVEDCYIISSDDCVAVKSGWDEYDISEMSDDICDVRAEDSVAINTESGIRVKTLGAIAGVLLSNELVAAALFTHAINHKQ

SEQ ID NO: 13304 - protein, 92 aa, Zea mays
  VARIANT 29: note = Ancestral polymorphism is P, Derived polymorphism is S
  VARIANT 65..92: note = Derived polymorphism lacks residues 65 to 92
  VARIANT 82: note = Ancestral polymorphism is E, Derived polymorphism is K
MSASPASAPAENAGAGPRAGDDVASLQPPKRAKVGCTEADTAKPSMAPAEVGTVAGPLPNTAGLQALTGAMDKLEALLRPKEGQSNPGWLLI

SEQ ID NO: 13305 - protein, 117 aa, Zea mays
  VARIANT 66..117: note = Derived polymorphism lacks residues 66 to 117
  VARIANT 52: note = Ancestral polymorphism is E, Derived polymorphism is K
MAQKNTRSRRQKKLKAYDLSALSESLSEPGAPKQKPEAKLNCKSRQTLVLREAAHLKAVLGKMQFQLDPFAAIHQHLLATQPPAAAKGDAVKEGKDSKNKKRRRKKGASSSSQAMDI

SEQ ID NO: 13306 - protein, 217 aa, Zea mays
  VARIANT 77: note = Ancestral polymorphism is T, Derived polymorphism is M
  VARIANT 78..217: note = Derived polymorphism lacks residues 78 to 217
  VARIANT 84: note = Ancestral polymorphism is R, Derived polymorphism is C
  VARIANT 92: note = Ancestral polymorphism is L, Derived polymorphism is R
  VARIANT 120..217: note = Derived polymorphism lacks residues 120 to 217
MECELEELQFLGVVGIYRFSAEILRGPHCPLFACIAAAFALPLSALFLLHVAISHALFTHIDSDDTALDASSPGTDTQRRLLSRLASDWLALLLFKSAYLLALLLLSLLSVVASVYRQARRAHLPARALCRAPRLAEARRHVPRHLRAPLRLPRLRRARLRRPPRRRGQRLRPRGPARLPRRRQARNSVLMGHKGNTCSGLNIFGFRANFFQTSKEI

SEQ ID NO: 13307 - protein, 301 aa, Zea mays
  VARIANT 27: note = Ancestral polymorphism is T, Derived polymorphism is M
  VARIANT 54..301: note = Derived polymorphism lacks residues 54 to 301
MGYLFSILHFQLMIRLSENTLMAHLSTFLPALMDAKVKKVQTKKAPAPKIAKQESSDDDTSDETSESDEMPIHLLIKEHAKKPAAKPLATVAKNGSKTVKQESSSDEDSSEDESDDNSDDEPAKKAAAKPWVPLLKMEVPPKSKAPAATIKKKDSSESESESDSEVEEALSAAKKESSSEDEDDSSEESSDDEPTKVEEKKDPKVSENIGSEDESSKDESDKDSEEPANTPKKAPVHTSEKQTATKEKAARGNNISIFIWGFDKNISEDEIWSSLEQHFSDCGEMTRVSIPTDHEPGAIKG

SEQ ID NO: 13308 - protein, 180 aa, Zea mays
  VARIANT 123: note = Ancestral polymorphism is A, Derived polymorphism is T
MRLRSRAIFPLVRTTATTTSAASSSPAVLSIGHALRERRLFTGDDVAAYAAISGDRNPVHLDDAVARELSGFQRGRVVHGMLVASLFPSIIAGSFPGAVYASQTLKFAAPVYVGDEVVARVQALNIRTTAAATNSCTARRYVVKFATKCFMDEEEGSVAIEGEAMAVLPTLELSSQSTRN

SEQ ID NO: 13309 - protein, 90 aa, Zea mays
  VARIANT 46: note = Ancestral polymorphism is V, Derived polymorphism is L
  VARIANT 35: note = Ancestral polymorphism is C, Derived polymorphism is G
  VARIANT 31: note = Ancestral polymorphism is M, Derived polymorphism is V
MERLRRRGALHLHDLDACCRDHNCVEKKGMMSVKGHEKLKNCMRKVKKARKVGFSKKCPYDMAMATMAQGWIWPTCSAKLHLRSSQLHDE

SEQ ID NO: 13310 - protein, 165 aa, Zea mays
  VARIANT 124: note = Ancestral polymorphism is T, Derived polymorphism is A
  VARIANT 92: note = Ancestral polymorphism is D, Derived polymorphism is Y
  VARIANT 34..165: note = Derived polymorphism lacks residues 34 to 165
METSLRLRSGGGLRIHAKEKLPLGHSSLLQAHAELDLHTSPAGVTTPSYLALFVRHFYSQLSANLGAGVQLHNGDDLAYSFRAKKAVLFKPDNGFLGLNLKGRLLTDKELKPTKTTGSVELAWTILDLKQGQDVRLKVGYELCDKVIRPFLFPADAKCSTGKQAT

SEQ ID NO: 13311 - protein, 134 aa, Zea mays
  VARIANT 57: note = Ancestral polymorphism is T, Derived polymorphism is I
MDLEHNIHTPLSPYAAQKYQTFHELVNNLQNSRADKDKWTHPWGNSTFSSSKFYSLTFQSIQPPAAFNWIWQSKAGSMLKDVYIDEDVSPRIKVEWMKWCQAFGVLYDKRVPHKLKGKFYRTALRPAMLYGVEY

SEQ ID NO: 13312 - protein, 621 aa, Zea mays
  VARIANT 404..621: note = Derived polymorphism lacks residues 404 to 621
  VARIANT 152..621: note = Derived polymorphism lacks residues 152 to 621
MATIGLVPSTVVASTAIRAPAPAALTRASNRQPPHARRLLDLGRRAPAMDALRVSGAAEPLLRPAAAGGHPRLRVRRPTDPPVPPRLNIALAHPCYSGGGTRRLSLVVKGLTRWRMCRCGPVRSRAMAAPRRRGTPRSRGRPSSSRKPVSLQLSALMDHCSEPRFLFPALGGLLFGYDIGATSGATISVQSPDLSGTDWFSLSSLQLGLVASGSLYGALGGSLLAYRIADFLGRRIELVTAAALYILGALVTGFAPNFVALIIGRVLYGIGIGLAMHGAPLYIAETSPSQIRGTLISLKELFIVLGILLGYLVGSLEIDNVGGWRYMFGFSAPLAAIMAIGMWTLPSSPRWLLLRAVQGKASLEDNKKKAIQALRTLRGRTASEKVLADDVDDTIVSIKAAYAGQEAEGNVWDVFEGASLKAFTIGGGLVLFQQITGQPSVLYYAASILQTAGFSAASDAAKVAILIGLFKLLMTGVAVFKVDDVGRRPLLIGGVGGIALSLFLLAAYYKILNNFPFVAVGALLLYVGAYQVSFGPISWLMVSEIFPLRTRGRGISLAVLTNFGSNALVTFAFSPLKELLGPANIFFLFGVIAVLSLVFVILVVPETKGLSLEEIESKILK

SEQ ID NO: 13313 - protein, 461 aa, Zea mays
  VARIANT 389..461: note = Derived polymorphism lacks residues 389 to 461
  VARIANT 322..461: note = Derived polymorphism lacks residues 322 to 461
  VARIANT 225..461: note = Derived polymorphism lacks residues 225 to 461
  VARIANT 170: note = Ancestral polymorphism is W, Derived polymorphism is R
  VARIANT 133: note = Ancestral polymorphism is P, Derived polymorphism is L
MARLPLSTRTRKRNLRFRNVTSAIMLMYYYILALLVLSHKWKFWKIEMMIKIKELRSQRMYHLICESDVKCINDLRMDRRTFHILCDMLRDVGGLRNRTIGGFFLRSGETVSRNFNACLLAVLKLHQLLLKKPEPIPEGCTDFRWKHFKDMNQSESSSVARGRGKNKRIWTYYEDEELIKALYEISLDPKWKSEGGFKNGYCSVLENELKARLPGCGLSAIPHIESRVRHFRTKYGAIDVMLAKSGFNWDDNRKMVQCEKQQYEAHCKDNPDAKGLYGIAFPHFDTLAAIYGKDIATGEGAEGLGEAVTNMEKEIAMGEDCQVVEEDKISMYTPQRSMDNRNSDHSTSSSNKRRKKHKDSMSSDPFLDLASGIRGDHNKASQHFGMMAEVMEMEAKKDQMQELQEKSVVDLTRLGFRGSELLKAVDVFVKVPNHMTMLFAIPETLRREFILNMIADEAQKK

SEQ ID NO: 13314 - protein, 372 aa, Zea mays
  VARIANT 69: note = Ancestral polymorphism is T, Derived polymorphism is S
MGFPSTPNLKLEPRPRTRRLLRCALSSEPVQPPMTVSITGATGFIGRRLVHKLLSGLLPSLAHYWTGFTYCLPSLSHHIHTHVSLHPDDHKVCILTRSASKAASVFPASTYPGLTIAQQGDWEACVRGSTAVVNLAGMPISTRWSPEIKQEIKQSRVNVTSKVCREWEATACQVNQEDVRLVLLRIGVVLGKDGGALGCCVSFNSFSPLLSFYFPSSREGPFQSTLLIHLVHLSICSKDDTPFYDVCWWSSGDGTPMHSSNDVVLADFGVHDTLYGMILYIESSLTFCLLGVINGTAPNPVRLSELCERLGRIVGRPSWLPVPGFALKAVLGEGASVVLEGQKVVPAKAKDLGFSYRYPYVEDALKAIARDL

SEQ ID NO: 13315 - protein, 584 aa, Zea mays
  VARIANT 38..584: note = Derived polymorphism lacks residues 38 to 584
  VARIANT 9: note = Ancestral polymorphism is R, Derived polymorphism is Q
MRLRLLLLRYLALPLRLLLLLRLRRLPLPRPPEAMRRRHSRAKWEPKSLEKSNITDSFSLMDSLEEENKVPVDESQLDKDATFDNGSPLNTNIVVQEDYICTDADLALIDWIKEIPCEPRVEVVLIDDACVERKWIECLFQPGAYLGDEVIDCYINLIKTTQQLKCRSGGRVHIENAFQFNFLKRDGDVKTKTDELYPITDMAQICSAERRVLLYLDHDMVFIPINIRGTHCSSCGLFLLNYIEYWTGDELSDSFTQDDMSHFRKKLAAILLSSYMNKRRGYPIYKYDKEVHTGSPSDVEILDSPTNHKKRKLLHVLDNSEVLMEDEDGPITQADLQRWFVDEWDKRTPTKVSADGCTDDFLMSGLSTKDMSVTKADLIDVLCDYIMAIQDDRTLEMIWVRSFNPFKIEISVKDLQNILSINLDTTLKCFDMAVRLLANKESRRPKGEIIKNRKHYMDMRFWRMTGFGKLPKYHQDPTAEELTKTLDCWPSMNYYITACKYVLMPWKFNGCYALFVIDHGKNTSLLLTLHLFKIGVSICHARGSQKRLSSLQRNIRLPIARNVLDGQRIFLSGNIQFNLVFQLT

SEQ ID NO: 13316 - protein, 100 aa, Zea mays
  VARIANT 22: note = Ancestral polymorphism is A, Derived polymorphism is T
MTMTRTMCLGLLLLLLAAASTTTAHFTVGDVDEYVSKRTQESRHRNNGGAGIDDLISSAARFHANVDARAYGRRSDLQEEATATVITKAEAQEASAEGGD

SEQ ID NO: 13317 - protein, 187 aa, Zea mays
  VARIANT 8: note = Ancestral polymorphism is G, Derived polymorphism is R
  VARIANT 16: note = Ancestral polymorphism is R, Derived polymorphism is C
  VARIANT 20: note = Ancestral polymorphism is R, Derived polymorphism is C
  VARIANT 32: note = Ancestral polymorphism is P, Derived polymorphism is L
  VARIANT 34: note = Ancestral polymorphism is D, Derived polymorphism is N
  VARIANT 35: note = Ancestral polymorphism is C, Derived polymorphism is Y
  VARIANT 46: note = Ancestral polymorphism is G, Derived polymorphism is R
  VARIANT 53: note = Ancestral polymorphism is T, Derived polymorphism is M
  VARIANT 56: note = Ancestral polymorphism is A, Derived polymorphism is V
  VARIANT 57: note = Ancestral polymorphism is A, Derived polymorphism is P
  VARIANT 64: note = Ancestral polymorphism is R, Derived polymorphism is H
  VARIANT 68: note = Ancestral polymorphism is R, Derived polymorphism is H
  VARIANT 73..187: note = Derived polymorphism lacks residues 73 to 187
  VARIANT 81: note = Ancestral polymorphism is R, Derived polymorphism is H
  VARIANT 82: note = Ancestral polymorphism is P, Derived polymorphism is H
  VARIANT 87: note = Ancestral polymorphism is P, Derived polymorphism is L
  VARIANT 93: note = Ancestral polymorphism is A, Derived polymorphism is T
  VARIANT 98: note = Ancestral polymorphism is L, Derived polymorphism is V
  VARIANT 107: note = Ancestral polymorphism is V, Derived polymorphism is M
  VARIANT 113: note = Ancestral polymorphism is R, Derived polymorphism is H
  VARIANT 114: note = Ancestral polymorphism is P, Derived polymorphism is L
  VARIANT 116: note = Ancestral polymorphism is T, Derived polymorphism is K
  VARIANT 132: note = Ancestral polymorphism is A, Derived polymorphism is T
  VARIANT 146..187: note = Derived polymorphism lacks residues 146 to 187
  VARIANT 183..187: note = Derived polymorphism lacks residues 183 to 187
MATGSAAGEESSAAARRLRRLSLHLLQPAPAPTDCHHQPLALVACGRCVEGDTDMAAALVAYLRGQHRAAQMWLFDFFRAHPDLQTPVELPTAAHHDLCYRQLRALVHEAGVRPLTLMATDPAEYFAVMEAAGGADISLDVKLGVQYSLWGGSVINLGTKKHRDKYFDGIDNLDYPGCFAMTELHHG

SEQ ID NO: 13318 - protein, 99 aa, Zea mays
  VARIANT 40..99: note = Derived polymorphism lacks residues 40 to 99
  VARIANT 59: note = Ancestral polymorphism is R, Derived polymorphism is S
MCLYHLEKLEEEIIDAKYTLTCDRIVSLKDKARKIEESIELTRRDMVHPTEVEIELKKRLDQLTDRLIQKQMQVESLSSEKAALSMRIKVCLYRPTHCI

SEQ ID NO: 13319 - protein, 128 aa, Zea mays
  VARIANT 93: note = Ancestral polymorphism is C, Derived polymorphism is Y
  VARIANT 75: note = Ancestral polymorphism is R, Derived polymorphism is W
  VARIANT 74: note = Ancestral polymorphism is P, Derived polymorphism is S
  VARIANT 4: note = Ancestral polymorphism is Q, Derived polymorphism is L
MRTQALFFLALALIGAVLAQSSNRHHHHYHHAHVQGKGQGAGGGGGELASRAKAAARAWPCCDSCGGCTRSEPPRCQCLDAAPRGCHPACRDCVKSSLSADPPVYQCMDRVPNFCQRRCTAAAAAAAH

SEQ ID NO: 13320 - protein, 169 aa, Zea mays
  VARIANT 166: note = Ancestral polymorphism is L, Derived polymorphism is S
  VARIANT 147..169: note = Derived polymorphism lacks residues 147 to 169
  VARIANT 143: note = Ancestral polymorphism is L, Derived polymorphism is P
  VARIANT 128..169: note = Derived polymorphism lacks residues 128 to 169
  VARIANT 101: note = Ancestral polymorphism is R, Derived polymorphism is S
  VARIANT 93: note = Ancestral polymorphism is T, Derived polymorphism is N
  VARIANT 50: note = Ancestral polymorphism is G, Derived polymorphism is S
  VARIANT 44: note = Ancestral polymorphism is G, Derived polymorphism is R
  VARIANT 27: note = Ancestral polymorphism is G, Derived polymorphism is W
  VARIANT 25: note = Ancestral polymorphism is R, Derived polymorphism is Q
  VARIANT 24: note = Ancestral polymorphism is R, Derived polymorphism is M
  VARIANT 1: note = Ancestral polymorphism is M, Derived polymorphism is I
MGHGKVELKKIENPTNRQVTFSKRRMGLFKKANEVSILCDAQIRVIIFSGSGRMYEYSSPPWRIASVFDRYLKAPSTHFEEMDIQQKIIQEMTRMKDERNSLRMIMARYMAEDLASFSVQDLSNLEQQIEFSLYKVHLRKQELLDQQLLEIRQREMHMPAEQGGYLCLM

SEQ ID NO: 13321 - protein, 164 aa, Zea mays
  VARIANT 153: note = Ancestral polymorphism is S, Derived polymorphism is F
  VARIANT 151..164: note = Derived polymorphism lacks residues 151 to 164
  VARIANT 129..164: note = Derived polymorphism lacks residues 129 to 164
  VARIANT 119: note = Ancestral polymorphism is G, Derived polymorphism is S
  VARIANT 113: note = Ancestral polymorphism is P, Derived polymorphism is S
  VARIANT 88: note = Ancestral polymorphism is W, Derived polymorphism is R
  VARIANT 84: note = Ancestral polymorphism is A, Derived polymorphism is T
  VARIANT 79..164: note = Derived polymorphism lacks residues 79 to 164
  VARIANT 76: note = Ancestral polymorphism is P, Derived polymorphism is L
  VARIANT 68: note = Ancestral polymorphism is G, Derived polymorphism is D
  VARIANT 56: note = Ancestral polymorphism is A, Derived polymorphism is T
  VARIANT 54: note = Ancestral polymorphism is A, Derived polymorphism is T
  VARIANT 50: note = Ancestral polymorphism is R, Derived polymorphism is C
  VARIANT 47: note = Ancestral polymorphism is A, Derived polymorphism is T
  VARIANT 37: note = Ancestral polymorphism is L, Derived polymorphism is P
  VARIANT 36: note = Ancestral polymorphism is P, Derived polymorphism is S
  VARIANT 34: note = Ancestral polymorphism is G, Derived polymorphism is V
  VARIANT 30: note = Ancestral polymorphism is A, Derived polymorphism is T
  VARIANT 29: note = Ancestral polymorphism is R, Derived polymorphism is C
  VARIANT 26: note = Ancestral polymorphism is A, Derived polymorphism is V
  VARIANT 24: note = Ancestral polymorphism is A, Derived polymorphism is T
  VARIANT 21: note = Ancestral polymorphism is P, Derived polymorphism is S
  VARIANT 19: note = Ancestral polymorphism is T, Derived polymorphism is M
  VARIANT 14: note = Ancestral polymorphism is C, Derived polymorphism is Y
  VARIANT 9: note = Ancestral polymorphism is V, Derived polymorphism is I
  VARIANT 6: note = Ancestral polymorphism is P, Derived polymorphism is L
MATVALASIEGFNCAANRTYPCQAYVLYRAGFAGVPLDLAAIGDLFAVSRFMVAHASNLSTTAAPANGSRCSSYTPMQYQIGPADTYWIVSTTKLQNLTQYQAVEHVNPTLVPTDLDVGTMVTFPVFCQCPAATDNVSALVTYVMQPGDTYASVAAAFSVAYPQ

SEQ ID NO: 13322 - protein, 476 aa, Zea mays
  VARIANT 110: note = Ancestral polymorphism is L, Derived polymorphism is Q
  VARIANT 145: note = Ancestral polymorphism is A, Derived polymorphism is G
  VARIANT 164: note = Ancestral polymorphism is A, Derived polymorphism is S
  VARIANT 399..476: note = Derived polymorphism lacks residues 399 to 476
MAQTTMAAASELVTLKRPFGKDVSGSGDGSVAEEKPKAPARRREAEDPAAALAAARHEFGEHGGVNMSIEASATFTVMEPETMRRLFAGELGPDRGGMYIYSRHFNPTVQALGRQMAALEGTEAAYCTASGMSAISSVMVQLVGAGGHVVASRCLYGGTHALLARFLPRAAGVRATFVDVDDEAAVRAAVVPGETRVVFVETMSNPTLAVADIPMLARVAHEAGAKLVVDNTFTPVVVSPARLGADVVVHSVSKFISGGGDIIAGAICGPASLVNAMMDLQEGALMLLGPTMNAKMAFELWERLPHLPLRMQEHSRRALAFAARMQRLGLRVLYPGLPDHPHHARLAAMRNPGYGSGGMLCVDMGTEERANRLMHHLQNTTQFGLMAVSLGYYETLVSCSGTSTSSEMPPQDRERAGISPGLVRMSVGYNGTLEQRWAQLERALALMQPPPPPRHHHLKGAADRDGPDAANNHGKH

SEQ ID NO: 13323 - protein, 129 aa, Zea mays
  VARIANT 10: note = Ancestral polymorphism is A, Derived polymorphism is V
  VARIANT 23: note = Ancestral polymorphism is V, Derived polymorphism is A
  VARIANT 24: note = Ancestral polymorphism is A, Derived polymorphism is T
  VARIANT 36: note = Ancestral polymorphism is A, Derived polymorphism is T
  VARIANT 39: note = Ancestral polymorphism is S, Derived polymorphism is F
  VARIANT 42: note = Ancestral polymorphism is D, Derived polymorphism is H
  VARIANT 43: note = Ancestral polymorphism is E, Derived polymorphism is D
  VARIANT 57: note = Ancestral polymorphism is G, Derived polymorphism is D
  VARIANT 58: note = Ancestral polymorphism is T, Derived polymorphism is K
  VARIANT 89..129: note = Derived polymorphism lacks residues 89 to 129
  VARIANT 92: note = Ancestral polymorphism is L, Derived polymorphism is V
MHCPSGFGTAMEEQFILRVPPSVAERIERLMNESAASSSNPHEASLDLSFSEDGRNDTFMIGNESFPASLLDLPAVVESYKIYDASVLLKLLMLVRQSWLTKLRSILSVSCMEYLSVSFYFLLLPLAKW

SEQ ID NO: 13324 - protein, 229 aa, Zea mays
  VARIANT 163: note = Ancestral polymorphism is A, Derived polymorphism is V
  VARIANT 145..229: note = Derived polymorphism lacks residues 145 to 229
  VARIANT 38: note = Ancestral polymorphism is G, Derived polymorphism is D
  VARIANT 14: note = Ancestral polymorphism is L, Derived polymorphism is H
MMSGVVPSSLHVLLRAERALRDRDVGEVHIPLSELLSGAPDGPVPAKFVAYQVRKISSGKPQGVLNLSYKLGEVANGYAPAPPPSPPTPSLHRPPRTRLLQARLMPTRLPPRTRLLQARPTRLQCCRCRTLQLIPHSLQFSMVDQYVYDSVPPEKAQAIMLIAAAAAAAAATKGSAATAFNPPMSTSVAAGQAQVVADPSSISKLHADLPIARRHSLQRFLEKRRDRLA

SEQ ID NO: 13325 - protein, 156 aa, Zea mays
  VARIANT 144: note = Ancestral polymorphism is G, Derived polymorphism is R
  VARIANT 53: note = Ancestral polymorphism is I, Derived polymorphism is T
  VARIANT 31: note = Ancestral polymorphism is D, Derived polymorphism is N
  VARIANT 27: note = Ancestral polymorphism is D, Derived polymorphism is E
MNGAHESGVPSGIVPNLQNIVSTVNLDCKVDLQHVANSARNAEYNPRRFGAAIMRIREPKTTALIFATGKMFARIVQKLGFPARFKDFKVQNIVGSCDLKFPIRLEGLALASGLSATKQDNLAKETGWLLVEQNPAMKGGFRDGGTELAAFNFAVA

SEQ ID NO: 13326 - protein, 191 aa, Zea mays
  VARIANT 140: note = Ancestral polymorphism is S, Derived polymorphism is G
  VARIANT 131..191: note = Derived polymorphism lacks residues 131 to 191
  VARIANT 99..191: note = Derived polymorphism lacks residues 99 to 191
  VARIANT 93..191: note = Derived polymorphism lacks residues 93 to 191
MTLSGSAKPNLLQWYYSTLDNSPLQKDSRQATKIPRKIDSKHGKNGLIHPSIHSKMPAEFGWLCILVLTGTNLNSGLLNVITFTANVAVRNGQKPRDIQAIVPSRATAAARTFSTILLESPSSDSLLPHVWEVQNKRLSGMLSIRDTGGSSVCLCPWGRRAGLRILCGRRIWKVEIVGRQNQAEAAYPLEP

SEQ ID NO: 13327 - protein, 201 aa, Zea mays
  VARIANT 175..201: note = Derived polymorphism lacks residues 175 to 201
  VARIANT 73: note = Ancestral polymorphism is L, Derived polymorphism is H
MVVAAPGILPWPHLPLPSSSHPSDASDAAAAATDANTSAYDIQIFEPTSIEERRRLLIQRRRLRLAASHASRLTVASRVSSKLISTTASCSSGVASDLPPPLLMARRCLPPLPQPRPCRPWRIPNPTTSSVGPRRRGCAMNFRQHIPTEKYEKYTSEHVKAKEGSCAASKISSKKATRDNKPDKGRNMFWINIGLCFKTPR

SEQ ID NO: 13328 - protein, 375 aa, Zea mays
  VARIANT 14..375: note = Derived polymorphism lacks residues 14 to 375
  VARIANT 62..375: note = Derived polymorphism lacks residues 62 to 375
  VARIANT 136..375: note = Derived polymorphism lacks residues 136 to 375
MEAIRKQASKFREQVARQQQAVMKQFGGGYGADGVFANEAEAQQHSKLEKLYISTRAAKHFQRDIVRGVEGYIVTGSKQVEIGNKLCEDGKKYGTENTCSSGSTLSKAALSFAKARSMMEKERGNLLKALGTQVAEPLRAMVMGAPLEDARHLAQRYDRMRQEAEAQVISLFLQAIEVSKRQMKLREASGNSDMVSRLEAAESKLQELKSNMGVLGKEAVAAMTAVEAQQQRLTLQRLIALVESERNYHQKVLQILDQLEREMVSERQRIEGAPPVVESSMPPPPAYEEVNGIFMRNTVAELVETVEYFLAEAIQSYQAESDTELNLSTGDYIVVRKVSNNGWAEGECRGKAGWFPYDYIEKRERVLASKVAQVF

SEQ ID NO: 13329 - protein, 532 aa, Zea mays
  VARIANT 49: note = Ancestral polymorphism is L, Derived polymorphism is R
MAAAVANIGMEWLQDPLSWVFLGTVCLVVLQQLRRRRGKAPLPPGPKPLPIVGNMGMMDQLTHRGLAALAETYGGLLHLRLGRLHAFAVSTPEYAREVLQAQDGAFSNRPATAAIAYLTYDRADMAFAHYGPFWRQMRKLCVMKLFSRRRAETWAAVRDECAALVRAVAVGGGSGGEAVNLGELIFSLTKNVTFRAAFGTRDGEGQEEFIAILQEFSKLFGAFNVGDFLPWLGWMDLQGINRRLRAARSALDRFIDKIIDEHVRRGKSPDDADADMVDDMLAFFVEATPGKATGAAAAADGGDDLHNTLRLTRDNIKAIIMDVMFGGTETVASAIEWAMAEMMHSPDDLRRVQQELADVVGLDRNVSESDLDRLPFLRCVIKETLRLHPPIPLLLHETADDCVVAGYSVPRGSRVMVNVWAIGRHRASWKDADAFRPSRFAAPEGEAAGLDFKGGCFEFLPFGSGRRSCPGMALGLYALELAVAQLAHAFNWSLPDGMKPSEMDMGDIFGLTAPRATRLYAVPTPRLNCPLY

SEQ ID NO: 13330 - protein, 214 aa, Zea mays
  VARIANT 132: note = Ancestral polymorphism is A, Derived polymorphism is T
MAEILVRRAGSTDEFTRLTSITWINEFVKLGGEQLVPYYADILGAVLPCISDEEEKIRVVARETNEELRAIKADPAEGFDIGAILSIAKRELNSEHEATRIEALHWFFTLLDRYCAEFLAYLNDIFDPLLNALSDPSDAPAHEKIGVVDSQWIVHQVIPSLGNQGQSENGRAPWEGLRERCRKEWGLFQTRMAEAEKAYYEMMGITPPNVIFVS

SEQ ID NO: 13331 - protein, 98 aa, Zea mays
  VARIANT 33: note = Ancestral polymorphism is D, Derived polymorphism is N
  VARIANT 51..98: note = Derived polymorphism lacks residues 51 to 98
  VARIANT 56: note = Ancestral polymorphism is A, Derived polymorphism is T
  VARIANT 58: note = Ancestral polymorphism is S, Derived polymorphism is F
  VARIANT 62..98: note = Derived polymorphism lacks residues 62 to 98
MNVLNPYVRQFLVGWITMLDSVPDIDMLGFLPDFLDGLFNMLSDSSHEIRQQADAALFEFLQEIKNSPGWDRDAHDQGAVGNSSFPTVLNCVVNSQHA

SEQ ID NO: 13332 - protein, 530 aa, Zea mays
  VARIANT 235..530: note = Derived polymorphism lacks residues 235 to 530
MGQCYARNVHGVDADDGGVGATTITVSAAGGPEDAASVGGGGGRGGGRRSARPSPAGTPRGGRAGAGATPARSSAAGSPWAPGLPDGIAPSPATSVSTPRRFFRRPFPPPSPAKHIKASLARRLGHRSPASASQVPMPPVEVPIQEHGAGGAGGGAGQRELDKSFGYDRQFAAKYELGKEVGRGHFGHTCLVRARKGDMRGQVLAVKVISKAKMTTAISIEDVRREVKILKALSGHSNLVKFYDACEDALNVYIIMELCEGGELLDRILSRGGRYNEGDAKIIVEQILKVVAFCHLQGVVHRDLKPENFLFSTREEHSPMKIIDFGLSDFIRPAHPWLRDEQQQIPLDMLVFKLVKAYLVSTPLKRAALKALSRAITQDELIYIRAQYNLLEPNSADGRICIDNFRMALLQNCTDAMKESRTLEILHALEPLAYRRMDFEEFRAATISPYQLEAVPRWEEIASTAFGYFEQEGNRAITIEELAQEMNLSAAAYSVVRDWIRPSDGKLSFLGYTKFLHGLTMRSGNARRHH

SEQ ID NO: 13333 - protein, 76 aa, Zea mays
  VARIANT 65: note = Ancestral polymorphism is W, Derived polymorphism is C
  VARIANT 63: note = Ancestral polymorphism is E, Derived polymorphism is K
MAHRVDNEYDYLFKIVLIGDSGVGKSNILSRFTRNEFCLESKSTIGVEFATRTLQVEIEIVMELWVIFIQALKKNN

SEQ ID NO: 13334 - protein, 285 aa, Zea mays
  VARIANT 232: note = Ancestral polymorphism is M, Derived polymorphism is T
MAKDGGPDWNGLFKWSIAHGDGTNPPRALSEEDRKWFMEAMQANTIDVVKRMKEITRVMRTPQDVLQSQGVTPENIEDMLDELHEHVESIDMANDLHSIGGLDPLLGYLKNSNAGIRAKAAEVVSTVVQNNPKSQQLVIESNGLEPLLINFKSDPSTNARTKALGAISSIIRHNQPGVSAFRLGNGYAGLKDALGSYDAKLQWKALNLIQYLLHNKADRSFATELGLPKLMMHLAASDDHLVREAALSGLLELSQDQTSGNALPDQDKLKRDPEEPNRRDQCDGL

SEQ ID NO: 13335 - protein, 164 aa, Zea mays
  VARIANT 50..164: note = Derived polymorphism lacks residues 50 to 164
  VARIANT 76: note = Ancestral polymorphism is T, Derived polymorphism is M
MCHLRVSLLYKASAPLHLTPSEATTLGRSVLRLSNTDLEVCDTSDELLHQVDAWFKGRSRVASRRSPSWCCCNRATRKRLLEGVAMKVAEMVKEVKKSRKGRSNMGGEIVLFRKQTLSFVSHSPDCIYRSFAQGFWLGVSCLVILVQANLVTCCLKVVSAKRSS

SEQ ID NO: 13336 - protein, 377 aa, Zea mays
  VARIANT 134: note = Ancestral polymorphism is M, Derived polymorphism is I
  VARIANT 190: note = Ancestral polymorphism is S, Derived polymorphism is Y
  VARIANT 193: note = Ancestral polymorphism is K, Derived polymorphism is T
  VARIANT 200: note = Ancestral polymorphism is Y, Derived polymorphism is H
  VARIANT 235: note = Ancestral polymorphism is S, Derived polymorphism is T
  VARIANT 241: note = Ancestral polymorphism is S, Derived polymorphism is T
  VARIANT 299: note = Ancestral polymorphism is I, Derived polymorphism is T
  VARIANT 303: note = Ancestral polymorphism is G, Derived polymorphism is C
  VARIANT 314: note = Ancestral polymorphism is R, Derived polymorphism is S
MADAEDIQPLVCDNGTGMVKAGFAGDDAPRAVFPSIVGRPRHTGVMVGMGQKDAYVGDEAQSKRGILTLKYPIEHGIVSNWDDMEKIWHHTFYNELRVAPEEHPVLLTEAPLNPKANREKMTQIMFETFSVPAMYVAIQAVLSLYASGRTTGIVLDSGDGVSHTVPIYEGYALPHAILRLDLAGRDLTDSLMKILTERGYSFTTTAEREIVRDIKEKLAYVALDYEQELETAKSSSSVEKSYELPDGQVITIGAERFRCPEVLFQPSMIGMEAPGIHETTYNSIMKCDVDIRKDLYGNIVLSGGSTMFPGIADRMSKEITALAPSSMKIKVVAPPERKYSVWIGGSILASLSTFQQMWISRAEYEESGPAIVHRKCF

SEQ ID NO: 13337 - protein, 460 aa, Zea mays
  VARIANT 215: note = Ancestral polymorphism is G, Derived polymorphism is V
  VARIANT 232: note = Ancestral polymorphism is G, Derived polymorphism is R
  VARIANT 239: note = Ancestral polymorphism is K, Derived polymorphism is E
MGLLPIHRIILLCFCSSSLLLPPPVSSDSRILPNKPLTVGSTLTSDDGTFALGFFSPSNPDKKHYYYVGIWYANIPKDNVVWVANRGTPIITDPSSATLALTNTSDLVLSSADGQTLWMANTSAAASSEPETTAGEATLDNTGNFILWSSQGAVLWQSFDYPADTLLPGMKFRVTHRRHALQQLVSWKGPQDPAPGSFSYGADPDELLQRFVRNGSRPYWRSPVLNSYLVARSYIGILKSTIYLTISKYDDGEVYMSFGVPGGSSSSTAMKIKMDYSGKIEILIWNTNILEWYVLEAQPMNECSTYGYCGPFGYCDNTELNATCKCLDSFEPISNEGRSNGSFTEGCRRKETLRCGEEDTSFLTLADMKIPDEFVHVKNRSFDGCTAECASNCSCTGYAYANFSTTAFTGDDTRCLLWMGDLIDTAKRTGDGENLYLRVNRSSGIIFAPISFFYPRSIRA

SEQ ID NO: 13338 - protein, 119 aa, Zea mays
  VARIANT 7: note = Ancestral polymorphism is R, Derived polymorphism is P
MAPSAPRLVAGALVILAAVALARPNAEQRSPGRYNVADAIAMGSGQHRHHQGRTPPCHVSPPPVLPPPCPGHQDRRREALVPPPIVLGVQRTAPAPPSPQHAQVEHYRALFPPPPACSF

SEQ ID NO: 13339 - protein, 265 aa, Zea mays
  VARIANT 215..265: note = Derived polymorphism lacks residues 215 to 265
  VARIANT 219..265: note = Derived polymorphism lacks residues 219 to 265
MAAAMPALLLLVATATAMMFSPAAARIPGVYGGGGWQSAHATFYGGSDASGTMGGACGYGNLYSQGYGVNNAALSTALFNQGLSCGACFEIKCEDQPGWRWCRPGSPSILVTATNFCPPNYALPSDDGGWCNPPRPHFDLAMPMFLHIAEYRAGIVPVTYRRVPCRKSGGVRFTINGFRYFNLVLITNVAGAGDVVRASVKASGTGEWMPMSRNWGQNWQSSAILVGQALSFRVTGSDRRTSTSWNAAPRDWRFGQTFEGKNFRV

SEQ ID NO: 13340 - protein, 418 aa, Zea mays
  VARIANT 255: note = Ancestral polymorphism is P, Derived polymorphism is T
MGNCWGARIKDGSAGASGMFSKSGGKDGSRLSGCSSRASSASMPPSVKTECEILQSANVKIFTFNNLKAATRNFRPDSVLGEGGFGSVYKGWVDENTLSPCRPGTGIAVAVKRLNHEGLQGHREWWAEVNYLGQFCHPNLVKLIGYCLEDEHRLLVYEFMPRGSLENHLFRRGSYFQPLSWNLRMKVALGAAKGLAYLHSGEAKVIYRDFKTSNILLDTDYSAKLSDFGLAKDGPVGEKSHVSTRVMGTYGYAAPEYLSTGHLTAKSDIYSFGVVLLEVLSGRRAIDKNRPQGEHNLVEWARPYLTHKRKIFRILDTRLEGQYNLDGAQAIAALSLECLSYEAKMRPTMDAVVTILEELQDSGEAEKRQGPKAGTKQAPAAAAASASKSSRKLRRRTLGGTKETTVGPNPKPLLARSR

SEQ ID NO: 13341 - protein, 193 aa, Zea mays
  VARIANT 61: note = Ancestral polymorphism is E, Derived polymorphism is G
  VARIANT 78: note = Ancestral polymorphism is P, Derived polymorphism is H
  VARIANT 89..193: note = Derived polymorphism lacks residues 89 to 193
  VARIANT 122: note = Ancestral polymorphism is T, Derived polymorphism is A
MALSFRLVAGVLLVLALALLSSSAEERSAGRAATVSAMGSDHDQTSEAPCSSVVSFQRTFESSMSLSVMVQISRDLLPEIPPTKPWVTYLSFSINSGNQITRSNRSQPSITMRLVKLLAVFAILAVLFAVTWPVAVLGRLGRAPPTPKSGPVKHHRPPRLQRPPPPPPPPRPHHRHDGLRRPLPYPAPPPCQH

SEQ ID NO: 13342 - protein, 289 aa, Zea mays
  VARIANT 44: note = Ancestral polymorphism is C, Derived polymorphism is R
  VARIANT 84..289: note = Derived polymorphism lacks residues 84 to 289
  VARIANT 132..289: note = Derived polymorphism lacks residues 132 to 289
MTEGQSEETGSAPEGVSVLRRNSDDVGWEYGVLVDVNNKDKVKCILCDKQMCGGVYRLKQHIAQEGKNAKKCQGIKTTKEKLLEAQEKCKKALDGAKRKREVKTVRELELREEVHVSRVGGSEEVTCVGSSEPHKLGPMDKWTKAIDPTATKSESLTQQRLNKELWKERLHEVHKYIARWAFNHAISFNACDNDEFKQMCEAIGQFGPGIEPPTMFDLRGRLLEEEYARTKSLLQEREAEKMKNGCSIMTDAWSDKKRRSIMNVCTNCADGTSFIKITSSQHRTPEVSE

SEQ ID NO: 13343 - protein, 291 aa, Zea mays
  VARIANT 142: note = Ancestral polymorphism is R, Derived polymorphism is M
  VARIANT 133: note = Ancestral polymorphism is V, Derived polymorphism is A
  VARIANT 127: note = Ancestral polymorphism is Y, Derived polymorphism is H
  VARIANT 85: note = Ancestral polymorphism is G, Derived polymorphism is R
MALAAPSSLRLLPTTPSQAPSPPCASRPRHLRELRLCQRLATAAAAAAAAAAAATAPLASSPTTSADTERRKHELLRAVQETRRGFAAGPDQRAAIEEAVVAVEERGAGKGTPIDLAALDGTWRLCYTSASDVLVLFEAAERLPLLQVGQIYQKFECKDRSDGGTVRNVVRWSIENLLEEQEGATLMVSAKFVVLSKRNIFLQFEEVAVENIKISEQLQTLIAPAILPRSFLSLQILQFLKTFRTQVPVSGPERRSPGGLYYLSYLDRDMLLGRSVGGGGIFVFTKAQPLT

SEQ ID NO: 13344 - protein, 143 aa, Zea mays
  VARIANT 108: note = Ancestral polymorphism is S, Derived polymorphism is C
  VARIANT 12: note = Ancestral polymorphism is P, Derived polymorphism is L
  VARIANT 11: note = Ancestral polymorphism is E, Derived polymorphism is G
MEVFGKSVIAEPSNVIFLSAILNTEGSNPSHKCDKRCQSERILGNMYRCKLTETTHICDKNCNQRILYDNHNSLCRVSGQLFPLSPLEQQAVRGIRRKHEVDSSEGCCFKRRRGAQLHPSPFERSYSAVYPIPSQVGDGMDMS

SEQ ID NO: 13345 - protein, 55 aa, Zea mays
  VARIANT 22: note = Ancestral polymorphism is D, Derived polymorphism is G
  VARIANT 25: note = Ancestral polymorphism is L, Derived polymorphism is F
  VARIANT 31: note = Ancestral polymorphism is R, Derived polymorphism is C
  VARIANT 36: note = Ancestral polymorphism is M, Derived polymorphism is I
MITRAAARKLFTNIRLKRWCFGAELVYLCKRLRIPIVEVSVNWTESPRYLVSKCT

SEQ ID NO: 13346 - protein, 853 aa, Zea mays
  VARIANT 616..853: note = Derived polymorphism lacks residues 616 to 853
MLRLSIAVLTSPLLPTSVPAVRPHPRRLLRLRLRSLAASSSLSPSARSLRLLEWGKVCDAVASFAGTAHGRDATTVPRSDIPGCHFSLPEYRRRGLFVSDTSAVRFDMRVQKQLWEVEDVSYEQSQMLLQETEAAVLLLDNAGGAMDFSGLDTVAIESAIHSVSGGAVIKGLEAMAVTSLMMFVESLQVNIKAAMKLDEGSCSRLTTLTETILDAVINKSLVKSIQDIVDDDGSVKDTASPELRRYREQVQRLENRLYQLMDKLMRNADDEASLSEVCIVNGRCCIRTTMDNSSFFDGLLLSRSDAGSMIEPIVAVPLNDELQESRALVAKAELDVLSKLTDKIRLDLDSIQNLLQETIKLDKIAARAKYSIAYDGTFPDLYLPNFENETVTSATGGSIKQISSAQLPKKAWKLYMPNAYHPLLLQRHQENIHRAKRDVASATAEIRRRRIYGQDIAEEDQLASDLDSMKLRVSQLEKDQPVPVDFMIAEETTVLVITGPNTGGKTISLKTVGLASLMAKIGNGAIRAESTSESLVLLDEVGAGTNPLEGAALGMSLLESFAEAGSFLTLATTHHGELKTLKYSTFSNNSFENACMEFDEENLKPTFKILWGIPGCVMFPFPFFNHFNVQICLGTLGRSNAINITERLGLPLDIVESSRRLLGTAGAEINALIMDMERLKQEYQQHLQEAQYLLMQSKELHNNLELAQKSIVDHTSAQRKRKARVISEYAVMARSIIRKKFQQFQESAIAERVKEEENAVNDAKSDRVKDPMPANTSAIGNIQNIDTSLGMTANDDEDEVPEVGDSVYVPKLKNEATVVKIDSSKNEVQVQAGMMKLKLKLKDVKVQKRKVSR

SEQ ID NO: 13347 - protein, 632 aa, Zea mays
  VARIANT 90..632: note = Derived polymorphism lacks residues 90 to 632
  VARIANT 128..632: note = Derived polymorphism lacks residues 128 to 632
  VARIANT 235..632: note = Derived polymorphism lacks residues 235 to 632
  VARIANT 288..632: note = Derived polymorphism lacks residues 288 to 632
  VARIANT 293..632: note = Derived polymorphism lacks residues 293 to 632
  VARIANT 313..632: note = Derived polymorphism lacks residues 313 to 632
  VARIANT 315..632: note = Derived polymorphism lacks residues 315 to 632
  VARIANT 412: note = Ancestral polymorphism is E, Derived polymorphism is D
  VARIANT 457..632: note = Derived polymorphism lacks residues 457 to 632
MGNSLACFCCGGGAAGRRRHVAPAALPSDPAYDEGLGHSFCYVRPDKVLVPFSADDDDLVADAKAAAAAEEPTTFRAISGAALSANVSTQLSTSVLLLLPDESSSAAAASSSSSGFESSESFAAVPLQPVPRFPSGPICAHGGGFLSGPIERGFLSGPLDAALMSGPLPCAATSARMGGGAVPALRRSLSHGGRRLRNFTRALLARADKFQDSMDLGSAAAAACGAGSAGLQWAQGKAGEDRVHIVVSEERGWVFVGIYDGFNGPDATDFLVSHLYAAVHRELRGLLWDQCEQEEQRDTDPDQPMSTTASYHQDQPANGRRARRSRPPRGADDDQRRWKCEWERDCSSLKPPTQRPPRSSSENDHLAVLKALARALRKTEEAYLDVADKMVGEFPELALMGSCVLAMLMKGEDMYLMNVGDSRAVLGTMDSVDLEEISGGSFDGLVGDGTPLLSALQLTSEHSTSVREEVCRIRNEHPGDPSAISKDRVKGSLKVTRAFGAGFLKQPKWNDALLEVFRIDYVGSSPYITCNPSLYHHRLSTRDRFLILSSDGLYQYFTNEEAVAQVEMFIATTPEGDPAQHLVEEVLFRAANKAGMDFHELIEIPHGDRRRYHDDVSVIVISLEGRIWRSCV

SEQ ID NO: 13348 - protein, 540 aa, Zea mays
  VARIANT 438: note = Ancestral polymorphism is A, Derived polymorphism is T
MRDPFDAPVDLINVDHNGGYQLSRTGAVSAGDHGLQNGGPKSLAPNSDTVVRHQLQGASLHKDLALEDPNTRIMDPETKELYFRSQSQEDEILLLRKKIAEASLKAVDEKQEEAISGALKQLNQKKTHLEDNMRLANELKVWCYCTFQECRLKISICNVEEEELYFFTSSLLSMLAEYNIRPPQINASTITIGTKRLYQQMHWKLKSLNDNLGDMPQPGNIYNSSHQQQQVTLPRNEASPSYNMVSNKNALQQYAQGPSDRHIEQILTSDLHENTLTSVYYIPHSFRDTGGTTPSNYFEEGRVDGGSQLYPSDGDALPGIEGFQIAGEPRPGCQLTACGFPTNGTTLCNFQWVRHLENGIKQSIEGATMYDYVVTADDVGTLLAVDCTPMDDNGRQGDLVTEFANNGNKITCDPEMQSHIDACISKGRAEFEVFVLQAYSPEEWELATLVLTRPNYQIKFKQTGNVVIDEKYSQSLQTKIPNGRTTQFVLITAGTTLPFNTQGISEPNNEDYDVRLRDLIVLVMRTFQKKALDAKRKGKA

SEQ ID NO: 13349 - protein, 247 aa, Zea mays
  VARIANT 14: note = Ancestral polymorphism is Q, Derived polymorphism is H
  VARIANT 17: note = Ancestral polymorphism is M, Derived polymorphism is V
  VARIANT 28: note = Ancestral polymorphism is R, Derived polymorphism is S
  VARIANT 76..247: note = Derived polymorphism lacks residues 76 to 247
MPSGNQTMTFVAVQLLMILQFGGYTLVRNSKVLFESFGFEDQPIIIGLIIFQHTIIPIQHLLSFCLNLVSKAFEFQADAFAKNLGYAPQLRAALVKLQGHRRGMRGGGAGVALVDARTFHPRDLVAHRGGGGGTLLGRGFGAADLAQGCGWWRRIAGERICGRGGWNPYMEGGGGFAGERIWGLRTRGFVGAAAVLGCGREDGGGDCGRGDGSGNRGRGKGNRGRWQNEAIVHAYTKDIRSSRDWRN

SEQ ID NO: 13350 - protein, 197 aa, Zea mays
  VARIANT 139..197: note = Derived polymorphism lacks residues 139 to 197
  VARIANT 109..197: note = Derived polymorphism lacks residues 109 to 197
  VARIANT 103..197: note = Derived polymorphism lacks residues 103 to 197
  VARIANT 95..197: note = Derived polymorphism lacks residues 95 to 197
  VARIANT 85: note = Ancestral polymorphism is D, Derived polymorphism is Y
  VARIANT 53..197: note = Derived polymorphism lacks residues 53 to 197
MEGPRVHQGYTSTSSSHPPSVALRPQINSRWSPQLDTVEMKLEEAHSRLARFRDRKPPPTRSEPKPPTPPIQREHNPSPPPIQRDLKPSLQPPIQKAPSPAPQPSARPQLVIPRTSNRPTPRPEPMPGLKRAAAPSSSSSPAPPERSRKEEKKPKIKMEQKGHPNLITSVGKSSATVFRFQGRNLVSSQHRRKLMPC

SEQ ID NO: 13351 - protein, 314 aa, Zea mays
  VARIANT 149: note = Ancestral polymorphism is Q, Derived polymorphism is R
MSSSSSSSSSSAATVFPRSPQLPPPVLVENGLTPLHQLTPVAAAAPAAEQLCYVHCYFCDTVLVVSVPTSSLFKTVTVRCGHCSSLLTVDMRGLLFPGTPTDTVAGAAPPPAADTSTTTTTITTAPPPANSVNNGQFHLPHSLNHPHHQSLLVDEISSAANPSLQLQLEQHGGLGGLILGGSRNTAAPPPPQPPAAGKGAKEPSPRANPAVNRPPEKRQRVPSAYNRFIKDEIQRIKAGNPNISHREAFSAAAKNWAHFPHIHFGLMPDHQGLKTTSLLPQDHQRKDGLLKEGLYAAAAAAAAHAAANMGIAPY

SEQ ID NO: 13352 - protein, 480 aa, Zea mays
  VARIANT 325..480: note = Derived polymorphism lacks residues 325 to 480
  VARIANT 253: note = Ancestral polymorphism is W, Derived polymorphism is C
MLHKFALAVKTKTIEFFAEEDEDEDEDADRFARSLLPGADGVLAGQRVVVLKPDPPNPNPSADGDGKAASGQEAAVAAALATASSFQAAYLHLQAAHTPFLPDAAAAADAAAVSHLRRLSELKRIARDGPVDPHGGGTGTTLTAHLEAQVRENQALLRSLDAVVNRLQAALDAKDAAAAALRLDLEALDGGNARLAGRLDRALAAPPPPQPGGGDAVGAMLSAGVFDSVLRDALRVAHRFARALAEVLRRAGWDLAAAAEAAYPGVSYSKAGHCRYALLSRVCLSMFDGFDSHQFGATAGTAELGGTEPATTRRNESLRQFIEHSDADPMELVNSRPDCEFARFCDRKYKQLIHPGMESSLFGNAGCGTLPVMSVAGPLYELFVAMASSVWTLHRLAWAYDPAVGVFQVGRGAEFSMVYMENIVRSSKGLAGSREPGKPARRPKVGFTVVPGFRLGGTVIQCRVYLDHGKRGEETIIDSI

SEQ ID NO: 13353 - protein, 628 aa, Zea mays
  VARIANT 213..628: note = Derived polymorphism lacks residues 213 to 628
  VARIANT 153..628: note = Derived polymorphism lacks residues 153 to 628
  VARIANT 120..628: note = Derived polymorphism lacks residues 120 to 628
  VARIANT 84: note = Ancestral polymorphism is S, Derived polymorphism is I
  VARIANT 1: note = Ancestral polymorphism is L, Derived polymorphism is M
MRVHQHQVLLLQQLLALPATKSSKSNSSSVASAFGTGGTSSSISSTATGDSHTGTMMLSHQGQLQPFLALMQHPLVGGDHYNISASRLGFLGLSSLDPMDYHQFGTGAGASSATIGLEQWRLPQIQRFPFLSGQPDVVQPTMSGIYPFDMEGQSGDTPVLPGGHMLGGSKMPGSAGLITQLASVKMEDNPASVAMASSSSRDFLSVTGNLQFWVDDSDNDGASGNNEGGQQHAQHGQLPSGGNGGGGGGMDTHAHHHHHQLPPVPPPPSGALMAPRPDMSAMVPAASGGGGPTSGGTAIRPGSMTERAKLAKIPQPEPGLKCPRCESTNTKFCYFNNYSLSQPRHFCKTCRRYWTRGGALRNVPVGGGCRRNKRTKSSKSNSSSAAASASGGAGGTSSSTSSTATGGSSSAGAIMPSHQGQLQPFLASLHHPLAGGGGGGDHYSTGASRLGFPGLSSLDPMDYHQFGAGAGAGASSAAIGLEQWRLPHIQQFPFLSGRPDPVQPTMSSIYPFDLEGHGGDAPGFPGGHMLGASKVPGSAGLITQLASVKMEDNPASAAMASSSPREFLSLPGNLQFWGGGGNNNGGASGNNGGGAGNGGGGGGGGAVAPGSSWVDLSGFNSSSSGNVL

SEQ ID NO: 13354 - protein, 469 aa, Zea mays
  VARIANT 21..469: note = Derived polymorphism lacks residues 21 to 469
  VARIANT 36..469: note = Derived polymorphism lacks residues 36 to 469
  VARIANT 129..469: note = Derived polymorphism lacks residues 129 to 469
  VARIANT 158: note = Ancestral polymorphism is D, Derived polymorphism is A
  VARIANT 173: note = Ancestral polymorphism is V, Derived polymorphism is L
  VARIANT 377: note = Ancestral polymorphism is P, Derived polymorphism is L
MANASKHLQPSSKSGNDRKYQGTLVASPAKDISPKCANRIVPSKQLILGGDSIGHLASILIKVVALEAVRRVSKARYPFIWNSVQALQILVYPPFSWIQRWAPLKFLVQGIQKLSMPLLFLSVTTTVSELSSKRDDEPDNNTEHSETNELASTSGTSDAADGTKEIVQENWLVLLFRELEKQGITLPERFTEDELRRFYVAANGDFSSLLSSVKKTIRWRETFHILTLQELDKWSHLVFWHGFDTMLRPCLVIRLGLACSSIPPCDRPRFGQAVVSQIDHGVVNLTNKEDSRITVLLDCHGISPFRFPMQMMRSFVTVAQENYPNRLGVLFVVRLPPVVRVIAQTFLQVLKPSTKQKLRFEGDSYKKTLAEFLQAVPAFLGGKCSCPRCEKPRNSSVVQAGEGSKNQARLVSVDGGSPVVDFDFDEEEIPSPYSCENAIRAAIICLLMVCIFIAFLAGMNDPASVPPSA

SEQ ID NO: 13355 - protein, 78 aa, Zea mays
  VARIANT 47: note = Ancestral polymorphism is G, Derived polymorphism is D
  VARIANT 6: note = Ancestral polymorphism is S, Derived polymorphism is A
MDVYIAEEYVAQRRAERRAARVAAAARCGEEKARADSEQKRRWTEDGKRPADGGDAGGGAAAAWLQAGEDAVLSYLSA

SEQ ID NO: 13356 - protein, 126 aa, Zea mays
  VARIANT 87: note = Ancestral polymorphism is H, Derived polymorphism is D
  VARIANT 80: note = Ancestral polymorphism is P, Derived polymorphism is L
  VARIANT 1: note = Ancestral polymorphism is V, Derived polymorphism is M
MPLSLALSLGAGVAPGHGSSKRPRRAAGGGDGEFVCKTCSRAFVSFQALGGHRTSHLRAGRHGLALGMPAPAPAKEAPPPATTHLCHVCGLGFQMGQALGGHMRRHREEAAATTAQAPPVLLQLFV

SEQ ID NO: 13357 - protein, 128 aa, Zea mays
  VARIANT 34: note = Ancestral polymorphism is A, Derived polymorphism is T
  VARIANT 47: note = Ancestral polymorphism is L, Derived polymorphism is P
  VARIANT 48: note = Ancestral polymorphism is E, Derived polymorphism is K
  VARIANT 78: note = Ancestral polymorphism is P, Derived polymorphism is H
  VARIANT 92: note = Ancestral polymorphism is G, Derived polymorphism is V
  VARIANT 100: note = Ancestral polymorphism is R, Derived polymorphism is C
  VARIANT 101: note = Ancestral polymorphism is A, Derived polymorphism is V
  VARIANT 117: note = Ancestral polymorphism is V, Derived polymorphism is G
MVETRRSSAAATGKRTSPSSSSSSVPSRSAPRMATPFIMSLKLWREPEDPLILIHDKKVTNMHAVVKVLEMALKKQRPLLIVAKDVESEVLGTLIINKLRAGIKVIAEELGMNLENVEPHMLGSCKKV

SEQ ID NO: 13358 - protein, 110 aa, Zea mays
  VARIANT 3: note = Ancestral polymorphism is P, Derived polymorphism is L
  VARIANT 10..110: note = Derived polymorphism lacks residues 10 to 110
  VARIANT 13..110: note = Derived polymorphism lacks residues 13 to 110
  VARIANT 22: note = Ancestral polymorphism is V, Derived polymorphism is F
  VARIANT 24..110: note = Derived polymorphism lacks residues 24 to 110
  VARIANT 40: note = Ancestral polymorphism is S, Derived polymorphism is I
  VARIANT 47..110: note = Derived polymorphism lacks residues 47 to 110
  VARIANT 58: note = Ancestral polymorphism is D, Derived polymorphism is Y
  VARIANT 59: note = Ancestral polymorphism is G, Derived polymorphism is A
  VARIANT 63: note = Ancestral polymorphism is T, Derived polymorphism is I
MMPVAHVVEWTYQKFAKYGMEVPQLTPSRIRLLSCNRTFSCSRAKEQLGYEPLVSLKDGLKRTVESYPHLQAQNHRSISKASIFLGNGNRMKLPSSLLQKQYFGKMRSKL

SEQ ID NO: 13359 - protein, 175 aa, Zea mays
  VARIANT 60: note = Ancestral polymorphism is A, Derived polymorphism is T
MTHPRPDHEPAGEVSLALALSTDSSGGSAGAPAAKRARRRGAAAATSGEGEFVCRTCSRAFTSFQALGGHRTSHLRGRHGLELGVGARALSRQQHKHHQQAGDGGGGDREPLAQHECHVCGLGFEMGQALGGHMRRHREETTTGAADAWVWRADDALQRARGGAADPPVLLELFA

SEQ ID NO: 13360 - protein, 232 aa, Zea mays
  VARIANT 102: note = Ancestral polymorphism is S, Derived polymorphism is R
MAVAELWETLKQSIVAYTGLSPAAFFTAVAVAAALYHVVSGLFAAPPPPPPRPREEPEAEPLPPPVQMGEVSEEELSQYDGSDPKKPLLMAIKGQIYDVTQSRMFYGPGGPYALFAGKDASRALAKMSFEPQDLTGDITGLGPFELDALQDWEYKFMSKYVKVGTVTKNVTVEDRSSAASTAPGTSEAATEAEKAPTTTTTEEKPREVPAEAVKEKEAAAAAAAAGEGAQEN

SEQ ID NO: 13361 - protein, 530 aa, Zea mays
  VARIANT 250..530: note = Derived polymorphism lacks residues 250 to 530
MAAAAAVVAEPKTKYDRQLRIWGDQGQTALEKASICLLNCGPTGTEALKNLVLGGIGSVTAVDGSKVEASDLGNNFMLDEGCLGQPRAKSICSFLQELNDAVKAKFVEEFPTHLIDTNPSFFSQFTVVIATQLPESSLLKLDDICRKADIVLVAARSYGLTGLVRVSVKEHCVIESKPDHFLDDLRLHNPWTELKQFAKSIDINDKDPVVHKHTPYIVVLVRLAEKWADAHDGNMPSTRQEKKEFKDLIRAHMLNVDEENYKEAVDSSYKVSVTPGISNEIHQIIDDDSAEVNSSSEDFWILVAALKEFISKEGNGELPLEGTIPDMTSLTEYYVSLQKIYQAKAEFDCLALEHHVKEILKQIGRDPDSISRAYIKTFCKNSRKLRICRYRSFKEEFSSPIVSEIQRYFSDEDCSYAMNFYILLRAVDRLAANYSRLPGIFDSEIDEDIPRLKTVAASVLSEMGLNGASLSQDLVTEMCRFGGAEIHPVAAFIGGVASQEVIKLVTKQFVPLGGTFIFNGIDLKSQVLVL

SEQ ID NO: 13362 - protein, 835 aa, Zea mays
  VARIANT 96..835: note = Derived polymorphism lacks residues 96 to 835
MSPVLWLTSLLFLVHSAAADTRRALHEPLFPIEWTPPPSTTAPPAPGFASDPSTPVPPVDNGGPALLPAPPPPNTVAADASSSRTGPGPRPHGGGGTPKAAIVVASAAAAAVLALLAFAAAFLLTGRLARHPAWAHKPPGLAAAAHPGPASALVLHADAVGTSAAAAASSSGATATPHRKARSERARRGMCRDVDTVPSPELRPLPPLRRAGSSDEDAAYYTPGQRSAVSAGGEGAGTWSQASASSPRTTTPSRQSLPSLTSDFFPPTPAAATAVPAATVAPPPPAPPAPRSRRTLPRTRFSAGSASDMNMIKQIVSPSSNLPPPPPPPPPPPPPAPRRTNAIPKPLTTATPLSTRRLLKQEQTEGPSVAVPRAPVVAVNKDNDGMPIRTNDDHAGDEARPKLKPLHWDKVRACSDRDMVWDRLKLDEDMIEVLFTNNAANAPPRDTLRKPGVLQCSAKEKVLDPKKAQNIAILLRALNVTPEEVSDALLDGNAECLGADLLETLVKMAPTKEEELKLRNFTGDSSKLGSAERFLKAVLDIPFSFKRVDAMLYRANFESEINYLRKSFETLEGACDDLKSSRLFLKLLEAVLRTGNRMNVGTNRGQAKAFKLDTLLKLADVKGADGKTTLLHFVVQEIVRSEDAKSEKAVEDETRSIVKDETFRKQGLKVVSGLSNELGNVKKAAGMDFDVLHSYVSKLQAGLSRIKSVLLLEEQCAQGHGFFARMRGFLEEAEMEIQQVRCDEERALGRVKEITEYFHGDAGKEEAHPLRIFMVVRDFLSMLDHVCKEVGQQDRTVVVGSARSFRMSATTAMANLKVYGQHARDNDDDEESWSL

SEQ ID NO: 13363 - protein, 374 aa, Zea mays
  VARIANT 63: note = Ancestral polymorphism is L, Derived polymorphism is P
  VARIANT 38: note = Ancestral polymorphism is R, Derived polymorphism is W
MAVNFLANELSDLCIGKPAVRSLPLSAATGDLAAALRRVSRSGAAACVAVTGPARAVVGRVGPADVLCLLCTDPEALARPAAVFSKPVSALLPKDGAGEVRRVDPRSSILEALDAILSGAQVLAVPLRAGGRKKQLVGAADGDFCWLTQEDLVRYFLNYICLVYNVAARSVSSLGLVRADFLSVRPGEAALSAVPLIRRAVATETAVAVVAEDGHLVGEISPALLAACDETAAAAIATLSAADLMAYIDHYVSPPEHILRAVKAGLKDKGLDALLALVEDETLSSFSSLSSASSSSDEEAGRAQLRRPSSGSYGRRAADEPVVCSPASSLVAVLVQALAHRVSYVWVLDEDNDCRLAGIVTFADVLRVFREQLL

SEQ ID NO: 13364 - protein, 315 aa, Zea mays
  VARIANT 79: note = Ancestral polymorphism is L, Derived polymorphism is P
MAQEIEHTHLPIRGLNLHVAQVGTGELGTVVFLHGFPEIWYSWRHQMRAVAAAGYRAIAPDCRGYGLSEQPPEHEEVSPDDLIADVLGILDALSVPKAFLVGKDFGAMPAYEFALQHPGRTLGVVCLGIPFNPAPMSFDAIMPEGFYILRWREPGRAEADFGRFDVRRVVRTIYVLFAGAEIPIAKEGQEIMDLADLSTPLPEWFTEEDLDAYAKLYEKSGFGYPLKMPYRSMHKLPNRLDAKFQVPVFMVMGEKDYAFKFPGFETAMRGGVMDNFMPDLKITYIPEGSHFVQEQLPEQVNDLLLGFLRDHPSAA

SEQ ID NO: 13365 - protein, 1019 aa, Zea mays
  VARIANT 125..1019: note = Derived polymorphism lacks residues 125 to 1019
  VARIANT 56..1019: note = Derived polymorphism lacks residues 56 to 1019
MILRTYGRRSRSFSDGGGGVSSSQDAFDCDDAADLLVSSASQPLPLPPSQESSSMWDFDEDPPPSPPRPRPEGRRRGARRGGWELAEAPAVAPTATLMEAEEYGEMMESVDEVTFALDGLRPAAQKRTRRASLLALLGICASAERRRVLRSQGLVQQIIDAILVLDIDDPPCAIAAGALLFVLASDVQDNNSLDSETCVHFLLKLLNPPVNVVDAKAPSIGSKLLGISKFQMLNSSNKDADSSSEDILLKVEEILLSCKEIKPLDSDDKKTTRPELCSKWLALLTMEKACLSAVALEDTSEMVLKLGGNFKETLRQSGGLDNIFNVMVNCHSELEVTAYLFNITTAQDFNVKLETHFWNLIVIPVAAALSLLQKPSTVSRKADPKNTKVCNGACSADSRCLNLLNHHGKCNNSKKKSPLLNHHGKCQDCSSTKFNGASLKLNVRKDRSKANSTRGSSGWISIKARTSDWNSREMAKKRRLSENAQTALSNGGDDPFAFDDTDQEPSNWDPFGPKRKSPQKRAKRSNGELVLDDCDTAVTGSPELCQPEGINQSGATSDSKAADESNLLEDCLLASVKVLMNLANDNPSGCEQIASCGGINTMASLIIKHFPSFDFSMDSNNQMKERVSSGDLSSSQNSKSLQIKTKQLRAYELDFLVAILGLLVNLVEKDNLNRVRLANARVSVNLSQSPDTEEVEAHCGLASELYVCCHMAVVGGGARSLRHRVSVSVAVFRSPSTQVLATRWRRRRGMVVRSDVVAGGAAAAAAGDSTRALPGQQLASRVRGVCFYLVTAVAAIFLFVAMVVVHPLVLLFDRYRRRAQHYIAKIWATVTISMFYNLEVEGMENLPPNSCPGVYVANHQSFLDIYTLLTLGRCFKFISKTSIFMFPIIGWAMYLLGVIPLRRMDSRSQLDCLKRCVDLVGKGASVFFFPEGTRSRDGKLGVFKRGAFSVAAKTGAPVIAITLIGTGKLMPSGMEGILNSGSVKVIIHRPIQGNDAETLCSEARNVIADTLLLHGYGAH

SEQ ID NO: 13366 - protein, 484 aa, Zea mays
  VARIANT 182..484: note = Derived polymorphism lacks residues 182 to 484
MEATAAVQRLADLEVQRRRIAEVRATDLHESNLVCSEQLVVDTAVFACTTNDAVQITDISLELAVPLHLTKELVQRGPASVTAAPTSSSVSVREMNHFHLDTNGTKLQQHVQYYAEPIFPKLDSDGEARVQDQVMHDTRGNPWEFCHIYRVQHDQHKLLPIGWSRNYMAGALDEQIDASVRQHCLWNLQASWRFVFNSSRVLEERYLKQPLGDLGFKRSWPVDPVAPEADVVVSCGGQAAVELADLRTWLNMFLEVKTVRESMNRMIEAWREIPDLDEEVCSFEVPPSSQSTSSLTDTADSLGSTSTPSITRRNSWPTNRQPPPDTSHNVTNRKGSTPSIVGKKILPLSRCSTDQAKKFEGRVDVTVASDATPAKMVTEEKLLNEGSVRERLEARRVLFQKTGDKGYKKLAGPKSGSKVFPYSGDGDFEETAETEDAPDELQSAHRDEALLKIRMQLVQIENQHASLLNLLQVVIPLLQCIIHQ

SEQ ID NO: 13367 - protein, 757 aa, Zea mays
  VARIANT 241: note = Ancestral polymorphism is S, Derived polymorphism is L
  VARIANT 279..757: note = Derived polymorphism lacks residues 279 to 757
  VARIANT 301..757: note = Derived polymorphism lacks residues 301 to 757
  VARIANT 347..757: note = Derived polymorphism lacks residues 347 to 757
  VARIANT 358..757: note = Derived polymorphism lacks residues 358 to 757
  VARIANT 390..757: note = Derived polymorphism lacks residues 390 to 757
MSDEYGGLLIHPHFLDLPVSDEDEEELEDEMDDGDGESGGGSSKKKAKQHVEQLKRLQQKDPDFYKYLEEFDKDLLGFDDDDDEIENDRETGVEEKEQYVSKEELKHVKPITMEMVDSWCNGVENEKIGSIRSILQAFRRACHYGEDHGDNSTPKLSVMSGSVLDKVMHFVLKHMDKVLRQLLGAPSYGGKKEVISELMLSKSWKRHGNLMRIYLANALHMITEMTDEQMIAFTVHRVRASAVFLAAFPSLLRKYVKALLHTWARGRGAMPLVSFMFLRDLCIQVGSDCLDTCLKGIYKAYLVNCKLSKSISGSKQQHIQFLGNCVRELYSLDPQSAYQHAFVFIRQLGVILRGALTERGPKSVKDKRQKESSKSSKKQAEKSYQKIYDWQYIFCLELWTSVVCGCSSEEEFRPLAYPLTQIIHGVACLVPSARYFPVRFRCVRMLNCIAEATGTFIPVSSLLLDMLEMKELRGRPDGVGKAVNLFSVKQVDKKTVKTRAFQEACIYSVVDELAKHLTQWSYSIAFFEMSFIPLVRLRSFCKTIKADRFRKEMKDLIYQIEANVEFIKSKRVGIAFSPNDPATEKEERCSPLSKFVATLHQRAQDRMDALDETSVIVGAESSTFSRRLSEAQKQQDEQDDDEGTIAFSKNWLSENKKPKTPKEDKKRPREDDDVATEEDRVEDLVLSSDEEDGNNEEADDGFVPVEGDSDEDFVDPDSEYKKQKKAKLKKRNKRQPFLHKAPSRTKSNSGPKKKARH

SEQ ID NO: 13368 - protein, 214 aa, Zea mays
  VARIANT 185: note = Ancestral polymorphism is T, Derived polymorphism is S
  VARIANT 137: note = Ancestral polymorphism is S, Derived polymorphism is I
  VARIANT 16: note = Ancestral polymorphism is S, Derived polymorphism is L
METFTQEHVIGIPLTSFAYADEERQGKSSCSAMVHKKNKKSSFIHRMNKLSHKTDSYMQGFKEHLTMGPKISETIKGKLSFGAKVLQAGGIDKVFREYFAVEKDEKLRKAFQCYLSTTAGPIAGMLFISTKKIAFHSDRPLSFTSPKGGSTRVPYKVLIPTERMKSASVRENLYNPDEKYIDVVTVDGFDFWFMGFVSYEKSFKYLQQVIMELR

SEQ ID NO: 13369 - protein, 114 aa, Zea mays
  VARIANT 5: note = Ancestral polymorphism is G, Derived polymorphism is S
  VARIANT 26: note = Ancestral polymorphism is R, Derived polymorphism is Q
  VARIANT 31: note = Ancestral polymorphism is K, Derived polymorphism is Q
  VARIANT 39: note = Ancestral polymorphism is R, Derived polymorphism is G
  VARIANT 57: note = Ancestral polymorphism is T, Derived polymorphism is I
  VARIANT 60..114: note = Derived polymorphism lacks residues 60 to 114
  VARIANT 68: note = Ancestral polymorphism is E, Derived polymorphism is G
  VARIANT 70: note = Ancestral polymorphism is I, Derived polymorphism is T
  VARIANT 75: note = Ancestral polymorphism is D, Derived polymorphism is G
  VARIANT 82: note = Ancestral polymorphism is V, Derived polymorphism is A
MQHFGLMLSSMDQHARNPRSNLVNHRMGTPKMPAQVVRRKKPDVSVVLSTAPEDAPIHWQQTLLYLFGPIELNKDQIIEGSVIISQSQQHARFLNICLEYFTGDQWYVKESVMR

SEQ ID NO: 13370 - protein, 198 aa, Zea mays
  VARIANT 27: note = Ancestral polymorphism is V, Derived polymorphism is M
MATVGGNRALYAVVALPLLATLLHGPMRLSHAFPYRSLLQTCQPSGSIQGRSGNCNTENGSECCKNGRRYTTYGCSPPVTGSTRAVLTLNSFAEGGDGGGAAACTGKFYDDSKKVVALSTGWYNGGSRCRKHIMIHAGNGNSVSALVVDECDSTVGCDKDHNFEPPCRNNIVDGSPAVWDALGLNKDDGQAQITWSDE

SEQ ID NO: 13371 - protein, 265 aa, Zea mays
  VARIANT 251: note = Ancestral polymorphism is P, Derived polymorphism is L
  VARIANT 170: note = Ancestral polymorphism is P, Derived polymorphism is S
MADHQRIHPADLEAGNRPLMPGGSFRSDKGDPAQRAKQQQQQGYVPGALPPPPRRVAPPAPLPPPKRRGRGCCCRLLCCAVISAAVLAVLAAAAAGALYLALDPKAPRYSVDRLSVSAFQVDPATLAARARFDVAVAATNPNSRIGIHYERGSSLGVWYQSYRLARGALPAFYQGHRNTTVLALAMAGEAQLGSAAVVSGMQDAQRTGAVPLVFRADVPVRVQLGTFKLWKVTARVRCDLVVDRLMDVTSLIKIKAGNCKFSLKL

SEQ ID NO: 13372 - protein, 152 aa, Zea mays
  VARIANT 12..152: note = Derived polymorphism lacks residues 12 to 152
  VARIANT 58: note = Ancestral polymorphism is D, Derived polymorphism is Y
MLPSGGKLFDEQVGRGNRPNTYRDLVGYDEVEKGFKERTSLNVAKLQLKHKWYKLNEDFKAWRKLNLRKIGTRWIMQKDILGCGKFMKLGLQNECELARCSRNITYIGGDHWSPRDAKIGAASGANVLVGPLDGDTQEEPSILLDTRQCIHS

SEQ ID NO: 13373 - protein, 231 aa, Zea mays
  VARIANT 39: note = Ancestral polymorphism is G, Derived polymorphism is E
  VARIANT 68: note = Ancestral polymorphism is T, Derived polymorphism is M
  VARIANT 106: note = Ancestral polymorphism is G, Derived polymorphism is W
  VARIANT 141: note = Ancestral polymorphism is T, Derived polymorphism is P
  VARIANT 183: note = Ancestral polymorphism is E, Derived polymorphism is K
MAVPEVVVDGVVFPPAARPPGSAGSHFLGGAGVRGLEIGGNFVKFTAIGVYLEDAAVPALARKWAGKTAGELASDAAFFRDVVTGGFEKFARVTMIRPLTGEQYAGKVAENCVAYWKAAGLYTDAEGVAVEKFKQVFKPHTFPPGASIHFTHSPAGVLTVAFSRDSSVPVAGGVAIDNKLLCEAVLESIIGEHGVSPAAKLSLAARVSELLTKGTAAAAAALRAEPVSVTA

SEQ ID NO: 13374 - protein, 227 aa, Zea mays
  VARIANT 114: note = Ancestral polymorphism is T, Derived polymorphism is I
  VARIANT 81: note = Ancestral polymorphism is V, Derived polymorphism is F
  VARIANT 12..227: note = Derived polymorphism lacks residues 12 to 227
  VARIANT 2: note = Ancestral polymorphism is N, Derived polymorphism is D
  VARIANT 1: note = Ancestral polymorphism is M, Derived polymorphism is V
MDLRVAAAVSLLLALATTTGAVTFNATNTATGTIGGLRFDVAVGLDYANLVLSNASAFIWSSAFNQTRPADRKPVDAVTLVVAADVSGAAAFTAADVITLSAPYVGNYSGDVRTEVTGVLFHETTHVWQWDGQGHANGGLVEGVADFVRLKAGYAPAHWVKPGQGDRWDQGYDVTARFLDYCDSLKPGFVALLNAKMEDGYTDDFFAGILGKGVQQLWQDYKANYDA

SEQ ID NO: 13375 - protein, 219 aa, Zea mays
  VARIANT 10: note = Ancestral polymorphism is H, Derived polymorphism is Q
  VARIANT 188: note = Ancestral polymorphism is L, Derived polymorphism is P
MAAACLRRLHRIPHPVLKLAAATHWPLPFPGAKLAPVTQSCPSADRVEVQLSARCPAFFLGLSNGSAFAQEDSVSPAAASEHAEGNAPGLQPIEDGSVVSNEHTVKWRIYTDNAREFFQKASNTLSLAWFQTTFGICDRQLDEAEKLFQAALLEAKEGFGLRDPHVASALNNLAEFYRLKKEHVKAEPLYLEAIEILEESFGPDDIRYITNFNFFCAIM

SEQ ID NO: 13376 - protein, 145 aa, Zea mays
  VARIANT 111: note = Ancestral polymorphism is R, Derived polymorphism is L
MHPCLSEFPSNCFYEGTLQNGVTVNERQSSGIDFPWPVPNRPMFFYVQMGQEEISASGTSYLNRTEAANVEKIVTTFLRSGVVPSQIGVITPYEGQRAYIVNFMSRNGSLRQQLYKEIEVASVDSFQGREKDYIILSCVRSNEYQ

SEQ ID NO: 13377 - protein, 197 aa, Zea mays
  VARIANT 2: note = Ancestral polymorphism is A, Derived polymorphism is V
  VARIANT 13..197: note = Derived polymorphism lacks residues 13 to 197
  VARIANT 21: note = Ancestral polymorphism is L, Derived polymorphism is M
  VARIANT 79: note = Ancestral polymorphism is I, Derived polymorphism is M
MAAGGRASEPCPWNATWRCALTTGGGKWAKAHPTGVPASFQALHVFGLIDIAAKQLLGQGLVLLLRLPLEHLKHGFFKIEAVHIPGTPRPFIWTDTYTIYARYSALQIHFKNKFGKEQDYNSVQDALQKCVSLYKEPHTRRLVKNAAKQDYMICLTSLIDMVQSLFPIPHIPGLQELLCEAEQILGELEEESTRKKQ

SEQ ID NO: 13378 - protein, 934 aa, Zea mays
  VARIANT 21..934: note = Derived polymorphism lacks residues 21 to 934
MKMAPAPPPEGTAILLIRGAQLCLGVSAMATHYQAATLIASPSYPNAIAWSSDNLVAVASGHIVTILNPAALDGPRGLVGLRHSDPFPIGVVKREDLLEPCLLPTSLARETEPCARSISWSQQGFAPNYGCLLAVCTVNDHVKLYRSPIWELCDEWVEVADISQLLFNYYKIINFGEDNGSHLTSSKNTNSGEAEVLGSTCRSEESLYFRGPGQRKIKPARVGGFIYDGNEVDLDASKDADFSMEPCSKSKKKSLKKTVKPRDEVVAVNGRNSTGNVKASLSSNEQNKSLPLITAKQYACRAAHLSSLVVSWSPVVSLSDRTSCLLRHWCILAVGSKSGNISFWKLYKPEYYTIDAGVVTSDPMLIGVLHAHESWVNAITWQVLSAGSSKSSLLLATGCSDGRHCISHVEDLVCIFSVKIWLGNIEGLNQCAIGEEVPFVLVAEVAANLSAPVSSISLGIPARSQHEVSLAIGRVSGLLEIWIWNASTNKIESSSAWHAHDQVVTGLRWAIDGNCLFSCSQDNSTRCWISHENHLEEFFLHSEFSELRESEDLSKVSDRCYGLTLSPGEEIIAVVRSLDLNLLNQMYQVRTQKAVVEFIWIGGQFVGIPLDGSIDICSPQSADLSSSNLMWWGSNILWSLKKYENVEKRLVLWDVVAALQELKKTAPAFLETLVHSWASALFAGDSQCVSITAQSSRSMHDMMPHVSSRKLHLLNIICRKVMLGNHARHGPGAGNNSNDGTTDFWSTLLVASETELRERLVGFTFAAVVKRTACLFNGTSTANCWFPVGVAQMDSWVSMNYEKVHGQLQSIRSKIKELGSRIDGYSDVESCPYCSSPVRFESPDVAICGERHTLSRCRTSMTLCSVAQPVWHCSCCGGTVDKLLPESFFTMPLDAVRDDKGSLDLSAASAPLCPFCGVLLQRSMPAFLLSTSPV

SEQ ID NO: 13379 - protein, 401 aa, Zea mays
  VARIANT 296..401: note = Derived polymorphism lacks residues 296 to 401
  VARIANT 285..401: note = Derived polymorphism lacks residues 285 to 401
MTPHLPAVSSSSTTTTSRAAAAAAAPPSSPHQYRRRRRRRVPGCLRPRAASVRCCAAAAPAPQAAVPAAARAEATTRVFVVSDLHTDYPENMEWVRRLPAEVGAGKGEGVDALVVAGDVAETRDNFARTMEMLRDGFAAVFYVPGNHDLWLRREGGRYMDSLEKLTALLDACSELGVDTGPRTIGDLGIIPLFSWYHKSFDKEKDVSSVRVPSLEMACKDFHACQWPSDLTNDDEALALYFDKLNDKNHDATEEVKSSSKQILTFSHFVPRQELCPEKRMLYYPYLPKVIGSDFLERRLRDIHSNRKDGGACHVFGHTHFCWDSVVDEIRYVQAPLAYPRERKRRMNGEGWLPFCVYRDGFNPEIYPALWSDYYNKNKREPENTQLAPWVASHFARYHKFH

SEQ ID NO: 13380 - protein, 326 aa, Zea mays
  VARIANT 155: note = Ancestral polymorphism is Y, Derived polymorphism is S
MGGQWLGEGMPPSNLQCFLDCTTPTVDTHILPKTNGRLPADAWHHAEMDSVEYFNLSDLWEQYYEWSAYGAGATVQLPGGERVVQYYVPYLSGMQLFTNKVLTASRSFGEDNGMDFWSDDEDNEKMSRSWSSTSDESLFNCDVVWPNRKRPGHLSFEFFEVGSPYGRVPFIDKVYELSQGFPGLTLLKSADLSPVSWMSVAWYDQIYMYPIYHIPYQRSVKDLSACFLTYHTISSSFQDYGLETMTNDCCHPVADGKQNGHMDKKSNTVSLPPFGLAAHKVHGSLWTNPMTGDHRKMDFLFSAADSWLKQLGVQHHDFNFFITHPM

SEQ ID NO: 13381 - protein, 99 aa, Zea mays
  VARIANT 2..99: note = Derived polymorphism lacks residues 2 to 99
  VARIANT 7: note = Ancestral polymorphism is T, Derived polymorphism is M
  VARIANT 9: note = Ancestral polymorphism is C, Derived polymorphism is W
  VARIANT 11: note = Ancestral polymorphism is A, Derived polymorphism is D
  VARIANT 13: note = Ancestral polymorphism is G, Derived polymorphism is S
  VARIANT 16: note = Ancestral polymorphism is R, Derived polymorphism is L
  VARIANT 24: note = Ancestral polymorphism is S, Derived polymorphism is L
  VARIANT 48..99: note = Derived polymorphism lacks residues 48 to 99
  VARIANT 76: note = Ancestral polymorphism is P, Derived polymorphism is L
MQGVSSMWCHATGCQRPGKVVWMSCSCLPLQGCSDSPSSLGSLDTPTRRCFLVFASLSLYHSSTYQISNAEFTFSPWTPFPTKRLLPRILDPNPRRSAS

SEQ ID NO: 13382 - protein, 117 aa, Zea mays
  VARIANT 46: note = Ancestral polymorphism is R, Derived polymorphism is C
MEKYNSNTQFAPLRETPFALRGALGSSSSYLEQARGYTSSPVAALRPKMSTPGNRLLHTSCPLSSAVANRPLSPHLPLKKPQFSATFSISHRIFGVALGVAIISVPLATKFSLMFGV

SEQ ID NO: 13383 - protein, 136 aa, Zea mays
  VARIANT 24: note = Ancestral polymorphism is S, Derived polymorphism is I
  VARIANT 54..136: note = Derived polymorphism lacks residues 54 to 136
  VARIANT 56: note = Ancestral polymorphism is N, Derived polymorphism is Y
  VARIANT 66..136: note = Derived polymorphism lacks residues 66 to 136
MGAGRKLKTHRRNQRWADKAYKKSHLGNEWKKPFAGSSHAKGIVLEKIGIEAKQPNSAIRKCARVQLVKNGKKIAAFVPNDGCLNYIEENDEVLIAGFGRKGHAVGDIPGVRFKVVKVSGVSLLALFKEKKEKPRS

SEQ ID NO: 13384 - protein, 274 aa, Zea mays
  VARIANT 6: note = Ancestral polymorphism is P, Derived polymorphism is A
  VARIANT 14..274: note = Derived polymorphism lacks residues 14 to 274
  VARIANT 20: note = Ancestral polymorphism is A, Derived polymorphism is V
  VARIANT 21: note = Ancestral polymorphism is P, Derived polymorphism is L
  VARIANT 27: note = Ancestral polymorphism is R, Derived polymorphism is Q
  VARIANT 29: note = Ancestral polymorphism is L, Derived polymorphism is M
  VARIANT 30..274: note = Derived polymorphism lacks residues 30 to 274
  VARIANT 35: note = Ancestral polymorphism is D, Derived polymorphism is N
  VARIANT 37: note = Ancestral polymorphism is D, Derived polymorphism is N
  VARIANT 73: note = Ancestral polymorphism is Q, Derived polymorphism is R
  VARIANT 83: note = Ancestral polymorphism is A, Derived polymorphism is D
  VARIANT 94..274: note = Derived polymorphism lacks residues 94 to 274
  VARIANT 108: note = Ancestral polymorphism is S, Derived polymorphism is L
  VARIANT 118..274: note = Derived polymorphism lacks residues 118 to 274
  VARIANT 120..274: note = Derived polymorphism lacks residues 120 to 274
  VARIANT 121: note = Ancestral polymorphism is G, Derived polymorphism is V
  VARIANT 128: note = Ancestral polymorphism is C, Derived polymorphism is F
  VARIANT 180..274: note = Derived polymorphism lacks residues 180 to 274
  VARIANT 193..274: note = Derived polymorphism lacks residues 193 to 274
MVVREPQLGDNPDQAASLLAPNHLCSRELQDLYIDYDSGVEPMNFFHVFLYSQALECVVLSLAKRDELLQFAQGAISGLKINADIARLDNEITQLQQQIKSMDALHVSISSSVKSIHQPQGPVDLFWCTMWMKTTWSSGLWGLLDASGARGNSQEQYGTPMPHIGQTTVEVDLLKYGVIEGDESYGMNLTKEQRVEKIESQKLEKYEAKHDKRHDLKVDQSVQEEYINAYYEALRKKLEEKEAKSRMHHEGKIFVPDAQRECQVGNKYKQDDDE

SEQ ID NO: 13385 - protein, 162 aa, Zea mays
  VARIANT 16: note = Ancestral polymorphism is K, Derived polymorphism is N
  VARIANT 52: note = Ancestral polymorphism is A, Derived polymorphism is T
  VARIANT 54: note = Ancestral polymorphism is C, Derived polymorphism is Y
  VARIANT 76..162: note = Derived polymorphism lacks residues 76 to 162
  VARIANT 121: note = Ancestral polymorphism is M, Derived polymorphism is R
  VARIANT 123: note = Ancestral polymorphism is M, Derived polymorphism is I
  VARIANT 135..162: note = Derived polymorphism lacks residues 135 to 162
MEKVLSVNILSSDYFKELFKYKTYHKVVDEIYNQVDHVEPWMTDNCRGPSSAFCLLYKLFTMKLTVKQMHGLLKHQDSPYIRAEWLEANKDYQAIVDGANIALYQQNFVEGGFSLTQIAMMIMEILNCNLGRELEITLEVTTLYFKVISLNLMPSGRAISAF

SEQ ID NO: 13386 - protein, 976 aa, Zea mays
  VARIANT 615..976: note = Derived polymorphism lacks residues 615 to 976
  VARIANT 706..976: note = Derived polymorphism lacks residues 706 to 976
  VARIANT 765..976: note = Derived polymorphism lacks residues 765 to 976
  VARIANT 773..976: note = Derived polymorphism lacks residues 773 to 976
MDMAPASVYFNPRSVEEIFKDFSGRRAGLVRALTSDVDDFCRLCDPDKENLCLYGLPNGSWEVSPPAEEVPPELPEPALGINFARDGMQRRDWLTLVAVHSDSWLISVAFFYGARLNGNDRKRLFSMMSDLPSVLEAFADRKHGRDRSGVDSSGKSRHSSKRGKDGHAKSFRAAAPAAKEYDEDDDEEDEEEHTETFCGSCGGLYNASEFWIGCDICERWFHGKCVRITPAKADHIKHYKCPDCSSKKMRQIYDAVIKTGTESNAGKAALDALGAELTTPLVADVLHRLRYEEKLAFRFFAWASQQDGYNHEPTTYNDIIDILSGTRYKSRQFGVLCNVLDHMKRHGSRSVPVEDLLEILRAYTEKHLTHMRKLAKKRRVRMRTPPETDALNVLLDAFCKCGMVKEAEAVFGRVKRKLLGNAETYSTLFFGWCRARDPKKAMKVLEEMIQMKHTPESFTYVAAIISFCSAGLVSEARELFEFMRTEGLTISSPTAKTYSIMIVALAKADRMEECFELLSDMRSCGCMPDVTTYKDLIEGMCLVGKLDAAYRVLDEMGRAGFPPDIVTHRKADDALELCERMIEAHCEPSVHTYNMMMMMFFEMGEAHRALDICLEMDKRRCQRAIDTYEIMIYGLFDCGETEYATALLDEVINRDMKLSYKKFDAIMLRSLFKAIRGKYIKKCALNCGLDMDQKADEAILEVLDLRCFDSVQEVDILAYYTLSGELKYQFGSGRIQGKVEYMAYKKMEYKKFLRMFGATKRPECQVAEPALNQKEEVMIEYRPPAPAVHSRPAPQWICPVSFIELSKTTFPSPLVYACCGGFYLQDWSLAWYGSMFVYPLCRKYLMLHVFSMALVSQILSTIGSILVKPTMRRPGSTIRWSNSVRLKSPKLIFRILKEEDVGARACLKLRPVSVLMQLITCGSLSVKDHGNAGVVQMCKPRFPNLRLLPSPLISRTMMMGELDCLSENPKLMGIKL

SEQ ID NO: 13387 - protein, 331 aa, Zea mays
  VARIANT 318: note = Ancestral polymorphism is R, Derived polymorphism is T
  VARIANT 118: note = Ancestral polymorphism is R, Derived polymorphism is G
MASVEGKRETVLVTGASGFIGSTLVGLLLDRGYNVHASVLNPDDKAETEHLVALGAGAGEGRLRVFPGDLLDGAALMAAARGCSGVFHLATPCTVYPVSDPQGQMVVPAVEGTLNVLRAAKEARTVRRVVVTSSSSAIIPSPAWPAGEPRDERCWADVDYCKKNEVWYPVSKTLAEKAAWRFAEENGVDVVVVNPVTAMGPMIPPTINCSMIVLLRLLQGCTEEYRDIWMGAVHVHDAAMAHILVFESPAASGRHICAQSISHWSDFAAKVAELYPEYKVPKFPKDTQPGLVRQGAEEGSKKLVALGLHFSPLEKIIRDAVEALKSRGYIS

SEQ ID NO: 13388 - protein, 276 aa, Zea mays
  VARIANT 155: note = Ancestral polymorphism is P, Derived polymorphism is S
  VARIANT 113..276: note = Derived polymorphism lacks residues 113 to 276
MPFSSSGPPSNDVRTIPYLDECDAPRRKRRHTSYPNRSYYGTPDYECSYCHAVFWYAERVRSNQQDSSMRYSNCCKGGKISIPPFKPRPKPLASLARFDGDATSRKFIRNIRQHNCLFAFTSMGAQIDNSVNDGRGPPLFKFCGQVHHRIGTLLPDDGSPPRFIQLYIYDTTNEVQNRINALDSGDRTQDNFDPVIIRNLIKMLDDHNPFVKKFRMARDRLADNPNEEFTIRLIRAKEGDPIQYNLPTTDELAILVVGDFTLDTFKRDIIIETQNK

SEQ ID NO: 13389 - protein, 443 aa, Zea mays
  VARIANT 383: note = Ancestral polymorphism is R, Derived polymorphism is G
  VARIANT 249: note = Ancestral polymorphism is A, Derived polymorphism is T
  VARIANT 169..443: note = Derived polymorphism lacks residues 169 to 443
  VARIANT 21: note = Ancestral polymorphism is R, Derived polymorphism is S
  VARIANT 3: note = Ancestral polymorphism is G, Derived polymorphism is E
MAGETVLVTGASGFIGSTLVRLLLGRGYNVHAGVLNPDDGAETEHLLAMAAGAGAGEGRLRIFRGDLLDDAARGCSGVFHLASPCTVDPVSDPQVWYPVSKTLAEKAAWRFAEENGLDVVVVNPMSVLGQIIPPTINSSMSVLLRLLQGCTEEYKDIWMGVVHVEDVALAHLLVFENPSASGRHICAESISHLSDFAAKLAELYPNNKVPKFPKDTQPGLVRAEAGVASKKLVELGLQFSPLEKIIRDAVESLKTKGEEGHCGRAMASVEGKRETVLVTGASGFIGSTLVGLLLDRGYNVHASVLNPDDKAETEHLVALGAGAGEGRLRVFPGDLLDGAALMAAARGCSGVFHLATPCTVYPVSDPQGQMVVPAVEGTLNVLRAAKEARTVRRVVVTSSSSAIIPSPAWPAGEPRDERCWADVDYCKKNEHDRAPTPATRCVE

SEQ ID NO: 13390 - protein, 150 aa, Zea mays
  VARIANT 110: note = Ancestral polymorphism is R, Derived polymorphism is W
  VARIANT 107: note = Ancestral polymorphism is R, Derived polymorphism is Q
  VARIANT 70..150: note = Derived polymorphism lacks residues 70 to 150
  VARIANT 41: note = Ancestral polymorphism is A, Derived polymorphism is V
MASAGRWAWMAEVAGEELAKLEAAHPGRFAPLKAELERLVADPGLDEAAFPLVSPRAGAGAVIDPTPAASSQPAAAPSTTVPVCTQESSTRKRKPRGSMREREEGKRRRWASTQPPGGTKDTADTAIERAQRCLERIRAFKQSLLAAWIH

SEQ ID NO: 13391 - protein, 544 aa, Zea mays
  VARIANT 155: note = Ancestral polymorphism is R, Derived polymorphism is S
MSAMDTAVSQNATVAAAATAAGVGSAGLAGLLPEVQTVELLVAVSIFVAIHSLRQRRTQGLPTWPLVGMLPSLLLGLRSDMYEWITGVLKARGGTFTFRGPWLTNLHCVVTADPRNLEHLLKTRFGSFPKGPYFRENMRDLLGDGIFGADDEVWRRQRKAASLEFHSAEFRALTASSLVELVHRRLLPVLAGAEAAAGAVDLQDVLLRLTFDNVCMIAFGVDPGCLRPGLPEIPFARAFEDATEATTVRFVTPTALWRAMRALGVGHERVLRRSLAGVDEFAYDVIRRRKEELADAAAAAGRRSDLLTVFTRMRDEDGRPYTDKFLRDICVNFILAGRDTSSVALAWFFWLLGKNPGVEAKILEEVEGIVAARKGAGEVVEEEEELVFRPEEVKRMEYLHAALSEALRLYPSVPVDHKEVVEDEVFPDGTVLKKGTKVIYAMYSMGRMESIWGDDCREYKPERWLRDGRFVGESAYKFTAFNGGPRLCLGKDFAYYQMKFTAASILRRYRVRVVEGHPVAPKMALTMYMKHGLKVTLTKRGKAN

SEQ ID NO: 13392 - protein, 155 aa, Zea mays
  VARIANT 129: note = Ancestral polymorphism is S, Derived polymorphism is F
  VARIANT 106..155: note = Derived polymorphism lacks residues 106 to 155
  VARIANT 68: note = Ancestral polymorphism is R, Derived polymorphism is M
  VARIANT 65..155: note = Derived polymorphism lacks residues 65 to 155
  VARIANT 49: note = Ancestral polymorphism is S, Derived polymorphism is Y
  VARIANT 45: note = Ancestral polymorphism is S, Derived polymorphism is L
  VARIANT 38: note = Ancestral polymorphism is A, Derived polymorphism is T
  VARIANT 30: note = Ancestral polymorphism is S, Derived polymorphism is F
  VARIANT 26: note = Ancestral polymorphism is C, Derived polymorphism is R
  VARIANT 22: note = Ancestral polymorphism is E, Derived polymorphism is K
  VARIANT 19: note = Ancestral polymorphism is T, Derived polymorphism is I
MEAPYPPREGMESRSTVDTVLEEQRCSAASNLLARRAAASALASSRIKSTRSIALRAYGDILPSRHMRTYSPLEGGNEGEGGESRSLGKGFGFNKGFVAKYDLGDEVRWGHFGYTCAATIKKGTRKRESVAIKVIPKAKVMFSSRNALLWHLFYV

SEQ ID NO: 13393 - protein, 254 aa, Zea mays
  VARIANT 40..254: note = Derived polymorphism lacks residues 40 to 254
MVVGSTLRRASDGSGNALGGAACGATSSSPALVVAAAGARAVGGGRAIAHIYSLVASALSSDDFPRLHTSRQLFSLATSRLNRLRRPDLAASLLDLLLASAPPSPGLLARALSLYPGPDDALRAFSSSAPATRSDVSLSAFLRAGRLDDIKSTITLAESSHGVTPGRASHNVLLHALVKNSELAAARMLLDEMANNKSKHRPAPDIISYNTVLAGCSVQDDEEGFEKLLNEISLNKPDTVVLQERRDSQGGGAA

SEQ ID NO: 13394 - protein, 373 aa, Zea mays
  VARIANT 238: note = Ancestral polymorphism is N, Derived polymorphism is Y
  VARIANT 223: note = Ancestral polymorphism is A, Derived polymorphism is T
MASGEEGKGETVLVTGASGFIGSTLVRGLLGRGYNVRAGVLDPDDRAETDHLLALAAGAGRLSFFRCDLLDGAALLDAARGCSGVFHLASPCTVDPVKDPQVCTSSCRAQCSIVVTVTSRRRLPARRRAHTHDPRTPTLLRSPSVQNQLMVPAVEGTLNVVRAAKDAGGVRRVVVTSSISAVVPNPGWPAGEVVDERCWTDIDYCEKNGVWYPASKTLAEKAAWKFAEENGLDVVVVNPGTVLGPMIPPAINASMAMFCRLLQGCTEEYADFFLGPVHVEDVAMAHILVFESASASGRHLCVHSICHWSDFAAKVAELYPDYKVPKFPMDTQPGLVRQEVGSKKLTALGLQITPMEKIIRDAVESLKSRGHIS

SEQ ID NO: 13395 - protein, 399 aa, Zea mays
  VARIANT 298: note = Ancestral polymorphism is Q, Derived polymorphism is L
  VARIANT 304: note = Ancestral polymorphism is G, Derived polymorphism is S
  VARIANT 357: note = Ancestral polymorphism is G, Derived polymorphism is C
MERRLSATSRRSAPSAIQRLSHLAQRVGAVNLAEGFPDFPAPPHVKAAAVAAIAADLNQYRHVQGICDILANTMKRDHDLDVDPLTDFVICCGQSEAFAAAIFAIIDQGDEVLIFDPAYETYETSIELARGVPVYVPLDPPSWTLNEEKFLKSFTSRTKALVLNSPHNPTGKVFSKEELLIISQACQKMDCFVITDEVYEYITYDANKHISLASLPGMQERTIITSSLSKTYSVTGWRLGWACAAASIASAIRNIHIKLTDSAPAPFQEAALIALTSTADYYISLRKDYEVKRDFILLLLKDLGFKISVKPQGSVFVFAELPRSCQLSDVEFVTKLINDAGVVAVPGRGFFHKTCDGESYCHRYVRFAFCKGDDTLKAAAMKMRKLASRQGEPWLTGRQ

SEQ ID NO: 13396 - protein, 320 aa, Zea mays
  VARIANT 151..320: note = Derived polymorphism lacks residues 151 to 320
MATRNRTPLYRKYRDALRHVRAPAGATSSSCGGGGGSVIEMASLLRSDRPYAPLSIEDPSASSRGAVSVGLPPAWVDVSEEISANMQRARTKMTELAKAHAKALMPSFGDGRDDQRAIEVLTHEITDLLKRSEKRLQKLSMKDLSEDSNVRKNVQRSLATDLQNLSMEFRKKQSSYLKQLRQQKEGQDGVDLEMNMNGTKSTFEDDEFDDVGFTEIQMSKLKKSEAFTREREREIEQVVESVNELAQIMKDLSVLVIDQGTIIDRIDYNIQNVAASVEEGYKQLQKAERTQKKGGMVMCATVLVILIFIMIVLLILKTIF

SEQ ID NO: 13397 - protein, 359 aa, Zea mays
  VARIANT 37: note = Ancestral polymorphism is L, Derived polymorphism is Q
  VARIANT 23: note = Ancestral polymorphism is A, Derived polymorphism is V
MHHRMGRFLLLPALTLVVASAWVPITFADPQATLLNQGCSQYNATPASAFIAALNSTFASLRANLSAASSVGFATAAEPRAAAPAFAMAQCRPYVAGRDCVACFDAAAAGLRATCVAGRAANGGRAILDGCMLRYESAAFFDQSTLPGNTQLCNGSAVQAGGFADAARALVADFAAAVPRVPGLAAAAASGGVYAAAQCVETVGEAGCAQCLNVAVGNIDGCPPNSDGRAVDAGCFMRYSDRSFFPANSTTVDLAIYLRSGECSSLFASYVFLRGLLFRGYTAPEYAIHGQLSEKVDTYSFGVVVLEILSGRKSNDTRLEPETQYLLEWVSFIDHCSETSLFLVHALPSIAAISHIFHA

SEQ ID NO: 13398 - protein, 295 aa, Zea mays
  VARIANT 198: note = Ancestral polymorphism is L, Derived polymorphism is H
MEGLHAQSAACHRQRAILSIHARPCAKSSLDAPRRLAQPVEQIRVDPVSISRQLGEFRRECRPPPFDSDAPRTTPPKPSSKSALCKWWRSLAPALLAVALAITVAALRPTTEHADAKGRPPLWFGPGGVFKVALFADLHYGEDAWTDWGPAQDAASDRVMAAVLDAENPANNTHLYGLLCLLLMQVAKDPSGKDINALEQHIKNLLSPSTPFFFNTLYDPYRVGANFVRGYPYSLREGVPTVVSHELWLNIPDCDAPTQLVKPLERNTRYVDAILTIPKGTLFPMCGMNLAFDPI

SEQ ID NO: 13399 - protein, 305 aa, Zea mays
  VARIANT 153: note = Ancestral polymorphism is L, Derived polymorphism is S
MSSGADGSDPCTGLDPGTIPELPAHEPPVLQAPSPAPQQEVVVASQTEAPLPAVTIVISRPGEDVQMPDAKGGSPACSPQAGDGKPMATSVSLTASAAAKEAGLARSDSDSLDDYEQCRSNTCTLNKPRFQLRMNTFFTSAEFVNRRQKNLWSTLDADVVVILQKHIAHALIFGFVLEVQTSVRYASRLLSISPLQKRNQVYVYYFALYIFRSILDHLENGWFSPLWVAFAILIGGLLLDVLISVSLGVSALPVNIIIGVLIVLGLGTALHLALECCHEWGSRRNVANIPRLENIAPTGYHPAVV

SEQ ID NO: 13400 - protein, 323 aa, Zea mays
  VARIANT 81..323: note = Derived polymorphism lacks residues 81 to 323
  VARIANT 187..323: note = Derived polymorphism lacks residues 187 to 323
MAARRGPHVIKLHDPNPPLLGRAPGTAPAAIPAPSRDEGILAQHPRAAPSSASASHPAFALIEERLVARDQDIQELLVDNQRFAATHVALQQQLIAAQHELRAVSVAATRARAEREVEVRALADQAAHIEAEARAVAAARAEVDQVHADVQVLVAARTDLVNRLQGLREKLAHKKAEASKTDSVRAQIETMRREIQKGRAAVDFEKKAHSDNLEQSKAMEKNMIAVASEIERLRGELANAEKGATAVNPAAAVGNSGYVAAYGNSEPTYTAMYGNPDATYTAQAYPDAYNTNQAHMHAGASSYYTSQPFSYGQYESQHTNIQR

SEQ ID NO: 13401 - protein, 130 aa, Zea mays
  VARIANT 77: note = Ancestral polymorphism is A, Derived polymorphism is S
  VARIANT 88..130: note = Derived polymorphism lacks residues 88 to 130
MAHERHSRSLRSTNHVTETVDEEDKGQGKESQPPQSRVPPAATTTTAMISILAQERLLGFALGSVSMGGFVLHQRRAIYRSIAEADGSSYFYQPGEIAGRRSSTELAHVWNKAVDETLGKLVVYLSSRGW

SEQ ID NO: 13402 - protein, 56 aa, Zea mays
  VARIANT 47: note = Ancestral polymorphism is C, Derived polymorphism is F
  VARIANT 45: note = Ancestral polymorphism is C, Derived polymorphism is Y
  VARIANT 44: note = Ancestral polymorphism is R, Derived polymorphism is C
  VARIANT 43: note = Ancestral polymorphism is Y, Derived polymorphism is N
  VARIANT 41: note = Ancestral polymorphism is A, Derived polymorphism is T
  VARIANT 39: note = Ancestral polymorphism is S, Derived polymorphism is F
  VARIANT 20: note = Ancestral polymorphism is L, Derived polymorphism is V
  VARIANT 18: note = Ancestral polymorphism is L, Derived polymorphism is S
  VARIANT 7: note = Ancestral polymorphism is Q, Derived polymorphism is H
MGIQFHQNIVVPMSVGSLGLIASQNGIHFKKYAEKLLDSGAVYRCFCSNEEFEQMK

SEQ ID NO: 13403 - protein, 157 aa, Zea mays
  VARIANT 115: note = Ancestral polymorphism is R, Derived polymorphism is C
  VARIANT 4: note = Ancestral polymorphism is V, Derived polymorphism is A
  VARIANT 3: note = Ancestral polymorphism is A, Derived polymorphism is V
MAVVAAIALVLLPVGRGEEMPTAAHPHGLSFESPLALSPAAYDFFHPSARARRAHGVAPVPALAPRGQEQLRPEGVRGQKNIGERSEGRPGRRGRGARGDAPAPQPQGDMRVRRRRSSRASGYRRGVRRGAAPGRSGARWRGRAQVERVVASGPADW

SEQ ID NO: 13404 - protein, 184 aa, Zea mays
  VARIANT 97: note = Ancestral polymorphism is H, Derived polymorphism is P
MSESGPAADGGAGGGPADAGGVRSMVQRWKMDGAPARARLLLRALAWLFSLLALVVMASNQHGGSQDFREYPEYNYCLGISIVAWLYATAQVLRDVHRLGSGRDLIAARKASAVVDFAGDQVVAYFLISAMSAAAPVTDYMRQAADNLFTDSAAAAISMAFFAFVAIGLSALVSGYNLSMEALV

SEQ ID NO: 13405 - protein, 520 aa, Zea mays
  VARIANT 85: note = Ancestral polymorphism is T, Derived polymorphism is I
  VARIANT 93..520: note = Derived polymorphism lacks residues 93 to 520
  VARIANT 101: note = Ancestral polymorphism is A, Derived polymorphism is V
MYKNQLQELAQRSCFNLPSYTCLREGPDHAPRFKAAVNFNGEQFESPGFFTTLRQAEHAAAEVALAALARRGPSYSLAARILDETGVYKNLLQEVAQRVGAPLPLYTTERSGLGHLPVFTCTVELAGITFAGDPAKNKKQAEKNAASAAWSALKQLVREEVNSSNEPENIDEQEQIRIARALLNYRLKEKMAMANYPHVSPFPKKFPMQQERKPCLGQSCQSSHSKILPLFRPKPNSRPKSPASTDGVSKTPGRTVESLVDQSPRSRFPAAEAAPYVPVGHYRRIPCHNMAPSVTIRTAVPVFSAPPLPPPPARLQQLPPLMSHPPPIRMASPVRMRPAPASPMFASSSPVQVPKPVMPVQLKDVQDHPRKEAVPLPPVIPVQVKDAQCRPRKSSMSPVIPVPVKDAQRRPAAIPVQMKDVQTQAPKEPLAAPIPAARPSVMTDTPAQVKEASAGATSEAPSSATGNNAAVECSASSETVLARQSGAADEDTLVLMRKLSMRPEAQSAAEAATTMRLETN

SEQ ID NO: 13406 - protein, 132 aa, Zea mays
  VARIANT 27: note = Ancestral polymorphism is A, Derived polymorphism is G
MTFKRRNGGRNKHGRGHVKYIRCSNCAKCCPKDKAIKRFLVRNIVEQAAVRDVQEACVHDGYVLPKLYAKVHHCVSCAIHAHIVRVRSRENRRNREPPQRFRRRDDGPRPGQGPPRPGGAAPAAAAAAAPRT

SEQ ID NO: 13407 - protein, 735 aa, Zea mays
  VARIANT 342..735: note = Derived polymorphism lacks residues 342 to 735
  VARIANT 347..735: note = Derived polymorphism lacks residues 347 to 735
MQGHMLQALCIPAVIVFASALVLVAAVLCAVAVRALRRAAAREMALNVDLARQKEALRQAERKSMNKSNAFASASHDIRSALSAIAGLVDMSRQEAQSLPAVMENLDQMGVCTNKLFDILNSILDTSKVESGKMQLEEAEFSMADVLQESVDMAYVTGVRRGVEVVWDPCDFSVLRCAAVLGDSKRLKQILDNLLGNALKFTDEGHVVLRSWATRPITGSNVRAPSRFVHPRHGGGGFLGCLFRARKRPGDQDHVQNDPNLVEFYFEVVDTGIGIPQEKKMSVFENYVQVNNGQGGTGLGLGIVQSFVRLMGGEISIKDKEPGERGTCFAFNVLLRISEVQQPQDIEEGPSVPLGTLNRSISIASAFQEASNFKGVHCVLYVHGYETRRILQTWMESIEVKVWLVPQAEFIGSTLEKVQSNSTATATAECGSADRCFSSKEMVNLLRNNSSPRRAILGGIPSGILVVIDVSGGETEEICQEMAKLSRIKHQAPCKVVLLEDIKTPSNDLRRLKDMGCDLVLRKPVHGSRQFTLLMTLRDLQVLDAQAQSSHVGPEIAGNSQQQDLPDVVVPCVEDTVASTEASCLAQKPGDDKPLAGMRILLAEDNLVLQSIQRKIMNQLGAFVTVAQNGTMAVNLLREALEQANASEEDIVSLPYHVIFMDCQMPGMDGYEATKLIREEEQRYGIHAPIIALTAHDMEEDLQKAIDAGMDLHLAKPISRKKIVDAVRSFCKCEN

SEQ ID NO: 13408 - protein, 338 aa, Zea mays
  VARIANT 119: note = Ancestral polymorphism is P, Derived polymorphism is L
  VARIANT 123..338: note = Derived polymorphism lacks residues 123 to 338
  VARIANT 186: note = Ancestral polymorphism is D, Derived polymorphism is V
  VARIANT 207..338: note = Derived polymorphism lacks residues 207 to 338
  VARIANT 208: note = Ancestral polymorphism is I, Derived polymorphism is T
  VARIANT 209..338: note = Derived polymorphism lacks residues 209 to 338
  VARIANT 217: note = Ancestral polymorphism is R, Derived polymorphism is C
  VARIANT 218: note = Ancestral polymorphism is R, Derived polymorphism is T
  VARIANT 315: note = Ancestral polymorphism is R, Derived polymorphism is C
MGFELLPTFHGDLPLAGADAWLWEKANTAADSTENSVHSTVLCPRLFSVSLSSSRQECPPSSEISESPSSCPSPDRSRTSPASRSMFFVPLHVIPAGGGSTVWENDAPPLRQYGRTVAPVVAWPHLQSQAHRLIDDDEVHRGYRDGFILVVFFGDKSTGGSSPASSSPSRTASPRRQPTPRPSTSDVIFFLVNLPAFDTNVDYHRHQTQAARQRFVRRRSSTKCLTLPWLMAQRDAAEKAAHTVPGMEMTTLFSAYRRAVFSPIDHLRPSVGTSGWIPSFRLLRTREPRRQSELNKELIEERTTTICIIKYHLRRHYWALLFDHVIRSPYNIKNIEKK

SEQ ID NO: 13409 - protein, 279 aa, Zea mays
  VARIANT 227: note = Ancestral polymorphism is E, Derived polymorphism is G
MSGLYSQGFSPARNLSPQIRSNPDVDSQYLAELLAEHQKLGPFMQVLPICNKLLSQEIMRVSSIVHNHGFGDHDRHRFRSPSPMSSPNPRANLPGNGFSPWSGLQERLGFPQRTSMDWQGAPPSPSTQVVKKILRLEVPVDSYPNFNFVGRILGPRGNSLKRVEASTGCRVFIRGNGSIKDPGKEDKLRGKPGYEHLSDPLHILIEAEFPASIIDARLRHAQEIIEELLKPVDESHDFYKRQQLRELALLNSTLREDSPHPGSVSPFSNGGMKRAKTGQ

SEQ ID NO: 13410 - protein, 119 aa, Zea mays
  VARIANT 93..119: note = Derived polymorphism lacks residues 93 to 119
  VARIANT 89: note = Ancestral polymorphism is S, Derived polymorphism is I
  VARIANT 88: note = Ancestral polymorphism is A, Derived polymorphism is V
  VARIANT 77: note = Ancestral polymorphism is R, Derived polymorphism is Q
  VARIANT 71: note = Ancestral polymorphism is G, Derived polymorphism is V
  VARIANT 66: note = Ancestral polymorphism is A, Derived polymorphism is T
  VARIANT 65: note = Ancestral polymorphism is R, Derived polymorphism is H
  VARIANT 47: note = Ancestral polymorphism is E, Derived polymorphism is K
  VARIANT 34..119: note = Derived polymorphism lacks residues 34 to 119
  VARIANT 28: note = Ancestral polymorphism is R, Derived polymorphism is C
MDTNSMDPFNGLYVGAFSPYGPEIVQLRQKFGHWNSSDDVEFFEYVEAVKLTGDLSVPAGQITFRAKIGKGKRLENRGAYPEEFGVIASYKGQGRIAQPGFKNPRWVDGELLVLNGKVD

SEQ ID NO: 13411 - protein, 446 aa, Zea mays
  VARIANT 264: note = Ancestral polymorphism is R, Derived polymorphism is Q
MPADAAAAAPAPAPAPHPPPAILDARTGGRILRRAAGHLVHPASLPPLLLAALLLLLFRSALLAGTLRLASFADRDPALRSLLARLSSPNPPSPPPPPHHLPRRRSPFTSPSSSLSDDDILVSPLDPTASTPSSRRNASYHHVQFTSYSTVPKPYTLPLPASASPFFIAVYNETAPPKPASRRGSELGLLDLTRRDAAAIVNLLALLSSAHIFAILGYIAVHSIALGAVFASVAGHHRPGQRLVFLLTGAAKGAKRLTGFAFLRWATRDAVVQMLCLWFFADVHDQAQLFRLFVVAKLMPFSASVNPWLGAAVAGPELGGFFVAWAVFDAVVSVLFTVVPWVVVMDRDPRPPGRNAVKEGCYLVSLMATDATMLKCWETVVCGSMGRLIMVTFGGKVFGGFLHSIAQVYFMVVWLLFYFAARCKEVRLGGRQFGLEDVAAALDGFR

SEQ ID NO: 13412 - protein, 305 aa, Zea mays
  VARIANT 217..305: note = Derived polymorphism lacks residues 217 to 305
  VARIANT 180: note = Ancestral polymorphism is P, Derived polymorphism is L
  VARIANT 173: note = Ancestral polymorphism is G, Derived polymorphism is D
  VARIANT 167: note = Ancestral polymorphism is P, Derived polymorphism is L
  VARIANT 166: note = Ancestral polymorphism is R, Derived polymorphism is C
  VARIANT 161: note = Ancestral polymorphism is V, Derived polymorphism is M
  VARIANT 157: note = Ancestral polymorphism is G, Derived polymorphism is R
  VARIANT 156: note = Ancestral polymorphism is P, Derived polymorphism is L
  VARIANT 151..305: note = Derived polymorphism lacks residues 151 to 305
  VARIANT 135: note = Ancestral polymorphism is A, Derived polymorphism is V
MGLRHRAPWIQSLAGDLGEVAAVGSRLEAAAAMGLETERRASGGLCPPRREPDGRRGSRERKSIGCLEETWRRRWGYRLLEERDDGQALHQCRHPSLGAALRSSAGGCDPALLPALLLLLAGRDQPGPHHRIAIAVDLFDESAFTVKWAVQNYLRPGDAVVLLHVRPTSVLYGADWGSILVSIADEADAAEDTAASLLDVGHLEASARGFDVNRASSLSAAGAATEEDEEQDEAGASSSPNNSASSFPTYFFAQGQVAPDADRACSRASDEDDDDSTRKKPRLSKEQSAFLEDNFKEHATLNPSM

SEQ ID NO: 13413 - protein, 299 aa, Zea mays
  VARIANT 114..299: note = Derived polymorphism lacks residues 114 to 299
  VARIANT 129: note = Ancestral polymorphism is R, Derived polymorphism is W
  VARIANT 150: note = Ancestral polymorphism is D, Derived polymorphism is N
  VARIANT 161: note = Ancestral polymorphism is A, Derived polymorphism is V
  VARIANT 166: note = Ancestral polymorphism is P, Derived polymorphism is L
  VARIANT 188: note = Ancestral polymorphism is A, Derived polymorphism is V
  VARIANT 210: note = Ancestral polymorphism is L, Derived polymorphism is F
  VARIANT 259: note = Ancestral polymorphism is S, Derived polymorphism is L
  VARIANT 268: note = Ancestral polymorphism is P, Derived polymorphism is L
MAKEESTLGSSALAGTDECAATALRSRISILLLLPVVAVVSGETAAHPGYAHAEEACGGVLEAEAEKATVLVPAPERRKEFDGGRIVDIIHYYREDMPEWESSEGSGEFLQLAWSMRNGSDIANFSELRLTAHSGTHVDVLGHVFEHYYDACFNVDTLELAVLNGPALLVDVPRDKNITVQDKSQNIAYFLIVADVMASLNIPKGVRRVLFRTLNTDIFNLKNLWKKEFDTSYVGFMKDGAQWLVDNTDIKLVGVDYLSVGAFDECIPAHLVFLEKRGWCEDPIIWSWASADPIDTNMS

SEQ ID NO: 13414 - protein, 186 aa, Zea mays
  VARIANT 122: note = Ancestral polymorphism is G, Derived polymorphism is V
  VARIANT 76: note = Ancestral polymorphism is N, Derived polymorphism is K
MPPIYSLFAAKAGESSVVAVDGSAKMASVATQVAKNNGMLYDENVEAEQKQGSAQVISVVHTKAEELNQKIQVPQNGFDLLVSEWMGYCLLYESMLSSVIYARDHFLKPGGAILPDTAMILGAGFGKGGTSLPFWENVYDFDMSCIGKEVTSTSARFPVVDGSGCPDSCRNVLDMMNQNHFVKSLG

SEQ ID NO: 13415 - protein, 287 aa, Zea mays
  VARIANT 157: note = Ancestral polymorphism is S, Derived polymorphism is P
  VARIANT 189: note = Ancestral polymorphism is L, Derived polymorphism is I
  VARIANT 195: note = Ancestral polymorphism is T, Derived polymorphism is A
MPVEKIDHALETIKFNGIHNVLALRGDPPHGQDKFVQVEGGFACALDLVQHIRSKYGDYFGITVAGYPEAHPDAIQGEGGATLEAYSNDLAYLKRKVDAGADLIVTQLFYDTDIFLKFVNDCRQIGITCPIVPGIMPINNYKGFMRMTGFCKTKIPSEITAALDPIKDNEEAVRAYGIHLGTEMCKKIIASGIKTLHLYTLNVDKSALGILMFTRPRGRGKKLQEEWAVPLKSVEGISERFTNFCQGKLTSSPWSELDGLQPETKIIDDQLVKINQKGFLTINSEPA

SEQ ID NO: 13416 - protein, 278 aa, Zea mays
  VARIANT 45: note = Ancestral polymorphism is G, Derived polymorphism is V
  VARIANT 64: note = Ancestral polymorphism is D, Derived polymorphism is N
  VARIANT 88: note = Ancestral polymorphism is R, Derived polymorphism is W
  VARIANT 96: note = Ancestral polymorphism is L, Derived polymorphism is R
MGRAPCCEKKGLRRGAWSPEEDQRLVAYVRQNGHPNWRALPRQAGLLRCGKSCRLRWINYLHPDIKRGNFTADEEALVVRLHRELGNRWSAIAAQLPGRTDNEIKNVWHTHIKKRLGGDDGGGTGGRQEKKARKSRTRTAGATKRPAADVDSSERQPASPGQSSSVSSGVTFSAAAVSSSPDNAAATSRQEEQLQVGGAGKAEMEMEMEMESFSSAEFPAIDDSFWSSADVTDLGLCAMDGDELGIAGPPSSSTRDQDMEFWLKMLLEAGDMRDLSVL

SEQ ID NO: 13417 - protein, 117 aa, Zea mays
  VARIANT 48: note = Ancestral polymorphism is W, Derived polymorphism is R
  VARIANT 51: note = Ancestral polymorphism is P, Derived polymorphism is L
MAAGIGGQDWRVRNRGGAWLAAVIGGELGAWRAAFCAFLAAVIGGGGWGGPGGYVYQKAYLEFFCAKEKLYDQLIEKIKAFPSLTFIAVNKDGESFSNIAPNAANAVTWGGLPWQGD

SEQ ID NO: 13418 - protein, 564 aa, Zea mays
  VARIANT 278: note = Ancestral polymorphism is R, Derived polymorphism is C
  VARIANT 264: note = Ancestral polymorphism is P, Derived polymorphism is S
  VARIANT 177: note = Ancestral polymorphism is P, Derived polymorphism is R
  VARIANT 19: note = Ancestral polymorphism is G, Derived polymorphism is R
MFAVGPDAGRGGFVEVFAGFGVRSGEGLRWWTLTPRREVTGLGLGDDGLGLGAEREEAILYRVSFIVSAVSDVLLDATEVLGGDSTLKLLSTKLAQAYGSCNNEQNSKWQPVEATLFCIQAIARSVSIEEREILPQIMSLLPCLPQHEQLLQTVCLTIGAFSKWIDAAPAELSILPPLVDILNKGMSTSEDTAAAASMAFKYICEDCRTKFSGSLDGLFQIYHIAISGVGGYKVSSEDSLHLVEALSNVKQPEVVAEAVYRYWPTLKSIFDQRAWDTRTMESICRSCKFAVRTCGRFMGMTIGAMLEEIQTLYQQHKQSCFLYLSSEVIKIFGSDPSCAGYLTSLIQILFSHTVQLLRTIQDFTARPDIADDCYLLASRCIRYCPDLFIPTETFQRLVDCAMAGITIHHREACKSILSFLSDVIDLPNSSGGGQYREVINTIILQRGTTLTRIMIAALTGALPSGRLEEVSYVLLSLSRAFGEDMLNWARESINLIPPQALTDAERLRFFNIISDATSGSSLHNITDRFGEISDICRRNKTVQDLVQSALRPQDLTVTVVRQQM

SEQ ID NO: 13419 - protein, 219 aa, Zea mays
  VARIANT 192: note = Ancestral polymorphism is A, Derived polymorphism is P
  VARIANT 173: note = Ancestral polymorphism is W, Derived polymorphism is C
  VARIANT 6: note = Ancestral polymorphism is V, Derived polymorphism is A
MLELLVLPPALDLLLHSCLIVSVSSLLIMLALQPLLPGGTDVASASRGVRSASRAVLARLLPSSSRTRSGVPVAPPPPPPPPRHCELCAASSWPGTVAAVTATLHLDADADGDTERSSISSAEEDGTACGGCAALAAVEELLGSKEATERELREAFRVFDRDEDGFVGAAELWYVLRRLGMGGSSSAREDCARMIAAHDADGDGRISFREFRDMMERAV

SEQ ID NO: 13420 - protein, 984 aa, Zea mays
  VARIANT 881..984: note = Derived polymorphism lacks residues 881 to 984
MATMPPPSPSPRHPPRTALSPRCTALHNPSTYVYHCQLLNGTPQGHAPPRHARARPFREQERDLAASYAREIGSCVRVRRWGAACEAFASMLTAGAAPDRFLLPQVLRACAGLGAPRLASAAHALAAKGGAELAGDPVVGNAIVAMYAALGDVASARAAFASLPDRDVVAWTALISAHADAGELEEAFDLFEEMQESGVRPDVISWNTLVSGFARSGDLVAALHLFDEMRQRGVDPGVNSWNCIISGCVQNALYEEALEVFLEMCESERPDAVTVASILPACAGLQALGIGKQLHSYVLRCGIKINVYVGASLISLYSECGEFDDARVVFSTIQEKNVNVWNELVQSYTREGRMDKAWDVFDLMQEDGLKPDIVTYNTLIAAYAKVGQNEQTYELFSRMADVGLKPNVVSMNALICGLHQHGLYTDALEAFRYMQRSSDGKAKGWTFLDNRGPIQPTGTTITGLLSLLADLKLDRLGKEVHCYALKNGLASNIYVSSKLVDFYGKTDDMTSAANVFQKIRNKNVVTWNSLLAAYKHNRKPEATLRLLAEMLESNFDPNLVTIHIALMSCGMTMALGYGRELHSYIIKCWPGGYPATLASALIDMYGKCGNIEDARLVFKSMVPKDVAVWNAMMSCYLLHRMPKDIIDLFNYLEQSGIQPDHITFILLLSACKQEGLLEEAQSYFYNMEDVYGIKPSLKHYTCLVDIMGSAGLLAESLTLIQKMPLKPDACLWSTVLKACKLYSNLEIGEKAAKALFELEPNNTSNYMVLSNIYADTGLWDSTKAVRDAMTEQGLHVERQCSWLYNGTTVHPFEAGNLSHPAIDTILSTWEDLATRMEQSGYSPQDIGPYYNVEVDPLSCHHTEKIALWLVSTIYATILKHSTLLSISSLLSRARRDPRQQIWPASCVNLKLFTVKGQATMNTLVIGCKVGYAPVASSVDANSGSLKSFTGFHKKKSHGHSSYQLRVVHAVDTHDSRTVQLFIYR

SEQ ID NO: 13421 - protein, 322 aa, Zea mays
  VARIANT 186..322: note = Derived polymorphism lacks residues 186 to 322
  VARIANT 117: note = Ancestral polymorphism is P, Derived polymorphism is T
MAKRRSTFGLARFGCCGSQQAREEKMTEDGYPVKLHVYDLSQGMARQLPATIVGREAIEAIWHTGVVVYGREYYFGGGIQEGQPGRTPYGTPVRVEDLGVTHVPREVFEEFLREIGPRYYTLATYKLLNHNCNSFSNEAAQFLAGSAIPSYILELPNQVMNSPVGALILPMIQGLEASLGAGAVPQPPQFRPVLAPLGAATVALPLTDDVEPGSAAADEPEAAKIAGASDGTPVPLSVQPAAAPAAAAAQASAVPTVSSMLVPPDPHAEAKSRVQEEIKREFADIMAAGTARAGEAAALATRRVMERHGAGVISGPMPLVMT

SEQ ID NO: 13422 - protein, 153 aa, Zea mays
  VARIANT 37: note = Ancestral polymorphism is A, Derived polymorphism is V
MAVAGAIFGAAFGGWMNDKFGRRPSIILADALFFGGVVIMAFSPTPRVIVVGRVFVGLGVGMASMTAPLYISEASPARIRGALVSTNGLLITGGQFLAYLINLAFTKVPGTWWWMLGIAGVPALVQFVLMLMLPESPRWLYRKVDSSICFYKK

SEQ ID NO: 13423 - protein, 336 aa, Zea mays
  VARIANT 258..336: note = Derived polymorphism lacks residues 258 to 336
  VARIANT 254..336: note = Derived polymorphism lacks residues 254 to 336
  VARIANT 253..336: note = Derived polymorphism lacks residues 253 to 336
  VARIANT 217: note = Ancestral polymorphism is D, Derived polymorphism is Y
  VARIANT 200..336: note = Derived polymorphism lacks residues 200 to 336
  VARIANT 95: note = Ancestral polymorphism is A, Derived polymorphism is S
MILLKIVVVVMDGGNAYLSVECHVQAEEVVVEKTKTMIKSLYILSKVPLDSCKSACTCSSSWTGSCNARSMGCRLIVYHYCLSVLVPTNIQHIVAFSGNASQGGTTLPMIYVLGDSLAPVENNNNLVTLLKANFLRNNIDYLGHKATGCFSNGKNSIDFLGTCVYHHRETTSSCTRSAMLIGTKGKRHNFEAKFTDACYWHQVSRLREYQGVDSRFDVIARQYLEIVWVIFPVLLPLVCLLTMVELQKLESMQWTIHQANQSGIDNNLDRAKLGKLGDLRNSWNMLSKQYKEEYEKCIEESKSLDYDKLYKGLEVLADLDKHANSRVIIPLTGSPL

SEQ ID NO: 13424 - protein, 223 aa, Zea mays
  VARIANT 158: note = Ancestral polymorphism is P, Derived polymorphism is L
  VARIANT 154: note = Ancestral polymorphism is R, Derived polymorphism is L
  VARIANT 103: note = Ancestral polymorphism is A, Derived polymorphism is V
MSDLHPPEHQVVGHRASASKLGPLIDGSGLFYKPLQAGDRGEHEVAFDEAFSAHAAVPARIRDTFFPRFHGTQLLPTEAQPEEPHPHLVLDDLLAGFEAPCVADIKIGAITWPPSSPEPYIAKCLAKDRGTTSVLLGFRVSGVRVVGPEGAVWRTERPEVKAMDTVGVRRVLRRYVSSVADEGMDCALAAAVYGGKGGVLSQLRELKAWFEEQTLFHFYLDLI

SEQ ID NO: 13425 - protein, 482 aa, Zea mays
  VARIANT 65: note = Ancestral polymorphism is A, Derived polymorphism is T
MKYPTQTNLPPTDPNRHPLSPSLPHRTSRRARGGGVEMESDQGKLFIGGISWETTEEKLSEHFSAYGEVTQAAVMRDKITGRPRGFGFVVFADPAAVDRALQDPHTLDGRTVDVKRALSREEQQASKAANPSGGRNSGGGGGGGGGSDASGARTKKIFVGGLPSTLTEDGFRQYFETFGIVTDVVVMYDQNTQRPRGFGFITFDSEDAVDRVLQKTFHDLGGKLVEVKRALPREANPGGSGGGRSGGGGGYQSNNGHNTSSGSYDGRSDGGRYGQTQQGSGGGGYGAGAAGYGYGANPAVGYGNYGAGGYGGVPAAYGGHYGNPGAAGSGYQGGHPGSNRGPWGSQAPSAYGTGGYGGSAGYSAWNNSSGGGNALNSQAPGGPAGYGSQGYGYGGYGGDPSYASHGGYGAYGARIDSAGNPATGGSSGYNAGYGSGGANSGYSSAWSDPSQGGGFGGSVNGGAEGQSTYGTGYGSVQPRVAQ

SEQ ID NO: 13426 - protein, 247 aa, Zea mays
  VARIANT 22..247: note = Derived polymorphism lacks residues 22 to 247
  VARIANT 36: note = Ancestral polymorphism is A, Derived polymorphism is V
  VARIANT 44: note = Ancestral polymorphism is T, Derived polymorphism is I
  VARIANT 47: note = Ancestral polymorphism is N, Derived polymorphism is Y
  VARIANT 79..247: note = Derived polymorphism lacks residues 79 to 247
  VARIANT 192..247: note = Derived polymorphism lacks residues 192 to 247
MGCSISKVDNEEPVRRSKDRRQLMKQLVRRRPDLAAVHIAYLHILRNTGATLRQFVELESALSQQPPVDLVAPPSPTPQPPPPPELSVTSSLPPSPCPPPPVPFSPLTTTRKMEKRDDELPPPPPLVLSPIRLRKREDEFHGDDFTDDDDTDSCSTPQPPPLPPGIDWEDLDPYNVRPLSFPSPFADRNDKEVASHVTMDNDLEVDTRSDGEEDESMLGNNDGIVDRVHVNPAKGRALGDGNSSTVS

SEQ ID NO: 13427 - protein, 483 aa, Zea mays
  VARIANT 140..483: note = Derived polymorphism lacks residues 140 to 483
  VARIANT 91: note = Ancestral polymorphism is S, Derived polymorphism is F
  VARIANT 23: note = Ancestral polymorphism is S, Derived polymorphism is L
MAEHARGSQILLIYLCLLLLSSSAHLVTSMDLDSYDDYDNFSDELVAPADYDDESFSDEAVAAPARRRLYDISLNASSSNRSGAAFCRLLFLQILDLSNNKLTGELPDCLWEMQALQFMDLSNNSFSGKIPEAPPSHNCSLASLHLAGNSFTGEFPTVVGGCQELATVDIGNNRFYGDIPRWIGTFVPALKILRLSSNNFSGQIPPELSQLSQLQLLDLAHNGLTGLIPRELGDLASMKHPKINSSTGSLDGSIYQDRIDIIWKGQDFTFQRILELMTGIDLSGNSLSHCIPDELTNLQGLRFLNLSRNRLSCGIPSSIGSLNVLESLDLSMNELSGAIPPGLSNMLSLNNLNLSSNNLSGTIPTGSQLQTLTDPSIYSNNPGLCGPPLNPCQDTSRVHEGDVGGYRDGDPWLYYCVIAGVVSGFWLWYGMLFSVARLRCSVFFFADRVQYRVMQKMRPFNHFVSKEKSDPSSVPMFSTSDTS

SEQ ID NO: 13428 - protein, 81 aa, Zea mays
  VARIANT 4: note = Ancestral polymorphism is A, Derived polymorphism is V
MEAAFLLGPYTGGSGLGGRVHARSGGRRSAAAVKRLLLRLRRSWRRRAARPRRTAVRFGYDPHSYSQNFDDGTASCGHHRL

SEQ ID NO: 13429 - protein, 81 aa, Zea mays
  VARIANT 63: note = Ancestral polymorphism is H, Derived polymorphism is D
  VARIANT 47: note = Ancestral polymorphism is R, Derived polymorphism is H
  VARIANT 42: note = Ancestral polymorphism is R, Derived polymorphism is H
  VARIANT 38: note = Ancestral polymorphism is S, Derived polymorphism is L
  VARIANT 32: note = Ancestral polymorphism is A, Derived polymorphism is V
  VARIANT 31: note = Ancestral polymorphism is A, Derived polymorphism is V
  VARIANT 30: note = Ancestral polymorphism is A, Derived polymorphism is V
  VARIANT 26: note = Ancestral polymorphism is G, Derived polymorphism is C
  VARIANT 25: note = Ancestral polymorphism is G, Derived polymorphism is D
MAASLQGLYNGGSGLGGRVVHARSGGRRSAAAVKRLLSRLRRSWRRRTARPRRTAVRFGYDLHSYYQNFDDGTASRAHHRL

SEQ ID NO: 13430 - protein, 203 aa, Zea mays
  VARIANT 101: note = Ancestral polymorphism is R, Derived polymorphism is S
  VARIANT 36: note = Ancestral polymorphism is A, Derived polymorphism is T
MRGMDRRPDDLGFVSAAGEREEMGLTFTKLFSRLFAKKEMRILMVGLDAAGKTTILYKLKLGEIVTTIPTIGFNVETVEYKNISFTVWDVGGQDKIRPLWRHYFQNTQGLIFVVDSNDRDRVVEARDELHRMLNEDELRDAVLLVFANKQDLPNAMNAAEITDKLGLHSLRQRHWYIQSTCATTGEGLYEGLDWLSSNIATKS

SEQ ID NO: 13431 - protein, 98 aa, Zea mays
  VARIANT 22: note = Ancestral polymorphism is I, Derived polymorphism is T
  VARIANT 27: note = Ancestral polymorphism is C, Derived polymorphism is F
  VARIANT 39: note = Ancestral polymorphism is F, Derived polymorphism is Y
MKVRAAVKRLCRFCKVVKRRGIVFVQCTANAKHKQRQGFSTIAEAAAVSCVHLPPPPPASGSASAAAFAETSKVARQEMSMKFNWRLGLAALFKNGEK

SEQ ID NO: 13432 - protein, 81 aa, Zea mays
  VARIANT 43: note = Ancestral polymorphism is S, Derived polymorphism is A
  VARIANT 27: note = Ancestral polymorphism is R, Derived polymorphism is C
  VARIANT 12: note = Ancestral polymorphism is G, Derived polymorphism is D
  VARIANT 9: note = Ancestral polymorphism is Y, Derived polymorphism is N
MAASLLGPYTGGSGLGGRVHARSGGHRRSAAAVKRLLLRLRRSWRRRAARPRRTAVRFGYDPHSYSQNFDDGTASYDHHCL

SEQ ID NO: 13433 - protein, 140 aa, Zea mays
  VARIANT 39: note = Ancestral polymorphism is I, Derived polymorphism is M
  VARIANT 41: note = Ancestral polymorphism is S, Derived polymorphism is A
  VARIANT 48: note = Ancestral polymorphism is R, Derived polymorphism is S
  VARIANT 61: note = Ancestral polymorphism is V, Derived polymorphism is F
  VARIANT 64: note = Ancestral polymorphism is T, Derived polymorphism is S
  VARIANT 71: note = Ancestral polymorphism is D, Derived polymorphism is E
  VARIANT 79: note = Ancestral polymorphism is A, Derived polymorphism is S
  VARIANT 85: note = Ancestral polymorphism is R, Derived polymorphism is S
MSKRGRGGTAGNKFRMSLGLPVAATVNCADNTGAKNLYIISVKGIKGRLNRLPSACVGDMVMATVKKGKPDLRKKVMPAVIVRQRKLWRRKDGVYMYFEDNAGVIVNPKGEMKGSAITGPIGKECADLWPRIASAANAIV

SEQ ID NO: 13434 - protein, 130 aa, Zea mays
  VARIANT 122..130: note = Derived polymorphism lacks residues 122 to 130
  VARIANT 95: note = Ancestral polymorphism is A, Derived polymorphism is T
  VARIANT 94: note = Ancestral polymorphism is P, Derived polymorphism is L
  VARIANT 47: note = Ancestral polymorphism is Q, Derived polymorphism is K
MAAAGLRKGNARLPPEVNRVLYVRNLPFNISSEEMYDIFGKYGAIRQIRLGNAKDTRGTAYVVYEDIYDAKNAVDHLSGFNVANRYLIVLYYQPAKMSKKSDIKKKEDEITRLQEKYGIGSKTPGPGSSD

SEQ ID NO: 13435 - protein, 413 aa, Zea mays
  VARIANT 384..413: note = Derived polymorphism lacks residues 384 to 413
  VARIANT 328..413: note = Derived polymorphism lacks residues 328 to 413
  VARIANT 246..413: note = Derived polymorphism lacks residues 246 to 413
  VARIANT 235: note = Ancestral polymorphism is G, Derived polymorphism is W
  VARIANT 216..413: note = Derived polymorphism lacks residues 216 to 413
  VARIANT 76: note = Ancestral polymorphism is K, Derived polymorphism is E
  VARIANT 71: note = Ancestral polymorphism is L, Derived polymorphism is S
MKSSLASDGLRDWRHLSVRLKEHEGTVEHKMSMTSWNELRIRLSKQETIDKELQGQLKKEQDHMKQVLFRLVAIVKFLSKQSLAFRGSSEKIYNKSNEFDPVLQEHLRRIRNKEIHYHYLSHKIQNELISPLATSITNSIIEVVKRVKYFSIILDCTPEVSHQEQMTMIVRCVNMSENKIKIEEYFLGFLEVDDTFGLGLFNVLVDSMKSFGLNIEDIRGQGYDNGSNMKGKHQGVQKRLLDINPRALYMPCACHNLNLTLCDMANSSRKAISFFGIVQWIYVLFSGSTKIWKVLLHHIPNLTVKSLCNTRWESRIKSVRAIRYQAPQLRSTLSQLREASDSEASTKSDAKNLFDLLGNFEFIFGIVIWHDILFAVDTVSKKLQSPSMSIDSALQQIEDLKNSKYLKLYLDFY

SEQ ID NO: 13436 - protein, 97 aa, Zea mays
  VARIANT 83: note = Ancestral polymorphism is D, Derived polymorphism is N
  VARIANT 78: note = Ancestral polymorphism is C, Derived polymorphism is Y
  VARIANT 68: note = Ancestral polymorphism is R, Derived polymorphism is H
  VARIANT 64: note = Ancestral polymorphism is M, Derived polymorphism is I
  VARIANT 59: note = Ancestral polymorphism is G, Derived polymorphism is D
  VARIANT 56: note = Ancestral polymorphism is G, Derived polymorphism is S
  VARIANT 51: note = Ancestral polymorphism is T, Derived polymorphism is I
  VARIANT 47: note = Ancestral polymorphism is R, Derived polymorphism is H
  VARIANT 38: note = Ancestral polymorphism is G, Derived polymorphism is R
  VARIANT 31: note = Ancestral polymorphism is E, Derived polymorphism is K
  VARIANT 18: note = Ancestral polymorphism is D, Derived polymorphism is Y
MDESAAGGGNSLPTTGADGSKHRVCYFYDAEVGNYYYGQGHPMKPHRIRMIHALLGRYDLLDQMQVFRPHPARYRDLYRFHADDYVSFLRSVTPETQ

SEQ ID NO: 13437 - protein, 546 aa, Zea mays
  VARIANT 40: note = Ancestral polymorphism is V, Derived polymorphism is A
  VARIANT 57: note = Ancestral polymorphism is K, Derived polymorphism is T
  VARIANT 59..546: note = Derived polymorphism lacks residues 59 to 546
  VARIANT 70..546: note = Derived polymorphism lacks residues 70 to 546
  VARIANT 71: note = Ancestral polymorphism is I, Derived polymorphism is K
  VARIANT 74: note = Ancestral polymorphism is V, Derived polymorphism is L
  VARIANT 75: note = Ancestral polymorphism is M, Derived polymorphism is I
  VARIANT 81: note = Ancestral polymorphism is Q, Derived polymorphism is L
  VARIANT 84: note = Ancestral polymorphism is L, Derived polymorphism is R
MICAISGEVPDEPVVSKKSGLLFERRLIERYIEDHGKCPATKEDLTMDDIVPVKTNTVWFLRSTMEVIFLIRQVMKQYKEQKDRYMVFIDLEKAYEKIVKPRPLQAASIPGLLGIFQNEWDALMLSNFALEQQLHTARQELSHALYQHDAACRVIARLKKERDDARALLAQAERQIPASVAGAAPAAVVSNGKRVIEDEIGPDGKKIRPGINPVMIDELTECNAMLSAQRKKRQVPPTLAPIDALERYTQISSHPLHKTNKPGILSMDIHPSKDIVATGGIDTNAVIFDRSSGQILCTLAGHSKKTVRIWQENENGNYNCVHTLKDHTDEVEAVTVHVTQKYFVSASKDNSWCFYDISTGSCLTQVGDASGQEGYTSASFHPDGLILGTGTTDAVVKIWDVKAQSNVAKFEGHVGPVTAMSFSENGYFLATAAHDGVKLWDLRKLRNFRTFSPYDLDTPTNTVEFDFSGNYLAIGGSDIRVYQVANVKAEWNLIKTLPDLSGTGKVTSVKFGVDAKYIAIGSMDRNLRIFGLPGDDQMEESNTAAE

SEQ ID NO: 13438 - protein, 154 aa, Zea mays
  VARIANT 20: note = Ancestral polymorphism is I, Derived polymorphism is V
MATLKDAAARKSILATIRLVVPAGAARPAPPVGPALGFYRLNLMAFCKDFNARTQKYKAETPMQVTLTAYKDSTFEFVVKSPSVSWFLKKAAGIETASTRPSHVNVSSLTLRHVYEIAKLKQADPFCKHISLEALCKSIIGTANSMGIAIVKDL

SEQ ID NO: 13439 - protein, 231 aa, Zea mays
  VARIANT 223: note = Ancestral polymorphism is Y, Derived polymorphism is H
  VARIANT 190: note = Ancestral polymorphism is R, Derived polymorphism is Q
  VARIANT 115: note = Ancestral polymorphism is D, Derived polymorphism is Y
  VARIANT 47: note = Ancestral polymorphism is G, Derived polymorphism is D
MERFFSNPSNAPRCDTDTGITLISGPPCCGKTSLLFQFAVNRAAESGRGVVFICSKGRLESNPPFLSQGVDPSMSLLQRIQIKYIEDGDEIRKYFAAFHLLDDFPAAVIVDDFADFFSDRSCQQRYGIARARDLAMVRALALCHNAIGHANAKLGTLGYCNLLLSDVHQGDTPRLLFIYQRWINSIYTIRGDGNGSYILQNLGSSETGSKKARKAKYSIALQYLVLEETST

SEQ ID NO: 13440 - protein, 112 aa, Zea mays
  VARIANT 70: note = Ancestral polymorphism is A, Derived polymorphism is V
  VARIANT 64: note = Ancestral polymorphism is R, Derived polymorphism is K
  VARIANT 5: note = Ancestral polymorphism is S, Derived polymorphism is P
  VARIANT 1: note = Ancestral polymorphism is M, Derived polymorphism is I
MASSSGTAATNAGDTAATTAITVERKPPAARLSELGVRSWPKWGGPPGRYPLSYGARQTCYIVRGKASAAVEGSPEAGVQFGAGDLVVFARGTRCTWHIAAAVDMHYAFDPP

SEQ ID NO: 13441 - protein, 164 aa, Zea mays
  VARIANT 90: note = Ancestral polymorphism is H, Derived polymorphism is Y
MPAGHGLRSRTRDLFARPFRKKGYIPLTTYLRTYKIGDYVDVKVNGAVHKGMPHKFYHGRTGRVWNVTKRAIGVEINKQVNGRIIRKRIHVRVEHVQPSRCTEEFRLRKVKNDQLKADAKERGEVISTKRQPLGPKPVFMVEGTTIETVTPIPYDVVNDLKGGY

SEQ ID NO: 13442 - protein, 305 aa, Zea mays
  VARIANT 86: note = Ancestral polymorphism is V, Derived polymorphism is A
  VARIANT 132: note = Ancestral polymorphism is R, Derived polymorphism is G
  VARIANT 164: note = Ancestral polymorphism is G, Derived polymorphism is S
  VARIANT 256: note = Ancestral polymorphism is A, Derived polymorphism is T
MSRTTPSSPLQRATSPLSPAAGGTPSRLAVAPASPSTPQCAIPASPHTPGRARAGEPTPPPATPRTPRPEITLRQPSSQKRAPAAVRKPSRALRAIRALIRSLPIVAPAACRPASALPRRYTKPHDGHGGARVTGTFYGHRRARITLTVQERAGSLPSLVLEIGVPTGKLMKELSAGGHVRIALECEKKSKKSTPPEGGNVSLLEEAMWTAYVNGRRVGYAVRREASEGDLAVMQLLSTVSVGVGVLPGDVVDAPAGAEADGEVAYMRAGFDRVVGSKDSESFYMINPVGGAGGGTELSIFLVRV

SEQ ID NO: 13443 - protein, 495 aa, Zea mays
  VARIANT 134..495: note = Derived polymorphism lacks residues 134 to 495
  VARIANT 197: note = Ancestral polymorphism is R, Derived polymorphism is W
  VARIANT 212: note = Ancestral polymorphism is R, Derived polymorphism is Q
MTTPCLGAAALSASWTAPSLTGAFLDLTLAWACLCLAALAAVAARLLALLGLPLPCTCARPHLPCLLAFLARYPPRAVGSLHAALRARFPFAGPTDDEARLQKGVEEEGEEEAIDAPKEEGDFRRRVEARAELQMELEKERSAAASAAEEAMSMILRLQKEKSALEIEARQQRRTADERCAFYEDEVEELRDIVLVREREVRALRKEVDAYRRLLGFSATEEDEEEDDEQEMVTPHSFPMYEGEPSSSKSVDANRMQHFGNDSGFSFKTPSPREQPTVPPLTAGQINVGSDDCVAVQTPAKVPVVQSRLELDSSEDEDEDEDDGAETVEILPLSARSQDLDQGSHFHADTAQGMESTCTKEQTAHAFQEIECPGIDKIVNDQIGSKNDANVYDVHVVDDIRFSTEVKGLIGRSFSEATMQAERLQSRAVADDLLEKSLNAIKGAQDKIRNAANERRQSLQLQLLEDIADQLQGIKDAAEAGRQVFCAAPKSSKRS

SEQ ID NO: 13444 - protein, 243 aa, Zea mays
  VARIANT 16: note = Ancestral polymorphism is E, Derived polymorphism is K
MAERERKRKRAAEEWERRKRGRKREKERQVGWTSDPVEALGEDVMGRVMEFLDARSVARCTAVSCAWRGVAADNRLWAPMCTELMAGKAHIPRLTSIRTGSKLSTYSMVIMDGKRSRITKEDLCDHAWEYRFTIAAPDYWRNLDPSWKHTGPPMRRYFHPDGYHSADPHDAVWGGHECTYTVITSFVDDGQIREHYVRINRWPPMKVSRKDDWSWELSNHMYRYNSIPDSHRKGCTGPLFPVW

SEQ ID NO: 13445 - protein, 238 aa, Zea mays
  VARIANT 23: note = Ancestral polymorphism is I, Derived polymorphism is S
MAANQGRRCTWEKLSAIRANCAIELVLDESIAVLNHKRRLKRSMEMTAAASQVHSNYVRLKTPRRIPSWSCISRENSSESLSEEIVSTPTLAHHAQRNSYDGSKSESETIDLNSWTRSGGPLMRTSSADKFISFIHNLEIDTELTRACTVEGNAAGIWSEPTFPSDPPPNNSSSVTMPGRCTENSETEACNTANTRASQASTPTSMAVCEGDLLQPESTSNGILLNIVKRKGMPYGLV

SEQ ID NO: 13446 - protein, 1339 aa, Zea mays
  VARIANT 1029..1339: note = Derived polymorphism lacks residues 1029 to 1339
  VARIANT 954..1339: note = Derived polymorphism lacks residues 954 to 1339
  VARIANT 645..1339: note = Derived polymorphism lacks residues 645 to 1339
  VARIANT 217..1339: note = Derived polymorphism lacks residues 217 to 1339
MASSSSAARAHVERIRRERFYIGREERNPLAEDIHQAVSYLSEELYSKDVHFLMELIQNAEDNEYPLDVSPALEFVITEKDITGTGADSTLVVFNNERGFSAANIESICRIGRSTKKGNRHLGYIGEKGIGFKSVFLVSSQPHIFSNGYQIKFSEKPSAVCDIGYIVPEWVDGKPNIDDIRTVYGPSRSLPTTVIILPLKTDKILAVKKELSSTHPEILLFLSKIRQLSVKEMNNDPKASKISQISISSEVDYWSSKDIDAESYTLHLAMQENSKGETEECTYYMWRQKFAVQPDCRIQKRMEVDQWVVTLAFPHGQRLSRGAKSPGVYAFLPTEMVTNLPFIIQADFLLASSRESILFDSQWNRGILECVPSAFINAFGALLKSSRDAPHFALPPIFRFLPIQESSISLFDSIRLSIKTKVQAEDIMPCEPCTAQKVFCKPAEVSRLDSAFCRILNLAQKQGIGLQNLSSYGTFVLSSYLDNLEYDDVLEFLGVGYANREWYSKCIDGLNLVKEASEEVYLQILYFVAGNWKVFSGTKWENASAISILPFIDTAFYGVDITDFRSELRLFGVVVDFKRNYQLVVDNFRFSIDTITPGATILMLNCIRYVEECHDFVERLKDLRWVKTNVGFRAPHETFLIDDDWKCLLEVIDKTPLLDLEFYGDEIKLYKEELCKTGIIAGFKEASKKIVCHVKKLVNTSITKELAFALLKCYSDLTTRHGRLPVALANFMQHERWLHTTFGFRSPKEAILFSSEWESIALVSCLPFVDDSDAQYGLGKEIYCYSNELKALGAKTRLEQGAAFVISGLRIPTDPSAVTPQAVISLLKCIRIWRQNGSDLPKSFMSAINLKWVKTTAGYRHPNGCVLFGSVCSSHVYRDDGPFVDEVFYGQELVSYESELQKIGVNVDPRAGCACALMAQHLKGLSNADAISRIYSYLEVYRWKPRFTSDDWIWIPHAANQGQWVNPASCVLYDTHGLFGSQLYVLVKWYSSKLLRYFNTAFGVKHRPTVSDYCKLWSMWQGSNSTLTQKECVAFWEFFGKNWSTDMGKFIAGCVDKVPVSSGDQILLLEKQDVFIPDDLLLEDLFKKQAQKPLFVWYPSTSLPCLSPARLNDIYSSIGVQKISKSVVSNQYDHLEIESVTLVHKGTVIKLGLLKIVLAFLTDPILDISVEKRYEMVTSLTNVAVYETRGPLNVSYQVGLSSGRSLHVTCARFFRWERESSRLFVTEADEPGSMTYAMKMEYASCFAEEISKGLLSENKEQIPALAELVRTGFLLEFDVPAVQILLNLKNLRLFEQDEQFLLKLSQHCDDGLGGPSPSYINIIVCYLRVLWDFAKRSTY

SEQ ID NO: 13447 - protein, 81 aa, Zea mays
  VARIANT 59: note = Ancestral polymorphism is E, Derived polymorphism is K
  VARIANT 56: note = Ancestral polymorphism is Q, Derived polymorphism is L
MQWILPENMGYILSHPETKDRVQSWSDASDVLRFAFTLTEDTTDHQYEEVLKATRQQLERELSLEDLNSIHDLPACNLLYK

SEQ ID NO: 13448 - protein, 205 aa, Zea mays
  VARIANT 70..205: note = Derived polymorphism lacks residues 70 to 205
  VARIANT 128..205: note = Derived polymorphism lacks residues 128 to 205
  VARIANT 159: note = Ancestral polymorphism is T, Derived polymorphism is I
MMSMFKEIEKKAFVVQEEYKKTQEMIDNHKVELDKTKEEYTKQKKAMDELRATEVDAEYKLQDTKKLAKEWEMKVKTFKKRLDEIHIMLIQKDAVDPEKLKVTPGDEQLNDTYDMKRAMEMVALLEAQIKDLNPNLDSIAEYRTKACLYGERVDELNATTQERDDLKKLYDGLRKRRLDEFMAGFNIISLKLKEMYQVLNTYNIL

SEQ ID NO: 13449 - protein, 710 aa, Zea mays
  VARIANT 159: note = Ancestral polymorphism is E, Derived polymorphism is V
MAETYGDLSGSVQARGASETNEATILLEVGDNMAQLRDRLEWLQAFVRDADRKRRAGTDQLTRVWDDAVGFEEDVEALKKMLLHREDGNWQNLMFISILGESGVGKYTLVDKIFFDLAEDDTTKKREIFVGERNNFAVKVWYMMPPGSSTEHLLRIIYVRVEKQLLKWRAKGDAAIATEDIPDRIRDLLANKRYILVISGVSSKAMLNRLRACLPDDACNGSRVVLVLDIESEVVAQRANTMNAGGISGIHLLRRLDQERSGRLFCARAFAKQVRLSPDYPDEEKKLTKMYSRAVHAITGGHPLAIVLLAGLLRFKERPGQWEAVLQVQQLMVSSSSSGPAAVEDEEAAAGSSDQMVTITAGGGGGGGGGAATRCDDYSATAGGSINTDKNLDDLKFLLRSKFLRVIEIKGLRIKELPAEICDMFHLRYLGVHSPGLKKLPPAIAKLINLQTLDIRGTAVKKIDPSFWNIKTLRHVLAQDLELPASSSIVQQLDGLQTLQGVRPAAEEEGRPAAEEEGDGLQTLQDVRPAAEEEGRPAAEEEGDGLQTLQGVRPAAEEGGDGLQTLQGVRPAAEKGWNQENCPLHKMTQLRTLCLHGIKGDTHGAELGAALLKMHLLRHLELYSSAPHDQFPPCIFKDRGLQNLESVKLLGRDAYYFPDDAAPNLRVLRPNLAWVDLKIVVPQPIEDEFKKLGVRGQWLKINTSYNSRKQ

SEQ ID NO: 13450 - protein, 194 aa, Zea mays
  VARIANT 5: note = Ancestral polymorphism is R, Derived polymorphism is K
  VARIANT 15: note = Ancestral polymorphism is L, Derived polymorphism is M
MESKRLLSFSLVALLTIGVSKAREFPWEHPMTDAAGQGGGGGEGGGSMNGYGSGSGSGYGSAGATNTPGGPYGTGSSMASVDGGGSGGGDNGGSGAGSGSSASRSYTVGFYGGGYSDAQGSGGGGGRGGGPQNGSGSGSGSGRGISSSYVAGPNGGSSANGGGSGGGEGGGHDGGYAGGYGGASGSSSGQGGQG

SEQ ID NO: 13451 - protein, 66 aa, Zea mays
  VARIANT 16: note = Ancestral polymorphism is I, Derived polymorphism is F
  VARIANT 19: note = Ancestral polymorphism is D, Derived polymorphism is N
  VARIANT 31: note = Ancestral polymorphism is S, Derived polymorphism is L
  VARIANT 33..66: note = Derived polymorphism lacks residues 33 to 66
MPKVEEGSRAKRAFTILCDLHRWKVSLLFHSGSTKNSLRRNQNGFVYECTSINHTVSLFTVKHFMV

SEQ ID NO: 13452 - protein, 198 aa, Zea mays
  VARIANT 158: note = Ancestral polymorphism is Y, Derived polymorphism is N
MSSPSKRREMDLMKLMMSDYKVEMVNDGMQEFFVEFKGPAESIYQGGVWKVRVELPDAYPYKSPSIGFINKIYHPNVDEMSGSVCLDVINQTWSPMFDLVNVFEVFLPQLLLYPNPSDPLNGEAAALMMRDRPVYEQKVKVTLQHNLPRSPKSTLLTNIVKRSHDNRVQSSMSYTAAQTRDEASMQEQQRKYISSLAH

SEQ ID NO: 13453 - protein, 854 aa, Zea mays
  VARIANT 46: note = Ancestral polymorphism is R, Derived polymorphism is H
MAAARRQAAVLVLVLALVMGAGLAPGPRGCAAQGEAVVVSSYGQGRLSLKPYDWTYLRVELPPSFSSVTMDFAADIDLQRERLKGIPRNKLAIICLMNSNPPIPDISDSYLDNLCEFFIAVSNSLPDGPFGNSNIINQPNLVQCIPFQKNTTLVLTNDQVSPGVWYIGYFHGLGPARTQSKMISRGKAHLVSTRITVRGCATSAFWGPYCNQTVDMIGCSQPSIDNNSRNLLDLKAERRNSLYTREHNRRINILSRPNGLVEQEVASNATTLVRMENSISCSISNDSICIRQGDMKFYFLDVVNLALQFKITATNFGALGPSLICYLRHNAFPQRDLHDYSGDISHDPLVVKLPNIGRWYIAIETVNKTQTNVTASTPVLDTTCFSLKWQLTGCLNGKTGTNCSWEAYGLHRVPKRSPSVPFESYYVPTDGTASLEDSHFYLEQFLSNSSHEQFAWTYFFLDVPQGSAGALIHVQLKSDKDLNYELYSKYGGLPSNDTWDYYASRTSSSNGSVFFSLQNSTDSDMDLSIFYAKEGTWCFGVKHPSDTANSQTYMSISLQGCHRNCNQKGVCHSSVDESGLTFYSFCTCDRDHGGFDCSDELVSPNGHIWQSVFLIASNGAAILPAFWALRQKAFAEWILYTSSGISSALYHSCDVGTWCILSFRVLQFLDFWLSFMAVVGTFIYMATIDEVSKRAMHTAVFILTALLAATGATRSANIGIVIAIGSVGLLMGWLLEFSTARRFICWPSRINLNMPQSWPSLRTLFQITLEMVNKRFRWIFLLLGFMTLSFAAISWKLESNNNYWIWHSIWHITIYTSSFFFLCSMRVSTRNSSPESNYELTRQDSMPRSEPRET

SEQ ID NO: 13454 - protein, 214 aa, Zea mays
  VARIANT 200: note = Ancestral polymorphism is A, Derived polymorphism is T
  VARIANT 85..214: note = Derived polymorphism lacks residues 85 to 214
MEPPMLRVEPRLCGTSASGKKSSASTVEHFRGRDRAWCRAGDREFVAQLRGLLYYVIKIEKVFISNELAIVAVEEEESAIGNSEEEQGGNVDPNVDDNNVSGPENPTNLSGATQSANADEQPFYTYDIYDPKNWDGLDNNARDILVVKGPIREEGLEFPLDDASRHFSYAHYHRNYAMGRYMIENGCFIQRMMTEYFASTVRYVSLALARVKAH

SEQ ID NO: 13455 - protein, 153 aa, Zea mays
  VARIANT 99..153: note = Derived polymorphism lacks residues 99 to 153
  VARIANT 85: note = Ancestral polymorphism is P, Derived polymorphism is S
  VARIANT 25: note = Ancestral polymorphism is R, Derived polymorphism is W
MASKLSFKRADSIAESMPDALRQSRYQMKKCFHRYVSKGRRLLKNQQLIEELDKSLDDKVEREKLVEGFLGYIICSTQEAVVLPSYVAFAVRMNPGIWEYVKVHSDDLSVEGITPSEYLKFKETLYDENWYAFFTDLGAYTYINHRCVDGNWN

SEQ ID NO: 13456 - protein, 291 aa, Zea mays
  VARIANT 213: note = Ancestral polymorphism is T, Derived polymorphism is I
MRPAAAAATATTAALRLRAASLSPSLAASLSPSLAALLSHRRSSLILPPLRRICSLAPPHSSAAPNSQPPPQLLSPIMDAQFVLFRAQLDESSTLRDRIRAVVAEIESASRVATAALLLVHQPVPLADVLVKAKAQVEVIKGLYARLAEVLKECPGQYYRYHADWRTETHMVVSMLAFMHWLETGGLLMHAEAQEKLGLCSGEFGLDVEDYLTGLCFMSNEFPRFVVNRVTAGDYDCPKRVLGFLTDLHASFRMLNLRNDFLRKKFDGMKYDLRRVEEVYYDVKIRGLVPA

SEQ ID NO: 13457 - protein, 811 aa, Zea mays
  VARIANT 685..811: note = Derived polymorphism lacks residues 685 to 811
  VARIANT 662..811: note = Derived polymorphism lacks residues 662 to 811
  VARIANT 497..811: note = Derived polymorphism lacks residues 497 to 811
MASQGEPSASASDPKEKKDFSTAILERKKSPNRLVVDEATNDDNSVVALHPDTMERLQLFRGDTVLLKGKKRKDTICIVLADETCEEPKVRMNKVVRQNLRVRLGDVVSVHQCQDVKYGKRVHILPIDDTVEGITGNLFDAFLKPYFLEAYRPLRKGDLFLVRGGMRSVEFKVIETDPAEYCIVAPDTEIFCDGEPIKREDEERLDEVGYDDVGGVRKQMAQIRELVELPLRHPQLFKSIGVKPPKGILLYGPPGSGKTLIARAVANETGAFFFLINGPEIMSKLAGESESNLRKAFEEAEKNAPSIIFIDEIDSIAPKREKTNGEVERRIVSQLLTLMDGLKSRSHVIVMGATNRPNSIDPALRRFGRFDREIDIGVPDEVGRLEVLRIHTKNMKLAEDVNLELISKDTHGYVGADLAALCTEAALQCIREKMDIIDLEDETIDAEILNSMAVTNDHFKTALGTSNPSALRETVVEVPNVSWEDIGGLENVKRELQETVQYPVEHPEKFEKFGMSPSKGVLFYGPPGCGKTLLAKAIANECQANFISVKGPELLTMWFGESEANVREIFDKARQSAPCVLFFDELDSIATQRGSSVGDAGGAADRVLNQLLTEMDGMNAKKTVFIIGATNRPDIIDPALLRPGRLDQLIYIPLPDEQSRLQIFKACLRKSPVAKDVDLNALAKYTQGFSGADITEICQRACKYAIRENIEKDIERERRRKDNPEAMEEDEVDEIAEIRAPHFEESMKYARRSVSDADIRKYQAFAQTLQQSRGFGSEFRFSDQPATAGAAAAADPFASAGAAADDDDLYS

SEQ ID NO: 13458 - protein, 494 aa, Zea mays
  VARIANT 221: note = Ancestral polymorphism is T, Derived polymorphism is M
  VARIANT 401: note = Ancestral polymorphism is P, Derived polymorphism is T
MAQGAAGVVDTRRHGGKPHAVVVAYPLQGHVIPVVHLALRLAARGFAVTFVSTEAVHDQTARALGVDPDGYDPFAAARARAQEEGPPPPPLGDVSYALVSDGLPVGFDRSLNHDDFMGALFHALPAHVEQLLRRVVVEPRATFLVADTFFVWPATLARRLGIAYVSFWTEPALIFNLYYHIDLLTQNGHFRCNEPRKDTITYIPGVAAIEPSELMSYLQETDTTSIVHRIIFKAFDEARGADYVLCNTVEELEPSTIAALRAYRPFYAVGPILPAGFARSAVATSMWAESDCSRWLDAQPVGSVLYISFGSYAHVTKQELREIAGGVLASGARFLWVMRPDIVSSDDPDPLPEGFAEAAAGRGLVVQWCCQVEVLSHAAVGAFLTHCGWNSVLESVWAGVPMLCFPLLTDQLTNRRLVAREWRAGVSVGDRGAVRADEVRARIEAVMGGEDGLKLREQVKKLRGTLEAAVASGGSSRHNFDEFVEELKRRCGGR

SEQ ID NO: 13459 - protein, 83 aa, Zea mays
  VARIANT 35: note = Ancestral polymorphism is E, Derived polymorphism is G
MIGFHRKKKATAAAAAASSKRERERERERNKEADEVTVELRAVGFGKEVVLKQRRRMRRRRRLGEEERAAILLMALSSGVVYA

SEQ ID NO: 13460 - protein, 270 aa, Zea mays
  VARIANT 48: note = Ancestral polymorphism is R, Derived polymorphism is W
  VARIANT 40: note = Ancestral polymorphism is A, Derived polymorphism is V
MSAPTPGPAATFQGIAAAPPSSHLAPLQASASSHPPPLYAAPLKPGGRSKPDRWRAESSAGGGSCSSAGSAPSGPSFRDMVLLSRPSSPASRTPRSHRRPRSHSPRGGPREDINAYNLGEQGQQRRSAKERLGPRCLDSKQTNPNSSELDNFVGGPCCDLNEEHRAGLETPHGDDSAPVHTEEQAQHDVFLIRRTAILLGSRVSLEICAQFQVSNTVRALRLPSERLRLRCTLKTNAAITLLNTVRVLRIPTGMTRLRCTLKSKPNMLFF

SEQ ID NO: 13461 - protein, 505 aa, Zea mays
  VARIANT 257: note = Ancestral polymorphism is A, Derived polymorphism is S
MEDKVLIAVGTVAVVAVLSKLKSAVTKPKLNLPPGPWTLPLIGSIHHIVSNPLPYRAMRELAHKHGPLMMLWLGEVPTLVVSSPEAAQAITKTHDVSFADRHINSTVDILTFNGMDMVFGSYGEQWRQLRKLSVLELLSAARVQSFQRIREEEVARFMRSLAASASAGATVDLSKMISSFINDTFVRESIGSRCKYQDEYLAALDTAIRVAAELSVGNIFPSSRVLQSLSTARRKAIASRDEMARILGQIIRETKESMDQGDKTSNESMISVLLRLQKDAGLPIELTDNVVMALMFDLFGAGSDTSSTTLTWCMTELVRYPATMAKAQAEVREAFKGKTTITEDDLSTANLRYLKLVVKEALRLHCPVPLLLPRKCREACQVMGYDIPKGTCVFVNVWAICRDPRYWEDAEEFKPERFENSNLDYKGTYYEYLPFGSGRRMCPGANLGVANLELALASLLYHFDWKLPSGQEPKDVDVWEAAGLVAKKNIGLVLHPVSHIAPVNA

SEQ ID NO: 13462 - protein, 506 aa, Zea mays
  VARIANT 258: note = Ancestral polymorphism is A, Derived polymorphism is V
MEDKVLLAVAMVALIAVLSKLKSLLETKPKLNLPPGPWTLPLIGSIHHLVSSPLPYRAMRELAHKHGPLMMLWLGEVPTLVVSSPEAAQAITKTHDVTFADRHMNSTVDILTFNGNDIVFGTYGEQWRQLRKLSVLELLSVARVQSFQRIREEEVARFMRNLAASAGAGATVDLSKMISSFINDTFVRESIGSRCKHQDEYLDALHTGIRVAAELSVANLFPSSRLLQSLSTARRKAVAARDEMARILGQIIRETKEAMDWGDKASNESMISVLLRLQKEAGLPIELTDDIVMALMFDLFGAGSDTSSTTLTWCMTEMIRYPATMAKAQAEVREAFKGKTTITEDDLSRANLSYLKLVVKEALRLHCPVPLLIPRKCRETCQIMGYDIPKDTCVLVNVWAICRDSRYWEDADEFKPERFENSSLDYKGTSHEYLPFGSGRRMCPGGNLGVANMELALASLLYHFDWKLPSGQEPKDVDVWEAAGLVGRKNAGLVLHPVSRFAPVNA

SEQ ID NO: 13463 - protein, 548 aa, Zea mays
  VARIANT 425: note = Ancestral polymorphism is G, Derived polymorphism is V
  VARIANT 363: note = Ancestral polymorphism is N, Derived polymorphism is I
  VARIANT 209: note = Ancestral polymorphism is G, Derived polymorphism is E
  VARIANT 196: note = Ancestral polymorphism is V, Derived polymorphism is D
MEFDEYEYLEKAVEPAPPPANGSGSGEKDRGSRRREGDEGRISKRSRSGEDRERGRHRSVREHRDRDKDDGKEKERSRDSRGKDRDREGREREKERGDRHRPREREVERERRSLSRSERRRIEEEEMVRELEMERERSERHHYRDRDVRRRKDDGAEPEVDPERDQRTVFAFQLSLKADERDVYEFFSRAGKVRDVRLIMDRNSRRSKGVGYIEFYDVMSVPMAIALSGQPLLGQAVMVKPSEAEKNLVQSNATSGGAASGGARKLYVGNLHSNITEDQLRQVFEPFGQVELVQLPLDAMTGLCKGYGFIQFARLEDAKAAQSLNGQLDIAGRVIKVSAVTDHVGVQASGATTGDLDDDEGEIWGMAEWGGQPVYQCFLLEDFALFDGFVKHVQALNASSRAALMLKLDRSGTATSLTGGIGAAGVAVPATSVIGAAGAASLLSPTVSAVGSVPGAPVLPITAQNVIMSTPTEFLLLKNMFDPSLESNISLVLPWGSRNTAGFVYLQFDSVTAAGKAQQALHGRWFAGKMITATFMSDQEYSTKFPNL

SEQ ID NO: 13464 - protein, 138 aa, Zea mays
  VARIANT 22: note = Ancestral polymorphism is E, Derived polymorphism is G
MMLAVTVSQVVALLSSALSGTEGGSGVAVAVGTAKAVGAEQGERWRRRCGGHDDHPASAAGYCCVCISACRDGDDVRSLPCGHAFHRDCVDRWLALCRRTCPLCRLHVGGPAVGLAEQQQQLSEDLVIWFSSLFVAGL

SEQ ID NO: 13465 - protein, 86 aa, Zea mays
  VARIANT 45: note = Ancestral polymorphism is D, Derived polymorphism is H
MRRTAALLSAHCGRSIPLALADVLVCPLSKQPLRYCEVNGSLVSDSAGVAFPVLDGIPSLVPKDGKLLDDQEVKSEQESSTRDSSG

SEQ ID NO: 13466 - protein, 265 aa, Zea mays
  VARIANT 227: note = Ancestral polymorphism is L, Derived polymorphism is R
  VARIANT 159: note = Ancestral polymorphism is E, Derived polymorphism is D
  VARIANT 157: note = Ancestral polymorphism is R, Derived polymorphism is I
MGSGSGTLKQKKRVKHAKNKYLKPGALAQIRYSRSTSRDIGKKRILLNAKDELELPPQPEVLLESNTLVLSPARLNFEPFGSNTGQVLPKTPRTPNASVSCGDSGLESLPLDLLIKIMCCLHHDELKVVFHVSKRIRKAVQLAREFHFNYTTPDRSRQELLLNRTPLPTEHWPFLRINGKDVHVSTPRTPRAPKHAARLSRLKLVDVKPITAVLFPESSTPFPSKRLRRWVPPWLPRHACKAASSPRVLRYEEELCEAVAQNKLL

SEQ ID NO: 13467 - protein, 320 aa, Zea mays
  VARIANT 179: note = Ancestral polymorphism is G, Derived polymorphism is R
  VARIANT 173: note = Ancestral polymorphism is L, Derived polymorphism is V
  VARIANT 91: note = Ancestral polymorphism is L, Derived polymorphism is S
  VARIANT 53..320: note = Derived polymorphism lacks residues 53 to 320
MQCIEGSIPVSSSTRIAVVTGGNKGIGLEVCRQLAAASTSGLAVVVVLTARDEARGAAAVGKLRGLGLSNVFFHQLDITDAPSIARLADFLKSRFGKLDILVNNAGFVGLEYIQDRIDGTSTTSEEFCGMDMDKRLELLLKWCLRETCDAGKECMRINYHGTKQVTRALLPLLLASDSGRIVNVSSVLGQLRFFGSEALKRELDDVASLTEERLDEVAGAFVADLEAGAVEARGWWPAGFSPAYMVSKAALNAYSRVLARRHPALRVNCVHPGFVRTDMTVNFGMLTPEEGGSRVVAVALLPDGGPTGAYFQERQQAPFV

SEQ ID NO: 13468 - protein, 200 aa, Zea mays
  VARIANT 95: note = Ancestral polymorphism is M, Derived polymorphism is T
MQAAAARRPRVLTEIDPHSEWVHGRALDAIMLDVTGFSKDQLKVQVEPWGSLKVSGDQGAVDGGGGMQRRHFTKRFDLPAGCDVAAITVQLDKGMLYIQVPRPAGAAAAWWGTQQQQQQPAEEEVYEDAVRGVDETGDDAHGGGGLAARRDGGRHPLRRLARGLSRHRQVVLNVVLAVVLLWLVAFAKHKPGGGQAMHDG

SEQ ID NO: 13469 - protein, 210 aa, Zea mays
  VARIANT 25: note = Ancestral polymorphism is R, Derived polymorphism is L
  VARIANT 12: note = Ancestral polymorphism is G, Derived polymorphism is V
MVHSHRCLIVRGERPVDGNRWSRFRLDLPVPDGCDAKAVHARFDNGVVRVTMPGVQQPEPVLPVVAGTADQQQQQQETPLPKHAGTAAAAGDDDVQGRKGVVGAAGQDGGDRDRAAGGQDEVDKHETPRKQEARQRVVSSAKHAGGSSGRGDDTAAGGVGQEVMAAASPTSSRQGYGFLHNRKKVTFTVLGGVALVLISLGIYAKYSLSP

SEQ ID NO: 13470 - protein, 610 aa, Zea mays
  VARIANT 401..610: note = Derived polymorphism lacks residues 401 to 610
  VARIANT 457..610: note = Derived polymorphism lacks residues 457 to 610
  VARIANT 468..610: note = Derived polymorphism lacks residues 468 to 610
MATPCRSRGFERVELRCPRELDPRPSWTLGDVLAELDALDATRRAAPPTPLKQPPDWANGGGEKAFVMRVDDDDEDDTEDEDDGTSGGKSRALVAKGARFSCNDLASSDSEDELDGQVAPYHLMEKRDLAKSILLELEHEHHLKVQEEVRSKLASLEVCHQNEIRRTISAFARLQKYAESRKEIDRRLDVHFQRRIAEVLDKHLSMVQRDHEQKSQIVERRIRDDAALEEAKRKEQAVKEEKLRQERAQQEAEARQKEAAKLAAEARKTAFEAAKKEAAEKEAAEKEAAKLRDAAASQPSPNSQNNTAEGIKVFGDKYALEAESRRHALVQNQVPENIHHSKEFSKYDRQIAKSISKLMPTTDSVRTRASELVKALNGQDCPRPISCCLFANKIISIVKSRNTKDKTFGNLAFACGYVMLLVTNQVPDAMDYLLAEFNRVCIYTVPKHMHALNAQARNRDYYRLIGYQEENGQLESTESYLTYVVAYVKLYAAMIQTEIKGVRHPHGLAEGWKWLAMFLNSLPATTATACALHAFLKMAGFALHKKYGSQFMKILDVISRCFLPALKEQGNKMQAEAVNNLQNYLNDKIYLEEPEGQYLVQQLLSKELFM

SEQ ID NO: 13471 - protein, 301 aa, Zea mays
  VARIANT 174..301: note = Derived polymorphism lacks residues 174 to 301
MAAASSPAASAASPGRGAGDPPAAAAAATARTAGCPCPICLEAFKDEAYLDTCFRSFLKLLAASADSFCYRCICQWVRIVASKHAEPLSSVRCPLCKTENLSVIHAFDGESFERWYINQEPRKRRLSDAHELVSQFYNMKETTSNISGVQQYWEQQRYLRKKIWLQTWLRREIQALTRDENVEVIVHHIHGVMGSFMKRLEKEHTSSRWTTSPEKRREEFRRLVSDAARPFLLGRTERFVAEVELFLASDLNMEAYNKLRVQRFRESSSHLTREQDALPRDRSLEEHYMYFLCNDTDCDEM

SEQ ID NO: 13472 - protein, 216 aa, Zea mays
  VARIANT 6: note = Ancestral polymorphism is P, Derived polymorphism is L
  VARIANT 9..216: note = Derived polymorphism lacks residues 9 to 216
  VARIANT 12: note = Ancestral polymorphism is R, Derived polymorphism is W
  VARIANT 109: note = Ancestral polymorphism is R, Derived polymorphism is Q
MEEEAPPMELVREKKLSEKIRLCKMEVLKKSHTSVEDSDHIFLESSGLQDGLSCKKDLHSCGTKASDEEISDRLQENHDNTQPSDNHNYSVDQTQLPFLQALLRVQMKRSHRFLDKLPVVHWHLLTDKSIDPTYLVVMTATAAVGAATLLQRVIQIRTKPTPPNPRRPSSVQAFHSSTSCAGHQSRAIRKAVAQSAVHRFSAFKLLKRFSRVSSKN

SEQ ID NO: 13473 - protein, 248 aa, Zea mays
  VARIANT 178..248: note = Derived polymorphism lacks residues 178 to 248
  VARIANT 174: note = Ancestral polymorphism is T, Derived polymorphism is M
  VARIANT 161: note = Ancestral polymorphism is T, Derived polymorphism is I
  VARIANT 152: note = Ancestral polymorphism is G, Derived polymorphism is R
  VARIANT 148..248: note = Derived polymorphism lacks residues 148 to 248
  VARIANT 140: note = Ancestral polymorphism is S, Derived polymorphism is P
  VARIANT 135: note = Ancestral polymorphism is K, Derived polymorphism is N
  VARIANT 131: note = Ancestral polymorphism is A, Derived polymorphism is D
  VARIANT 110: note = Ancestral polymorphism is A, Derived polymorphism is V
  VARIANT 109: note = Ancestral polymorphism is S, Derived polymorphism is A
  VARIANT 107: note = Ancestral polymorphism is I, Derived polymorphism is N
  VARIANT 98: note = Ancestral polymorphism is P, Derived polymorphism is S
  VARIANT 96..248: note = Derived polymorphism lacks residues 96 to 248
MGKGGGCVPSKKRQPPAAAPSSSSAAAAVPREAPEEEAAAAVGRKLRLYIVFYSMYGHVESLARRAAAGAGAVDGLEAVLRRVPETLPPEVLEKMQAPVKDPAVPVIASAAELQEADGVLFGFPTRYGAMAAQMKAFFDSTGSLWEAQKLAGKPAGFFVSTGTQGGGQETTAWTAITQLAHHGMLFVPIGYTFGSGMFDMDGIRGGSPYGAGVFAGDGSRQPSETELALAEHQGKYMASIVKKLALHA

SEQ ID NO: 13474 - protein, 270 aa, Zea mays
  VARIANT 80: note = Ancestral polymorphism is P, Derived polymorphism is T
  VARIANT 26: note = Ancestral polymorphism is D, Derived polymorphism is Y
  VARIANT 20: note = Ancestral polymorphism is G, Derived polymorphism is E
  VARIANT 17: note = Ancestral polymorphism is P, Derived polymorphism is H
  VARIANT 14: note = Ancestral polymorphism is G, Derived polymorphism is D
MAAQLRYMMSHYFGTPPSKEVIQDLYYALRTKGGLTPKEEETLLACNLLPGVYFIVGSVLGTFAMLLGSHKGLKLLGRPPNSPLRSLTVYGKSQGYLTWCYFSGYGFIVGKACANETWHQLPELLLDREEGRMKTELAKIILNKHSDDIYLVEVVRRHFFVEHLFDDLHQGQPLFRWRLRHTYVDSTFVERTKEVEASNSDDVARSISRETITNTTPFGEMMEDSLACILGSPGCNMESNNPPEKTANVLTRSDLRARRRGRRHHRHADD

SEQ ID NO: 13475 - protein, 1037 aa, Zea mays
  VARIANT 318..1037: note = Derived polymorphism lacks residues 318 to 1037
  VARIANT 193..1037: note = Derived polymorphism lacks residues 193 to 1037
  VARIANT 188..1037: note = Derived polymorphism lacks residues 188 to 1037
  VARIANT 130..1037: note = Derived polymorphism lacks residues 130 to 1037
MDVAVATGLSDEPQQAEMEQELDETEQEVQLLTQDLEKKKEAENVHFKLQDECHRRMQIEATLLMTEGLHSQLQEEMKTLTQDFDGSKKKLSELENNKLDLESTLKELKNIILGLNSEKDATLLQQQQSLDKVSDLELELSKMQLEMEKSEQKILLLEQEIARETESVDSLEVSFKDECEKRLQAQTSLVSLEKMYCQSQEDVRRLQIEIEKQNDKLNELENLSSELNNTILLVNTEKDATLHENQQSLARISDLESELMALKTELENVERKVHMIEQELIYKKEEADNLQISLQDETQKRVDGETSLLMMKNLHSESQNEVRGLALELEKLNGNLRQVENSKVDLENIVTKHTEEIHILREQNLSTELMIKDLHLELDVLKDLNVKLQAEMDLHKGEKEVLQREFTSQREEKENLEGIHHTLVDEMDTLKTTTTMNQKLIEELQITNLKLKEVCARSEVEKALLSEKTPRVGEHYYIGHESTRRYQERRILHMINYFGDCLVDEQDKKAALFTECQKYAVENHSANMLVSQLMGEARYHGEERKTLLKHNEKLWQGISKQMKVLNICKDLAPADLAEDEVLLQTVLDETINTLRLKDETEDVNRLMNMNSAVYEEKTSKLMMNGKATETRAISLKELLMKEVSSRDAHIEELQKKLAGIQDEHAELNAELNTYLALVASLADHVSVLEEDCRYLSKPCSTEDKEETACVHHVQEGNDGLESHCLPKGTPELQGLIARIEALQVVVSNAKDRQDQESAESAAKLAAVSAEIQDLKARGGSRMEGKEIYSDHEKQDVEISKGKQVQIMKDIELDQISTCPPYGARAALYPLGTGANAKLDDDMLQLWEAAERICKNQTAKSSSSEHDIQAVEDLKSEHPSSELARGRDLGINKLEASKGAAEPHEAWSKNVHETEGHVLEQINLNNKLTRTAENYPTLSDNMSTEREGYSSRRKISEQVQKGSENVARLELELQKIQYVLLKLEEEHEYRRLKVSDKRTRVLLRDYLCGRKDRGGGQKKKKKRVPFCCCVRPKSRTEP

SEQ ID NO: 13476 - protein, 468 aa, Zea mays
  VARIANT 378: note = Ancestral polymorphism is P, Derived polymorphism is L
MLASYGGGGRGVHLSSHKDILLGRGGRSFLLGNTWFLLSTYPARLLHTTDRRAPAAFLAVINRPPCMRPHRAGQGLLQRGGIVMAACGYALGRAELGAAKRQQPDKDPSAGTRSSNVAATGSLGSAARPDVSFRYRGADSCKKVAASLKSSEPWGNRAFWTNAAGPGWKLSFAVEPWTKGFSTSCAAPYSAGATEHQLSLDEKVDNSTVASDSDGKSPVSEKLKFLSGSCYLPHPDKEATGGEDAHFISIDEHVIGVADGVGGWADVGIDAGLYAKELMRNSMSAIKDEPEGTIDPTRVLEKAYMSTKARGSSTACIITLKDQGIHAVNLGDSGFVVVRDGRTVLRSPSQQHDFNLTYQLESGGGSDLPSSAQVFHFPVAPGDVIVAGTDGLFDNLYNNEISGVIVEALRVGLEPQVAAQKIAALARQRATDKNRQSPFASAAQEAGYRYYGGKLDDITVVVSYVKSA

SEQ ID NO: 13477 - protein, 316 aa, Zea mays
  VARIANT 185..316: note = Derived polymorphism lacks residues 185 to 316
  VARIANT 239..316: note = Derived polymorphism lacks residues 239 to 316
MHCFKWLLGFMDMSQEQEQDFGVLLKQGAEGEARCMTKARRLGVPTPVLYAVDPVLHTLTFEHVDGLSVKDILLRFGSDGVNEERLNDIATQIGNAIGKLHDGGLVHGDLTTSNMIIKNSNNQLVLIDFGLSFTSTIPEDKAVDLYVLERALISMHSSCGDVQTYVGNITDLDDEPDGENPGCVQKGFEAMVLHPEQAGSSEATGQEAHHGRMNGEEEKYVAWNGSVSGFGCCNVCEIWKYVAWLHHLVRTQKQSVVSSGSGRSFIRFSCMITGRHGWGMACLFVPSIDMIIMANVLPVLWVRVDPYRTVEWVEWR

SEQ ID NO: 13478 - protein, 256 aa, Zea mays
  VARIANT 177: note = Ancestral polymorphism is P, Derived polymorphism is S
  VARIANT 160..256: note = Derived polymorphism lacks residues 160 to 256
  VARIANT 61: note = Ancestral polymorphism is A, Derived polymorphism is D
  VARIANT 11: note = Ancestral polymorphism is E, Derived polymorphism is D
MDLLASLAAEERWLFPAFLAMYAAIYCAGQLVVFRRWAPRQRLDGASCLISLFHGTPAALAAAGAILALPAESRSFAAPNARLQDHVLDYSVAYFTMDLLHYLAFLPGDVLFIAHHLATLFVFLTCRYLVRHGAYALLVLLVLAEVTSLLQNVWTLAGIWRDQSPAAARVYGALSPPFYALYTLVRGVAGPLFLLKMAAFYLSGQAVDVIPWWVRISWILVVGTAIAVSNLWIWNLWKELVREWKQQAPPKSKKDT

SEQ ID NO: 13479 - protein, 683 aa, Zea mays
  VARIANT 109: note = Ancestral polymorphism is S, Derived polymorphism is L
  VARIANT 82: note = Ancestral polymorphism is R, Derived polymorphism is H
MEIENAIDQQRFDDAWRAYEKHVHMDGLPRKSVLSKLITGLAESCDHHWLKQSYNVVSHAFEEKQELLDKEPLIYLSLILAHCALPNLALNVVRKLVKMEAYPPVAAWSAILAHMCQTNTGAFLGADLVMELGYLFQNNRVDPRKKSNRPLLSMKPNSFTFNIVLTASLVFGTTRKAEQLLELMPRIGVKPEVNLLIVMAHIYERNGRRDEIRKLKRHVDEAYGLSESEVRQFYDCLLSCHLKFGDFDYAVDMVLDMIRKGKNAKRSLEAAKAVLEAVENRKFYFPYEKADAENPRSCSSQMLSHASFFKDNSFGRLELDARESVRLLTDKLQEQVGLVKSEHGILHPTETMYAKLVKAFLEADKISALASFLVKASKEDSPVSVESSFVVQVINACISLGLLEQAHDLLDEMRFSGIRVGSSIYSSLLKAYCKEGQHEDDITALLKDAQQAGIQLDSSCYEDLIQSRVNHSNTTGALHLFKELKNLNVLKAGHMEFQRIVQGSDDNEAALMTKLVEEVRSDHTVDHAVHEWNNVIHFFCKKRLMHDAHRALNKMRASGHVPNAQTFHSLITAYAAIGGKYVEVTDLWGEMKLLASLSSMKFDQELLDSLLYCFVRGGFFLRAMEVIEMMEKREMFIDKYKYKSLWLKYHRTLYKGKAPKVQTEAQLKRREAAIRFKKWIGLT

SEQ ID NO: 13480 - protein, 621 aa, Zea mays
  VARIANT 491: note = Ancestral polymorphism is D, Derived polymorphism is Y
MVVVVSTSLCSFLPAHPFSLARPRRPHPTNPTAKPLSRTLSIRCIATTAAGPPPLPPPKLVRCPALDRQAARASRLRFARKLLTLLLSKPRHFLPLRVLNRCRRFLGLPRRGRPLIPMVLRYPTLFRLFQAHTSLPLSPSLSTLAVALTPAAEALAADLAALRATGTGAGALAAKIHRLLLMTPRRNIPVNRLVHLAPDLGFSMDFRATLCPRHPDLFRLVNTSRGHALQLADPPPTPPPPPLSLRPAAPPDRLMDRPRRFPHLPLRRGLNLRRVHRDYLLRFHSLPEVSPFEPLDEGASLEMLERRACAVVREVLAMTVEKRTLVDHLTHFRKDLGLPNRLRAMLVRHPELFYVSVKGVRHSVFLVEAFDDDGRLLVEDEMLVGRDRLEELVREGKRMRRARKKGVLTFDGDSDEDEDDDAAEEEGSLKVDDEFGDLFEDGVIGEDWEEVGDGGGSDAYEEYDAESGDMEEFWVKKAVAQGLVGNGNEQDVWRYCSKVKEQCSADMIHAEDAFKSSWIYHAEVMMAEFCTVCIEKNLIDKMIDLPWDSEEDKHLHKFLFNSAREVRMKPNDSLLVVYYLGIQVSGYAEKPFILNGTGVAQNGPAKRSVSGYAGYQPRITS

SEQ ID NO: 13481 - protein, 534 aa, Zea mays
  VARIANT 426: note = Ancestral polymorphism is S, Derived polymorphism is Y
  VARIANT 274..534: note = Derived polymorphism lacks residues 274 to 534
  VARIANT 230: note = Ancestral polymorphism is P, Derived polymorphism is L
MGNCCAAPSTEGSGKTRPKKQKENPYNVAYNRGAAAPPPPPARPGLVVLRDPTGRDLGAEYELGGELGRGEFGVTYLCTEPATGARYACKSISKRKLRTPVDVEDVRREVDIMRHMPPHPNIVSLRAAYEDRDAVHLVMELCEGGELFDRIVARGHYTERAAAAVMRTIVEVVQKCHRHGVMHRDLKPENFLYASKDSSPLKAIDFGLSVFFRPGERFTEIVGSPYYMAPEVLKRNYGPEVDVWSAGVILYILLCGVPPFWAETEQGVAQAIIRSVVDFKREPWPRVSEPAKDLVRRMLDPNPLTRFTAAQVLEHPWLHDSKNTPDVSLGDTVRARLQQFAAMNKLKKKALRVIAEHLSAEEVADIKQMFDKMDVNKNGKLTFEEFKAGLRKLGNQMHDSDLQILMDAADVDRNGTLDYEEFVTVSVHVRKIGNDEHIQKAFAYFDRNKSGYIEIEELREALADELDGSDEDIIGGIIRDVDTDKDGKIGYDEFAAMMKAGTDWRKASRQYSRQRFSNLSLKLQKDGSLGADTR

SEQ ID NO: 13482 - protein, 242 aa, Zea mays
  VARIANT 185..242: note = Derived polymorphism lacks residues 185 to 242
MLTSSLNPARSPWKGPPPPPRIRVLAILRPGSTSVSTLGEWNVAGIAHRAYDLEGKTVGTVGAGRIGRLLLQRLKPFNCNLLYHDRLQIDPELEKEIGAKFEEDLDAMLPKFDVIVINTPLTEKTRGMFNKERIAKMKKGVIVVNNARGAIMDARAVVDACSSGHIAGYGGDVWFPQPAPKDHPWRYMPNHAMTPHISRTTIDAQVRYADGVRDMLDRYFKGEDFPVQNYIVKEGQLASQYK

SEQ ID NO: 13483 - protein, 211 aa, Zea mays
  VARIANT 199: note = Ancestral polymorphism is M, Derived polymorphism is V
MLSKKGKNTSKVYEDDNDFVTSQSGKKRSRESADDENSEEPTSDSEPDVEDTKQKTTTTESPVNIRSEPLTTRRHALQSWMDGSSSSSSTVEFPDGLPPAPSRSKKDKLSEEEMLAKKAEAAQRRRMQVEKDTKESEEQATRAQHMAANSIRWVMGPTGTVISFQHAAGLPGIFNSKTHMSPSHPLHALLVRQNRAKVMISSTTFFGEQLS

SEQ ID NO: 13484 - protein, 372 aa, Zea mays
  VARIANT 14: note = Ancestral polymorphism is R, Derived polymorphism is M
  VARIANT 52: note = Ancestral polymorphism is R, Derived polymorphism is G
  VARIANT 189: note = Ancestral polymorphism is L, Derived polymorphism is I
MSSTSVSGGGGRKRSRSASAIIADTACGHHILRIDGYSRTKVVPTGAYLKSRPFTIGGHRWHIDYHPNGHDPDTKDYISLFLVLEEPASGSTAKGVKAQQRFRFVGEVPEEEELPAVLLAAEEVSNYGSHRGWGDARFVRREDFEKSEHLKNDSFAVRCDIVVAINEFRGEDETAAFVSVPPPDLHRHLGELLQTGQGADVVFEAGGETFPAHRCVLAARSPVFAAEFFGAMEESKSGSAVHIHDMEARVFKALLHFTYTDLFWKTNEVEEEEEDDVMAQHLLVAADRYNLPRLKLICEDKLCKYINVGTVATILALAEQHHCHGLKKACFRFLSSPENLKVAVASESFDHLSKNCPSVMKELVAMLGTLLE

SEQ ID NO: 13485 - protein, 1014 aa, Zea mays
  VARIANT 142..1014: note = Derived polymorphism lacks residues 142 to 1014
MATAADPLRWTKQWRKATNVIRTCHRLARLSFSRAILRRTGSYVEIKIDDDGCGPGAAASTSRSDDAAPAEFSVAAHDEGFRCLVKDKRHDCFRRLGGAAGIASALASDAETGIRGDDRDVRLRREAFGGNTYPRRKPKGFWTHVWDALSDAFLLVLLVCAAVSLGFGIKEHGLKDGWYDGVSIFLAVFLVAAVSAVSNHGQARRFDRLATESDNITVAVVRGGRRQELSIFDVVVGDVVVLNIGDAVPADGVFMQGHALQVDESSMTGEPHPVDIDAEKNPFLASGVKVIDGCGHMLVTAVGTDTAWGEMMGSITREKTEPTPLQERLEALTSSIGKVGIAVAVLVFAVLTARHFTGSTRDEQGNPTFDRHHVSFNTVFTALVGIFQQAITIIVVAIPEGLPLAVTLTLAFSMKRMVKEHALVRTLSACETMGSVTAICTDKTGTLTLNQMKVTEFWVGTDRPKAAATVAAAVVSFLRQGAGLNTTGSVYKPDNVSPPEISGSPTEKALLSWAVAELGMDADALKRSCKVLHVEAFNSDKKRSGVMIRDNATGALTAHWKGAAEMVLASCSAYVGSDGAARELDAGKRRKLQEIISGMAAASLRCIAFAYKHVDSEHSKIDDEGLTLLGFVGLKDPCRPEVRSAIEACTKAGVAVKMVTGDNVLTARAIAKECGIISNSDHDAIVIEGQEFRAMSPEEQLEIVDRIRVMARSLPMDKLVLVQRLKQKGHVVAVTGDGTNDAPALKEADVGLSMGIQGTEVAKESSDIVIMNDNFDTVVTATRWGRCVFNNIQKFIQFQLTVNVAALIINFVSAMTSGKMPLTTVQLLWVNLIMDTMGALALATDTPTKALMRRPPIGRTAPLISNAMWRNLAAQAAFQVAVLLALQYRGREIFGISEKANGTMIFNAFVLCQVFNEFNAREIERRNVFAGVLRNKMFLGIIAVTIAMQVLMVELLTRFAGTQRLGLAHWGVCVAIAAVSWPIGWAVKFIPVPDRPLREILATRMKTISRIMTQ

SEQ ID NO: 13486 - protein, 83 aa, Zea mays
  VARIANT 52: note = Ancestral polymorphism is H, Derived polymorphism is R
  VARIANT 51: note = Ancestral polymorphism is S, Derived polymorphism is F
  VARIANT 39: note = Ancestral polymorphism is A, Derived polymorphism is S
  VARIANT 29: note = Ancestral polymorphism is T, Derived polymorphism is A
MGEFDDYWARAYRGDPAVPHSDPQRLISTWTGAFALGAAACVHHHASALASRLKSLPATWQDMTLALDQKRWKKAFEKKRQQP

SEQ ID NO: 13487 - protein, 240 aa, Zea mays
  VARIANT 224: note = Ancestral polymorphism is K, Derived polymorphism is N
  VARIANT 223: note = Ancestral polymorphism is A, Derived polymorphism is T
  VARIANT 136: note = Ancestral polymorphism is R, Derived polymorphism is S
MADMVSEVAGQGARPTLRWSATMSGFVLRRFVDLIGNGVKADKGFKEIHLNSFAKNVYELYGQEVIGHQVYNHLRKWRSRWVKVCILKDISGALWDEDNFVISLEEGHYAAYIKVKTVDKGTPGDSNDSKPNLGKRKRFMTDEDVVVFTGMKEVVSDIASAARESIHVEATPGIYNDVTNCSGFSREALMYAPNHMMEHKATSLVFLDMTHDDRDLWLKTFLAKHYHIYCLSSVDFLYVS

SEQ ID NO: 13488 - protein, 194 aa, Zea mays
  VARIANT 40: note = Ancestral polymorphism is R, Derived polymorphism is H
MSGVQAMPAAVGVAGLRGSGLVSSSSTGLFAGDCKRKARRPACSAWALRQSRIGSRSRSKRGLGIVCNLAGQYEDSFDDVQRQLMNYFTYKAVRTVLTQLYELNPPSYRWFYNFVAVNKPTDGKHFLRALGKERQELAERVMVTRLHLYGKWIKKCDHAKTYEKISDENLALMRERLMETVIWPTDDSSTEKIG

SEQ ID NO: 13489 - protein, 505 aa, Zea mays
  VARIANT 246: note = Ancestral polymorphism is A, Derived polymorphism is V
MVGSREQIGATTQAPNKVSMSRQVFHVLLLAAVVLLASLLSAKEKLLGLSPAAVAVACWAGAVAAWAYAVSRPRPVYLVDLSGYVGGPSHEASRAKTIAHFGRCGRFSDESMAFQKRMLERSGLGEQTHFPASLISVPVDMCLRTAREESHAVIFGVVDEVLRRARVAAADVGVLIFNSSLLSPTPSFTSLIANRYGMRRDVVSHNLSGMGCSAGIIAIDLAKRLLQVHPDTYALVVSTENITLNAYMGNNRPMLVTNTLFRVGGAAILLSNRGADRRRAKYQLIHTVRTHRGAHDQSFGCVTQEEDDAGCVGVSLSKELMVVAGEALRTNITTLGPLVLPMSEQLRFLATVVLNRVFRANVRAYLPDFRLAFDHFCIHAGGRGVLDELERSLKLSAWHMEPSRMTLCRFGNTSSSSLWYELAYCEAKGRIRKGDRVWQIAFGSGFKCNSAVWKALRTVDASEEGNPWTPEVHVLPIHVPRVSPIDETAYTFPDGATYKVSVSHA

SEQ ID NO: 13490 - protein, 254 aa, Zea mays
  VARIANT 146: note = Ancestral polymorphism is S, Derived polymorphism is F
  VARIANT 159..254: note = Derived polymorphism lacks residues 159 to 254
MAVPSRRHLQVLVHGGGVCAGRGERQQASPDGASTYLGKPRGDMDGLPRELCLKIFHLLDHQSLASSPQGLTRSLKLWHPNTELEAPVIAIAIALPLFFLFQERNFSDDEININKVLASQTFFSKLFNDRWGADAAAFYAPEGSKSWKDVFAVQDRCDRYGLGVRIIREGKNYYLIYQGEIQRYLGKESPSEDNQKFAMTSFLTKKNCQAQVSEADMDAMWKHPDVYKEWIKSDKVLHELIGDKLVTTAIAIRK

SEQ ID NO: 13491 - protein, 647 aa, Zea mays
  VARIANT 447..647: note = Derived polymorphism lacks residues 447 to 647
  VARIANT 255..647: note = Derived polymorphism lacks residues 255 to 647
  VARIANT 34..647: note = Derived polymorphism lacks residues 34 to 647
MAHMQSSPKGQEVHEVTRKSNDQIVLKQDTVDDEDSGDTTSSAGESKYPGWPGTTVFRMLIPAQKVGAIIGHKGERVRRLCEETRACVRIIGGHLCAAEQAVIIFGREQLDEPLPPAMDALLRVYQQTINNDSLDVGPDNVIVRRILAPSEQAASLIGEHGVMINSIMEASQTDIRVLDDDLPPVALEEDRVIEIWGSPAGVYKALELVASHLRKYLVDRSVIPLFDRYVSCRLLFEAFVIQFQWINCYIEEITQWMGSIARCLQFGVSFMLLVGSCPLTLVSFALVSQLIFSFVDVPMPILHMDMPPCHYIDYPEGPVHPVSPGYHSVSTENLQHERWIGTSYLRGRHPMGNLRHADTFEYRWEAPTPFRRYRSVTPPNHAISAYGPEASSPTEAYLSAPMKSRSHHSLINGWHASPVSSTDSDERICSLISVYGQQAQLQKQTCQSAKLGKNPQFGISLHGSESEAHPTRVSPSDSTEQPPSPCFRIHPPTTVENLLHCRVSACGPEASLPLHLAVTSSTSRSTVVASQVKKKMQVPIFYAEAVIGPTGERIEYIRRTSRSSILISNSEGTMYIEITGSAATDVLTAEQLIKNFMAEAAAASPGHSYDFIPSYLPAPRSAQADIFASPETSEVSSLPERRLQMIY

SEQ ID NO: 13492 - protein, 715 aa, Zea mays
  VARIANT 79: note = Ancestral polymorphism is G, Derived polymorphism is S
MAAAWRITVLLFYALTSELLKRSLSSTVSPSPAAAAEAQALLRWKSSLLPPNSTSSSSSSPLSSWLPGAAGSVCTSWAGVTCADGENGRITGVALQGAGLAGTLEALNLAVFPALTALNLSGNRLAGAIPTTISKLTSLVSLDLSSNRLTGGIPAALGTLPALRVLVLRNNSLGGAIPASLGRLHALERLDLRATRLASRLPPEMGGMASLRFFDLSVNELSGQLPSSFAGMRKMREFSLSRNQLSGAIPPDIFSSWPDLTLLYLHYNSFTGSIPLELEKAKKLQLLSLFSNNLTGVIPAQIGGMASLQMLHLGQNCLTGPIPSSVGNLAHLVILVLSFNGLTGTIPAEIGYLTALQDLDLNNNRLEGELPETLSLLKDLYDLSLNSNNFTGGVPNFRSSKLTTVQLDGNNFSGGFPLSFCLLTSLEVLDLSSNQLSGQLPTCIWDLQDLVFMDLSSNTLSGDVLASSTNSSLSLESLHLSNNRFSGEFPPVIKNMKMLVVLDLGDNYFSGEIPSWVGSGSPFLRILRLRSNMFSGSSIPLELLQLSHLRFLDLASNNLQGPIPHGLASLTSMGVQPQTEFDIRSGVHHQILNLEADFSYADRVDVSWKTHTYEFQGAIALMTGIDLSGNSIGGEIPTEITNLQGLRFLNLSRNNLSGTIPANVGDLKLLESLDLSWNELSGLIPSGISELTSLSSLNLSNNMLSATTMVFVAFR

SEQ ID NO: 13493 - protein, 323 aa, Zea mays
  VARIANT 91..323: note = Derived polymorphism lacks residues 91 to 323
MAWTAAGTVCWRLLRLPSVRCPLSSRARCSAAQSLDAVDKEYADLNLRPLYPNVCRHPSSLRPYPRCYSNLTTDSSMYAEGPSHAHTVAREPAQLILLGAHGAARVEGGVRRPLASPHGRHRLREWEVLDLAREEFWQESKLPWARNPPKGFIGFRPLKYFGIKDISLVERAQFWVNELELMYVYFMFANATMSFEKIISSYPGPLSLVSILCPDPHFKKRHHKRRVLQQPLVDSIINNLCLGGQVFIQSDVLEVAVDMRERFDGYSGILAHVNYVDQDLQCDNEGWLLDNPMGIRTEREIHAELEGATIYRRVYQKVRDASF

SEQ ID NO: 13494 - protein, 355 aa, Zea mays
  VARIANT 211..355: note = Derived polymorphism lacks residues 211 to 355
  VARIANT 266..355: note = Derived polymorphism lacks residues 266 to 355
MAKSGALELARSTGGSLSKDQVKSAVDQYVKYHDLHGGKQESRKSNYTDLANKYYDLVTGFYEYGWGDSFHLAGGYPGETSREAIKRHQHFLALQLGLKKGMKVLDVGCGIGGPLIEIARFSSTSITGLNNNDYHISRGKELIFSAGLSEQCCFLKGDFMDMPISDNTFDAAYAIQATCHAPDAQGVYSEVYRVLKPGQYFALDEWCLTDRFDPNNAKHLAIKAEIELGDGLPDIRTTRQCVQAMKDAGFEVVFAKDLAQVFPCPWYRVMDPTYFSWAHFQCTRPGRIVTRAIVNTLEFLRIAPAGSMGAYNVLMSASDGLLKGGREGIFTATFFVLGRKPLKEVDIVSLSRKLI

SEQ ID NO: 13495 - protein, 135 aa, Zea mays
  VARIANT 14..135: note = Derived polymorphism lacks residues 14 to 135
  VARIANT 48: note = Ancestral polymorphism is I, Derived polymorphism is T
  VARIANT 60: note = Ancestral polymorphism is A, Derived polymorphism is T
  VARIANT 84..135: note = Derived polymorphism lacks residues 84 to 135
MAVHRLQPSLSGLQCSTARSPVLLHGPRLTGARTGTRFDLIVNYQMVIFPALDIRVKNVAGTYSLEHKGENYLFAHQTRLLLFQKMFRPGWKDIFRMNQSELEAEIRKGNSRGPLIDSYDHVIGVNTTTLTRKGW

SEQ ID NO: 13496 - protein, 310 aa, Zea mays
  VARIANT 219: note = Ancestral polymorphism is A, Derived polymorphism is V
MPLLLHQPLLLLNASADHHLPWRRSSPISSCQGAVTELALPQPWTPSGHPSPISPRPHPLAAAPSYSWWLSLLPWMLAVLPSLVLTSAPCVGWPVAPALGLSSANSAPSIPARILLIGPAQIILMPGRGTTAIAMKPHRVAPSTCSTEYRSTCRPDLQPWLRGRRTPLPSTLCLALHQCNEMSERIDDMRPEFDSARLFDVYFTHCDLVDDVFTVSYMAERIVGQGSFGIVFQFKLCKVRSVLFGQKGIPYLNTYDGRTMRYPDPLIKANDTIKIDLETNKIMDFIKLYLPFHGLYQVIYLVRLNVSTNS

SEQ ID NO: 13497 - protein, 243 aa, Zea mays
  VARIANT 142: note = Ancestral polymorphism is P, Derived polymorphism is L
  VARIANT 114: note = Ancestral polymorphism is R, Derived polymorphism is W
  VARIANT 60: note = Ancestral polymorphism is R, Derived polymorphism is W
  VARIANT 53..243: note = Derived polymorphism lacks residues 53 to 243
  VARIANT 35..243: note = Derived polymorphism lacks residues 35 to 243
MGDMVLLPNGAEVAIINGAAADGTAGWESAKTSAYAPVVYRPDHSPGDRFEEQNAAGVARLYHSSAVLLRDGRLLVGGSNPHTYYNFSNVQFPTDLSLEAFSPEYLDASNDMLRPRILDPSPTGAPATVGYGATMVIRFLVPALARRRRGGRAGCLGDVSVTMVAPSFTTHSFAMNQRLLFLDVTKNVAVRGRADTFSASVTMPATAVLGPPGYYMLFVVRDHIWSTATAATSTGRTGTTYEA

SEQ ID NO: 13498 - protein, 313 aa, Zea mays
  VARIANT 53: note = Ancestral polymorphism is P, Derived polymorphism is L
  VARIANT 54: note = Ancestral polymorphism is T, Derived polymorphism is M
  VARIANT 64: note = Ancestral polymorphism is K, Derived polymorphism is M
  VARIANT 83: note = Ancestral polymorphism is R, Derived polymorphism is C
  VARIANT 201..313: note = Derived polymorphism lacks residues 201 to 313
MDPPRGGASTSSELEKHSSGSVSLYVKYHDLHGGEQESRKSNYADLVVFCLHPTLINCYIVYLKVYQGFTLGITYAQFPTHIRCISVEMPSCSRSQFCSTSITGLTNNDYHVSRGKVCNLAFFLEYKNCIAYGYAPFNFWLQEHIFSAGLSEQCCSLKGDFMNMPIADNTFDAAYAIQATCYAPEAQGVYSEVYRVLKPGQYFALDEWCLTDRFDPNNAKHLTAKAEIELGDGLPDIRTTRQCVQAMKDAGFEVNTLEFLRIAPAGSVGAYNVLTSASDGLLKGGREGIFTASFFVLGRKPLKESEIVNGGNL

SEQ ID NO: 13499 - protein, 242 aa, Zea mays
  VARIANT 47: note = Ancestral polymorphism is W, Derived polymorphism is R
  VARIANT 21: note = Ancestral polymorphism is A, Derived polymorphism is V
  VARIANT 8: note = Ancestral polymorphism is K, Derived polymorphism is E
MAAMGMKKGVLMLALGLAMAVTSSAVVYKVGDASGWTILGNVNYTDWTSKQNFRVGDTIGKCSDECMCFSFGIDRWSDEVLVSLQEFTYPPGIHNVLEVNKADYHSCTNSTPIATHTSGDDKIVIKSPGHRFFICGVPGHCAAGQKLSIRVLKTRSSDAPSPAPAARSASAASPSPSGSTSTDPSGAGASASPPASSTDSTPDATTTTAPAPDANGAGVSAGHRAVVAAMALAAAASMAMLY

SEQ ID NO: 13500 - protein, 406 aa, Zea mays
  VARIANT 25: note = Ancestral polymorphism is F, Derived polymorphism is L
MEMARPGNGGGTFDDAVTWRRWNGFLSSYPDMGRDSDGGRAALQPLPAHGVGSRRRTYADGELDVFSAERYFRGAMDYGNGDRKEGVFVTAPAVAGQVPQPLVETAAARPAAEAVVMAKPSWTRASTVSFTASSASSANSQAALFRGGPRRRRSSCRDSKCCVRVGVLMRTCSGKRSVSVDGCAAKEAPGAAEAAATGIDWYRELRMHKAALGLSGHGNRHDLVPAGLPPSLNLGTAKVAAIGSEVTAGEESAELAFSRSMRRRSNFTLVAPVRANVPVSGRVGEPAGAGKGGGGKHDDDDAGSESSSDLFEIKSLMISDCPYEPSEASIQWSVVTASAADASERGDRVPASGGGGRGPVSGRQLRGYRPRPTGILAGCASNRAIDVSAAAMQRRSEAFQKARNGA

SEQ ID NO: 13501 - protein, 123 aa, Zea mays
  VARIANT 99: note = Ancestral polymorphism is L, Derived polymorphism is H
  VARIANT 60: note = Ancestral polymorphism is Y, Derived polymorphism is D
MANSRRCLATDSRGGGRLRFKIYSEEDRSKMPLELSSALSHEREVVEDSEIRQQALEAIYMIVLQDGGRRSFWSVNGPRILQVGYEDEKDPKVMEAYELIGSLLVGKGEDVQDNKKEQGEKPQ

SEQ ID NO: 13502 - protein, 236 aa, Zea mays
  VARIANT 169: note = Ancestral polymorphism is T, Derived polymorphism is N
  VARIANT 47: note = Ancestral polymorphism is L, Derived polymorphism is V
MLAPPSSIPFHSIPVLAHLAPPSASAHPPRIVMAMATQASAATRHLVAAAASAWAPSAKPRQLSSQLALPPSSSRAPAPLRATAGEAVTEEAPKGFVAPQLDPSTPSPIFGGSTGGLLRKAQVEEFYVITWVSPKEQVFEMPTGGAAIMREGPNLLKLARKEQCLALGTRLRSKYKITYQFYRVFPNGEVQYLHPKDGVYPEKVNPGREGVGQNFRSIGKNVNPIDVKFTGKSTFD

SEQ ID NO: 13503 - protein, 325 aa, Zea mays
  VARIANT 63..325: note = Derived polymorphism lacks residues 63 to 325
MEETLAVESAAGETAAAQAPELNEETLEEVLSRHRKEKSKLQDKETSLKKAAAKGSKAEQKAKKKQVEEEITRLSSELEANHAAELASFGYKPSGSSEKGNLDNLVKAIAGVSVSSNSDSAKLSKGARRREKKAKEEAAREQRIQEEQSNLVSDRMLENEKLERKLEPLGLTVQEIKPDGHCLYRAVENQLSLHSNGAARYSYQDLRQMTAKYMREHAANFLPFYLAEGKADVGPDPMASFERYCEEMESTAAWGGQLELGALTHCLKKHIVVYSGSFPDVEMGKEYKSGPGGSGAGGASIRLSFHRHAYGLGEHYNSVVPAGSS

SEQ ID NO: 13504 - protein, 234 aa, Zea mays
  VARIANT 154: note = Ancestral polymorphism is G, Derived polymorphism is R
  VARIANT 111..234: note = Derived polymorphism lacks residues 111 to 234
MSSMMNALSNWLVNPRRNPLARLHMHTVSSRLRKYGLRYDDLYDPYFDLDIKEALGRLPREVVDARIQRLKRAMDLSMKHQYLPEDLQRLAPRILPARELARFASRLLLRKLLPGPPRNKHAGCPKIDFKAGVDHFCLHPGGTVVIEAVRKSLRLTAHDVEPAGMTLHRWGNTSASSLWYVLSYMEAKWRLKRGDRAQQVPFRGYLSDMLALVKKENAEREALGALPLYQRTLP

SEQ ID NO: 13505 - protein, 655 aa, Zea mays
  VARIANT 45..655: note = Derived polymorphism lacks residues 45 to 655
MGSLCCVAARPHGASTASREWSSISRSDPPWRTGAGFSPPLSRGWEYRINSEGLSYGSHGDSGVAVNYGSSLSSNSKGASRSWERNELPQDHRYSTSEGAISYLNSPDISFQNHHIMLPMLQDSSVDEYMRGKLHIISLKIDADLWAVSVAEPIGSLLLSEGMSGQHNSGGSTSSCSDGSEYDIVPKSYTSTPRNFPSRRSFLSKPIHPVSFPEHALEAQETRSHVASASSNNPLCSEYKGTGELCFPDYGSGRHGESGNWSAASSMDLTDLSEQPEAGQAGLLRPNNAMQKTRCDLCERLLTKRSPCGSRRIVRTGDLPVAGVLPCSHVYHAECLERTTPKGQKHDPPCPVCDKLAGKDTEQWSICRLKNGFPRFRSLGEGPSRVFSCADAGDCVAGAVQIPRSNSIGLLTRSGHKRHASSKGEPSKDSAETSRNACICIVLEIASKLLIQFYETTAITWPLQSTALHCNTERNMAEEKSRPRLNERIMSSLSKRSVAAHSWHDLEIGECTFCAAVVEITKGSKVKYELDKKTGMIKVDRVLYSSVVYPHNYGFIPRTLCEDGDPMDVLVLMQGEKDDKIIAVCVDDPEYRHLTDLKELSPHRLNEIRRFFEDYKKNENKEVAVNDFLPPTTSLEAIQHSMDLYAEYILHSLRR

SEQ ID NO: 13506 - protein, 291 aa, Zea mays
  VARIANT 278: note = Ancestral polymorphism is G, Derived polymorphism is C
  VARIANT 267: note = Ancestral polymorphism is Y, Derived polymorphism is N
  VARIANT 266: note = Ancestral polymorphism is S, Derived polymorphism is L
  VARIANT 257..291: note = Derived polymorphism lacks residues 257 to 291
  VARIANT 101: note = Ancestral polymorphism is D, Derived polymorphism is Y
  VARIANT 47: note = Ancestral polymorphism is C, Derived polymorphism is S
MRDFPSCFGESGVQIADASSSSSSAGKGAAQNLVTCLYQTQFSGRPCVISLTWSRSLMGQGLSVGVDDLSGHCLCKADIKPWLFSKKKGSKSLDVEDGKIDIFWDLSGAKFGAGPEPVEGFYVAVVFDLELVLLLGDMKKDAYRKTGANRSMLNAAFVARREHIYGKKTYSAKAQFCDNGQFHDIVIDCDTVDLKDPCLEIRVDKKPVMQVKRLAWKFRGNQTILVDGLPVEVFWDVHSWLFGSTASNAVFMFQTCQAPEKSLPWSYSQIFRESQLQGLGFSLILHAWKLE

SEQ ID NO: 13507 - protein, 348 aa, Zea mays
  VARIANT 278: note = Ancestral polymorphism is S, Derived polymorphism is C
MKPMATNGMAPSFFAANFLLQMQQEQQAHHQHQHHEGHDHLLAPPPPALVSPFLHDFGGAMTAPPPPMLATGIKRMYPDGMCDDGSGHLHAEPKQHQQDCGGGASDDEEGSAAAACGERKRRLSVEQVRTLERSFEVANKLEPERKAQLARALGLQPRQVAIWFQNRRARWKTKQLEKDYDALRRQLDAARAENDALLSHNKKLQTEIMALKGGGGGRQEAASELINLNVKETEASCSNRSSDENSSEINLDISRPPRAADESPAAMDSYRGIPFYACARADDVDQLQLLHSGGHPSPAPKMEPGHGAAATAGGGGGGGGTFGSLLCGAAADEQPPFWPWADGHHAFQ

SEQ ID NO: 13508 - protein, 300 aa, Zea mays
  VARIANT 259: note = Ancestral polymorphism is L, Derived polymorphism is Q
  VARIANT 231: note = Ancestral polymorphism is R, Derived polymorphism is P
  VARIANT 221: note = Ancestral polymorphism is M, Derived polymorphism is T
  VARIANT 219: note = Ancestral polymorphism is A, Derived polymorphism is P
  VARIANT 215: note = Ancestral polymorphism is R, Derived polymorphism is C
  VARIANT 206: note = Ancestral polymorphism is L, Derived polymorphism is V
  VARIANT 185: note = Ancestral polymorphism is P, Derived polymorphism is R
  VARIANT 181: note = Ancestral polymorphism is S, Derived polymorphism is R
  VARIANT 150: note = Ancestral polymorphism is N, Derived polymorphism is S
  VARIANT 98: note = Ancestral polymorphism is T, Derived polymorphism is I
MRCAAAALAVALIAVVAGATAPGSPAAGTCARRGALPFLDAVGSRCPFVRIEPSPPLEVRGEAVDTELNLRRRGASYSILFYAAWCPFSSKFRPIFETVSTMYPQVHHFAVEESSATPSLFSRYGVRGFPAILLVNETTMVRYRGSKDLNSLVDFYKETTGLDPVAYIDVVVQQESTASLSSVAPWDRSPLEMAKDEPPYLLVAVLFIILKAAARLVPAAMSHLRAFLAVRVQNLNLGIRRGSSQVLERALNALDVRRLCSKLGLSNRATDLRKGASNARAWASSFASVSLGEPSSSRQA

SEQ ID NO: 13509 - protein, 648 aa, Zea mays
  VARIANT 505..648: note = Derived polymorphism lacks residues 505 to 648
  VARIANT 435..648: note = Derived polymorphism lacks residues 435 to 648
MAAPESECGGSDGYRDLRGVRVDLDTGAAGADGGGGFAVSFWLYLSVSARPSSVILHQITAGDDTKLPFLALGEGNKLLLFPLMRLHREAPAPASSYPWTDTTNLSSTSVCPLEKWFHIGCEVTENVMCLHVDGFLTAEAPLCSLFDEPDRQDDSNQISLVGNDGKLEGYIYNIEVSYVLGAIKEQYTKNPPFKLSIDYSCSDGIEEGDDGIWSIVGGKASCRRNFILEVVLTNTFGEPVKDKELSSKCDNKLFRIKFSTLHMQRYSFLEAYSKPIRCISRSRTVRPLGPTKRASSATANEIDMLSNGQGFVSTDKVNSRGHSVCLHTPMFPKIEGGMVEVVEAPKIASQNKNARKVVVSKEAQNVIGTDSSTSNYDSFDSGSSWSGSEGDDGIETFSDAVVFRYCLDSTYDRSKFLRGASLTVNKDDLVKLADRVSLYSGCSHHRNQILMSKRLFREGADTWNMISKNNERALWSSAIPEIITKFTNIVHSVRRGLSEQDLEVLRGIAGCGEDIGRDEFDRLWCWLYLVVVSLSRERIKKLWDCTAPRWIEGLITTEEAENALRSSRELLKEAGTFVLRFPITRSWPHPDAGSLVVNYIGSDSSIHHRLLSLDSSDASAEKLQDLLLQEPELSQLGRVDRVSITIRR

SEQ ID NO: 13510 - protein, 114 aa, Zea mays
  VARIANT 45: note = Ancestral polymorphism is L, Derived polymorphism is H
  VARIANT 12: note = Ancestral polymorphism is L, Derived polymorphism is F
  VARIANT 2: note = Ancestral polymorphism is S, Derived polymorphism is A
MAGFHQMLQNPLATVIAALLSAANSPFLGCTALSPLMHLFDLTGLRSALGCRRSANMGTRGVALLLQALLPASSEGLVRVMLKKQPVDQNGRAPLRRGEAAPPPPRRQRPGLRR

SEQ ID NO: 13511 - protein, 107 aa, Zea mays
  VARIANT 1: note = Ancestral polymorphism is M, Derived polymorphism is V
  VARIANT 24: note = Ancestral polymorphism is V, Derived polymorphism is A
  VARIANT 31: note = Ancestral polymorphism is I, Derived polymorphism is V
  VARIANT 37: note = Ancestral polymorphism is M, Derived polymorphism is I
  VARIANT 44: note = Ancestral polymorphism is I, Derived polymorphism is V
  VARIANT 91..107: note = Derived polymorphism lacks residues 91 to 107
  VARIANT 97..107: note = Derived polymorphism lacks residues 97 to 107
MATALKSFLNSPVGPKTTHFWGPVANWGFVVAGLVDMNKPPEMISGNMTAAMCVYSGLFMRFAWMVQPRNYLLLACHASNESVQLYQLSRWARAQGYLEKKEPETQQ

SEQ ID NO: 13512 - protein, 273 aa, Zea mays
  VARIANT 220: note = Ancestral polymorphism is C, Derived polymorphism is Y
  VARIANT 170: note = Ancestral polymorphism is D, Derived polymorphism is Y
  VARIANT 149..273: note = Derived polymorphism lacks residues 149 to 273
  VARIANT 142..273: note = Derived polymorphism lacks residues 142 to 273
  VARIANT 20: note = Ancestral polymorphism is R, Derived polymorphism is W
  VARIANT 18: note = Ancestral polymorphism is E, Derived polymorphism is K
  VARIANT 1: note = Ancestral polymorphism is M, Derived polymorphism is L
MPPTVVPSAAVAAAVEEEMRWRQLDRGVSAVSFGFVATAILVSMFLAMAILEHFLHPPTHTLGHAPPRGIRRQLRFFLGRGGERADAPGSDLEAARKLQGHAPLEVVCSLEPNISLMLNPSRLQSPNCIQICRRLNSNKFCSYGENARRKPHTPSAIVIGGGFAGLAAADALRNASFQVILLMHFTLTTLLGFQSIWEHLDEFHSFELSPCAQKFILKECIECFFSSFLLRRLLGVCEENPLAPIIGRLGLPLYRKSGDDSVSQKDLVRTSVS

SEQ ID NO: 13513 - protein, 136 aa, Zea mays
  VARIANT 106: note = Ancestral polymorphism is G, Derived polymorphism is R
  VARIANT 79: note = Ancestral polymorphism is K, Derived polymorphism is R
  VARIANT 66..136: note = Derived polymorphism lacks residues 66 to 136
MRSSSFVVFFLLVLFLLVAAGAPSLGDAVSVHQQGADDDDDHGHGGSAAAHSDDAFYQKVGTFAVWVYSLWNDIKPVPKLERVLSASARPAEGRAMEYQLVLRVARLGTFRALVWGVPAEGSEDWKLKYFEPVDGA

SEQ ID NO: 13514 - protein, 126 aa, Zea mays
  VARIANT 113: note = Ancestral polymorphism is E, Derived polymorphism is D
MKQSAVAAAQALLIALAIAALAMVVVTADPAPPPGYTKQEDVGSDFIKQVGKFAVTVYKMAHMIPMSYLRTLQCWSSPAGGGANNYWMVLTATNWTGTAGSYVSTVWGIPGSESRTWKLLTFNGTM

SEQ ID NO: 13515 - protein, 147 aa, Zea mays
  VARIANT 28: note = Ancestral polymorphism is D, Derived polymorphism is Y
  VARIANT 58: note = Ancestral polymorphism is G, Derived polymorphism is D
MAAGAHCVVQPSAKGMEYTWSNRRTTADGDLGVSISAPGGAVAPVPTWTLQSRMLMNGTSMSSPSACGGVALLVSGMKAEGIPLSPYSVRKAIENTAASISNAPEEKLTTRNGLLQVDRAFEYAQQAKKLPLVSYRISINQVGKSSK

SEQ ID NO: 13516 - protein, 556 aa, Zea mays
  VARIANT 22..556: note = Derived polymorphism lacks residues 22 to 556
  VARIANT 85..556: note = Derived polymorphism lacks residues 85 to 556
  VARIANT 112..556: note = Derived polymorphism lacks residues 112 to 556
  VARIANT 142..556: note = Derived polymorphism lacks residues 142 to 556
  VARIANT 172..556: note = Derived polymorphism lacks residues 172 to 556
MDTRAHVKTKKGPRPRPRAAVQSGGRPARTKRPNATTSTTSSSIDTSPVAVPGPAAPATQTTTSASACASPLQESVRPPALRCQRAPPSSTLCGAEIPSFLCAPGTARSHCQAPAFLELGMEAAAASAAAVGGSGAGLTRWQAAALAALAGWVWAASFYDLTRRARALVQPWVTRRVHAETPAILRFQFRRFNCLRCFSSVESLQKLEHKLLDNFFSVLSCVVSVPFYTGFLPLLFWSGHGRLARQMTLLMAFCDYLGNSVKDMVSAPRPCSPPIRRVTATEDEKENAMEYGLPSSHALNTVCLTGYLLHYVLTYGEHGSLTVAAGLSLALLLVMLVGIARIYLGMHSLTDVVAGIGFGIVILAFWLAVHDHVDAFVVSGQNVATFWAGLALLMCFAYPKPEFPTPSFEFHTAFNGVAFGIVYGIQQTYFHFHAPDAPIVFSAELPFLAFAGRVLVGIPTILAVKSCSKALSRWLLPVMCSTLGIPIVSSCYVPALKIDGGSSKSRQAAGGHLQRLLSHFPQKAYDVDTGIRFVQYASLAWSVVDLVPAIFAHLDL

SEQ ID NO: 13517 - protein, 275 aa, Zea mays
  VARIANT 54..275: note = Derived polymorphism lacks residues 54 to 275
  VARIANT 112..275: note = Derived polymorphism lacks residues 112 to 275
  VARIANT 211..275: note = Derived polymorphism lacks residues 211 to 275
MTSFSGSVTGPNMTGSPHPNPAACDTGANNSSPTVARALVSTQHDVIAEVAPRERRHEPASSIHGEQQLRALPGRQPKRLGARAPHEPRDRLKGGAAAEGTVGKRQPADALQPVRVEAEGVVLQLLRTVERRRVGDVGDLDGLVVREGVHRRVAHLQDAVVQERRHVSDVPVSTRLLGHITDLKRHFKRAGKSKALPKYFQVGTVVELASEFYSSRLKNREHKATLVDELLLDQSLKSYRFSGALFQSPTSVIITRLWCLYLKWVSQFTTKVLHN

SEQ ID NO: 13518 - protein, 216 aa, Zea mays
  VARIANT 143: note = Ancestral polymorphism is Q, Derived polymorphism is H
MSLFGLGSKNQKTFRPKKNAPSGNKGVQLKKHIDATLGSGNLRDAVRLPPGEDLNEWLAVNTVDFFNQVNILYGTLMEFCTPATCPTMSAGPKFEYRWADGVQIKKPIEVSAPKYVEYLMDWIEAQLDDESIFPQKLGTPFPQNFKEVVKTIFKRLFRVYAHIYHSHFQKIVSLKEEAHLNTCFKHFTLFTWEFTLIDKAELAPLIDLIESIVSVC

SEQ ID NO: 13519 - protein, 514 aa, Zea mays
  VARIANT 305..514: note = Derived polymorphism lacks residues 305 to 514
  VARIANT 320..514: note = Derived polymorphism lacks residues 320 to 514
  VARIANT 329..514: note = Derived polymorphism lacks residues 329 to 514
MLQEHPMSLVLAENKSNLQEILVEQKIPIGVSIKLSPKVDGSELPCPIEVHDGITSSSSKTNETMEAQDYSNTMKSNTSSCMFEASKWQECPISLILADKKGSLQEVSVEQNVPCGDYVSLSQKADGSELTSTSEAPEGFLTSSSKVYVLKEAQDGSITTEASKVNVCAASHSMLRLIEGVQDEASCIDSDKVTCETPPSILKRLKEDKPLVVHRFHKRQMSLGDTHQKVPAPVSRSNTSKYLRMDKNIVDTTTPIESVNVVASKFGGNMNWKTRKTQTTHASDRIVLELDKMKNKISECKHQAEAAEAAKLSVLKEVERTKKLIDEMKHVLEREQAKEVDAKDDLELFQIISQAMEGVDCNDSVVDVKECMNTLMNRLIWTVAEDDTKVLASGCIDSPSRPSAAAIDCNKKRRRRRSPSPANLAEGNTDDCSEQRRCLKLPRDRQPPSPIDPTALLQATGFGLLFFGDRQCPPPKPPSRPSMKPNDAEQDMQERDEEALKYLKDIKWYRISEP

SEQ ID NO: 13520 - protein, 41 aa, Zea mays
  VARIANT 21..41: note = Derived polymorphism lacks residues 21 to 41
MEFLYTGCICKSKLGQKRKSWLGTNQTSLFILGTTIGFVSF

SEQ ID NO: 13521 - protein, 307 aa, Zea mays
  VARIANT 126: note = Ancestral polymorphism is G, Derived polymorphism is W
  VARIANT 120..307: note = Derived polymorphism lacks residues 120 to 307
  VARIANT 91: note = Ancestral polymorphism is S, Derived polymorphism is Y
  VARIANT 87: note = Ancestral polymorphism is R, Derived polymorphism is H
  VARIANT 82: note = Ancestral polymorphism is G, Derived polymorphism is A
  VARIANT 68..307: note = Derived polymorphism lacks residues 68 to 307
MSSPHGGLDDQIERLMQCKPLAEPEVRALCEKAKEILMEESNVQPVKSPVTICGDIHGQFHDLAELFRIGGKCPDTNYLFMGDYVDRGYYSVETVTLLVALKVRYPQRITILRGNHESRQITQVYGFYDECLRKYGNANVWKTFTDLFDYFPLTALVESEIFCLHGGLSPSIETLDNIRNFDRVQEVPHEGPMCDLLWSDPDDRCGWGISPRGAGYTFGQDISEQFNHTNSLRLIARAHQLVMEGFNWAHEQKVVTIFSAPNYCYRCGNMASILEVDDCREHTFIQFEPAPRRGEPDVTRRTPDYFL

SEQ ID NO: 13522 - protein, 497 aa, Zea mays
  VARIANT 363..497: note = Derived polymorphism lacks residues 363 to 497
MRRGRARLSRGAAYETGALREAKGKLEKSLEDLTLRFTLERRQRLAAEESKALEISKLLKILESVKSELEASNEENKNSCKKISSLQHQLDLSSKDQEAQQNILSQIEEVKRENILLQAKNTEMEQELLKAQKCSHDNMDKLHDVEKNYVHLRDNLKNLEDKISNLEDENHLLRQKALNLSPRHSRTGSYHCGSSPCSPKSFVESSPVKLAPPPHNQTESRRSRMNSDRYEDYHDVLHRCIKDDMGFKKGKPVAACIIYKCLLYWGVFEAERTTIFDFIIHTINTTLKAENENDILPYWLANTSALLCMLQRNLRSKGFIMAASRSSSDTHLSEKANEVSANPFNIFTFQLALYTSLLFIGYQIFIQVPSFFTRKLVTQVFSFINVQLFNSMLLRRECCTFSNGEYVKSGLCVLEKWIVDTEEVVARMRDMVSNDMQNPVSNSFLLDDDLSIPFTTEEIAEQVPDVDMSNIETPASLRHVHSAQFLTQHLQPPYTSR

SEQ ID NO: 13523 - protein, 134 aa, Zea mays
  VARIANT 49: note = Ancestral polymorphism is Q, Derived polymorphism is H
  VARIANT 75: note = Ancestral polymorphism is T, Derived polymorphism is I
MKGVLNDDNVTYKNTYWEARKVARDKLKKKVATYKMGLVDKLKEAVMLQALEALFRMATYGCLSVQEKHMHMVLTMNILRSQMHDWSFQIDNYHGSGMVPLADLSKILRNSFWFMGLAEPEVSTYNPFKLSNTS

SEQ ID NO: 13524 - protein, 414 aa, Zea mays
  VARIANT 55: note = Ancestral polymorphism is D, Derived polymorphism is A
  VARIANT 151: note = Ancestral polymorphism is E, Derived polymorphism is V
MNHTTRLTGSGRPHQKSMRTEMAPCSPLLLAVALLCAAAAAAAAGGFGGPTARYDRVFSFGDSLTDTGNALHLAATAGGPASRPPYGETFFRRATGRASDGRLVIDFIVEALAVPQPTPYLAGATATGADFRRGVNFAFGGATALDLHFFVSRGLGSFVPVSLRNQTVWFHNVLRLLGSAREQRKTMATSLFLVGEIGVNDYFIGLNENRTVGEVRTFVPHVVGAIRSVITDVISAGAGTVVVPGMIPLGCEPQLLTLYRGSVDAAGYDPESGCITRLNDLAQLHNRELRRMLAGLRRAHPGTAIVYADLYRAVTDIVVSPRAYGFRHMPLDACCGGGGAYNYDDASFCGAAGTAPCADPSEYVSWDGVHYTEAANRLIACSVLEGSHSHAADAPTLSNSSATTEDWLHRIGCV

SEQ ID NO: 13525 - protein, 446 aa, Zea mays
  VARIANT 49..446: note = Derived polymorphism lacks residues 49 to 446
  VARIANT 61: note = Ancestral polymorphism is G, Derived polymorphism is W
MPDVQPLVSDFVLKLKRRKVEGSHAVARQTAELLRSVVSQHRMGSSANQAATLADAVRAVGEQLIAANPIELAVGNIVRRVLHIIKEEDISSTAVGIEGLSVTVDSDDEYDSEHDDRPALSAAVLAAHARNALRAPSLQTLLEDIPVSPAISRTASSTGDSDGKSKSAGDKSSTRKLKHDVIAAIGDLIDEIDSCYEPISEQAVELIHQNEVILTLGRSRTVKEFLYAAKEKKRSFRVFVAEGAPRYQGHVLAKELVEKGVQTTVITDSAVFAMISRVNMVIVGAHAIMANGGVIAPVGMNMVALAAQRHAVPFVVVAGSHKVDFCTLPRKICNLSSRIRIRFPFCLLPHVQLCPLYPHNPEVLLNELKSPSDLLDFGEFSDCMNFSTQDGSPLLNVVNPTFDYVPPKLVSLFITDTGGHSPSYMYRLIAEYYSADDLVVRRKATS

SEQ ID NO: 13526 - protein, 184 aa, Zea mays
  VARIANT 3: note = Ancestral polymorphism is E, Derived polymorphism is Q
  VARIANT 71: note = Ancestral polymorphism is A, Derived polymorphism is T
MREPQRHQLVEAEETDSGRTMQLFPTRAGGGTSSSSHEQSDDGAQAANKATLSIFYEGRMLVFEEFPADKAKALMQLAAGSSGSSSAAAPNNKDAPVPVVRVRRVPEQPAATAPLAVVPSDLLPIARKVSLQRFLQKRKERIAATEPYPEPEKDDVPATATATATGWQATALKDKPAPASWLGL

SEQ ID NO: 13527 - protein, 174 aa, Zea mays
  VARIANT 163: note = Ancestral polymorphism is K, Derived polymorphism is N
  VARIANT 134: note = Ancestral polymorphism is V, Derived polymorphism is A
  VARIANT 127: note = Ancestral polymorphism is A, Derived polymorphism is V
  VARIANT 123: note = Ancestral polymorphism is G, Derived polymorphism is S
  VARIANT 98..174: note = Derived polymorphism lacks residues 98 to 174
  VARIANT 88..174: note = Derived polymorphism lacks residues 88 to 174
  VARIANT 59..174: note = Derived polymorphism lacks residues 59 to 174
  VARIANT 38..174: note = Derived polymorphism lacks residues 38 to 174
  VARIANT 36..174: note = Derived polymorphism lacks residues 36 to 174
  VARIANT 19..174: note = Derived polymorphism lacks residues 19 to 174
  VARIANT 15..174: note = Derived polymorphism lacks residues 15 to 174
  VARIANT 7..174: note = Derived polymorphism lacks residues 7 to 174
MRCREKQRKVASRLQTVNQKLAAMNKLLMEENDRLQKQPSAATTDTSCESVVTSGQHHQQQNPAVPCPQRDANNPARVTIESNMNCCRLGANGWDEAWSGFHWNHRCFAQLQWRSRPSRSRSGSRTAPAYSWDVCFHGYVVYLVRVRRGGRKRPLPKCIIYGNPKHQGITQLKF

SEQ ID NO: 13528 - protein, 775 aa, Zea mays
  VARIANT 155..775: note = Derived polymorphism lacks residues 155 to 775
  VARIANT 152..775: note = Derived polymorphism lacks residues 152 to 775
MASAKSSRSRPAGHSGVFPVNAAAGAGGSDGGVQLADKLKIFKTDNFDPDAYVQSKCRAMDEKEIRHLCSYLQDLKKASAEEMRRSVYANYAAFIKTSKEISDLEGELLSVRNLLSTQSALIHGLSEGVQIDSLATGPEGSAEQDISSVEDQEPSEIWKWSTDFPDMLDVLLAERRVDEALDALDEAERIAADAKQKGTLSTTDILALKRVISENRQKLADQLAEAACQSSICGVELRAAASALKRLGDGPRAHSLLLSAHNQRLQLNIQTIQPSSTSYGGEYTASLAQQFFPVIAQALSDSVEVFSEKSAYTSELVTWATKQAMSFSLLVKRHTLASCAAGGGLRTAAECVKIAIGYSDLLEARGLSLSSVLMKQLRPSVEQALDSNLRRIEESTAALAAADDWILTYPPTGIRPLARSSGNLALQPKLSSSAHRFNSMVQDFFEDVGPLVSLQLGGSAMDGLLKIFNSYVNLLISALPGSVDDEVNLEGLGNKIVRMAETEDQQLALLANASLLAEELLPRAAMKLYSMNPVSKDSLRRRGPENQNRAAEQRAWKRKLNRMVEKLRDSFCRQHALDLIFTEEGDTRLSAEMYIDMDNTVEDPEWVPSAIFQELYAKLNKMASVAADMFVGRERFATLLMMRLTEAVMLWLSDDQSFWEEVEEGPRALGPVGLQQFYLDMQFVILFGQGRFLSRHVHQVILDIIDRAMRAFSATGMDPDRILPSDDWFIDVAQESISRIGGGRARVANGDREVNSPTASVSAQSVSSVRSLGSS

SEQ ID NO: 13529 - protein, 136 aa, Zea mays
  VARIANT 95: note = Ancestral polymorphism is P, Derived polymorphism is L
  VARIANT 73..136: note = Derived polymorphism lacks residues 73 to 136
  VARIANT 42: note = Ancestral polymorphism is S, Derived polymorphism is A
MVAEGETVALEFTPIAERCLQYLGKTLKKKAASQGQRRCPISSYFCFDTYHRRSHDLIFNGKSISGDYSLKGQMNEGKSMSRATGQLRETKVPFPVFCLIQWHISPYDLIFNGKSISGDYSLKGQMNEGKSMEQSN

SEQ ID NO: 13530 - protein, 256 aa, Zea mays
  VARIANT 193..256: note = Derived polymorphism lacks residues 193 to 256
  VARIANT 186..256: note = Derived polymorphism lacks residues 186 to 256
  VARIANT 185..256: note = Derived polymorphism lacks residues 185 to 256
  VARIANT 151..256: note = Derived polymorphism lacks residues 151 to 256
  VARIANT 105: note = Ancestral polymorphism is W, Derived polymorphism is R
  VARIANT 22..256: note = Derived polymorphism lacks residues 22 to 256
MAADALSTIPGAVLRNLSDKLYEKRKNAALEIEGIVKQLAMAGEHERISAVISLLTNNFTYSPQTNHRKGGLIGLAAVTVGLTSEAAQHLEVDSTPLTPLQDTHWTGPLEFFVMHAEENRGLLSASSFDRQQLRKEVVRRVKAAAAGLAIENPYIKEIIDDDADRPKEWKETVGDESREFGRYMRQREEQEKQEAELFTRAPVTKHDKQIEKRIRRQLHGRTGLTEECSAGSRFDLALEDIAEGKVTVQEAINPFF

SEQ ID NO: 13531 - protein, 884 aa, Zea mays
  VARIANT 556: note = Ancestral polymorphism is M, Derived polymorphism is T
  VARIANT 96..884: note = Derived polymorphism lacks residues 96 to 884
MAASVTVENLNPKVLKCEYAVRGEIVIHAQRLQQQLQTQPGSLPFDEILYCNIGNPQSLGQQPVTFFREVLALCDHPCLLEKEETKSLFSADAISRAKQILATIPGRATGAYSHSQGIKGLRDAIAAGIMSRDGFPANADDIFITDGASPGVHMMMQLLIRNEKDGILCPIPQYPLYSASIALHGGALVPYYLNEKTGWGLEISDLKMQLENARSKGIDVRALVVINPGNPTGQVLAEDNQYDIVKFCKNEGLVLLADEVYQENIYVDNKKFNSFKKIVRSMGYGEDDLPLVSLQSVSKGYYGECGKRGGYMEITGFSAPVREQIYKIASVNLCSNITGQILASLVMNPPKVGDESYASYKAEKDGILESLARRAKALEDAFNKLEGFSCNKAEGAMYLFPQILLPQKAIEAAKAAKKAPDAFYALRLLESTGIVVVPGSGFGQVLALADHLGDNAIARRAQCIQNEIEAEPESHPFREVLALCDYPHLLEQSGTNSLFRSCLYGIPLLNPGAAALGTEGLRDIIAAGIAARDNFPCNADDIFLTDGAAPPVHMMMHLLIRDKKDGILCPVPSHSLYTSAMLLQGATLVPYFLDESRGWGVSMSDLKKQLDSARSMGVFVRGLVVINPGNPTGHVLVEENQREIVDFCRNEDLVLLADEVYQENIYADEKGFHSFKKIARSMGYGEGDISLVSFHSVSNGYYGECGRRGGYMEVTGFNSDVKKQVYKVVSLSSCSNISGQILMSLVMNPPQVGDESYASYQAERDGVLSSFARCAEAMVRSFNGLEGVTCSEAEGAVFVFPSVRLPKKAVAAAEASNTQPDAFYALRLLETTGIVVVPGSVFGQMHGTWHFRCTVLPHEEKKTMTVIISSFVAFHRAFMEEFRD

SEQ ID NO: 13532 - protein, 178 aa, Zea mays
  VARIANT 131: note = Ancestral polymorphism is R, Derived polymorphism is Q
  VARIANT 113: note = Ancestral polymorphism is T, Derived polymorphism is I
  VARIANT 86: note = Ancestral polymorphism is E, Derived polymorphism is K
  VARIANT 74: note = Ancestral polymorphism is F, Derived polymorphism is L
  VARIANT 72: note = Ancestral polymorphism is D, Derived polymorphism is H
  VARIANT 61..178: note = Derived polymorphism lacks residues 61 to 178
  VARIANT 59..178: note = Derived polymorphism lacks residues 59 to 178
  VARIANT 55: note = Ancestral polymorphism is T, Derived polymorphism is M
  VARIANT 47: note = Ancestral polymorphism is Q, Derived polymorphism is H
MLQAAAPPSEAPMMQISPAPIPIFAAFQVKTTSPRKYFVQPNASIVQPWDSCTIMITLQAQKDYPPYMQCKDKFLIQSTKVAANTEMDEIPPDTFNKEADKVIEEMKLKVVYTLPSCGGSDDSSVSFLGSRSFKAASDDLMMLKNASLEEVIRSMPTILTIFFYFGTSLKTSEFITFL

SEQ ID NO: 13533 - protein, 225 aa, Zea mays
  VARIANT 74..225: note = Derived polymorphism lacks residues 74 to 225
MPSSPDLLLPADATKMRRYSALPNGGRQETLADRVHRYQGVMLVILASLALVSLVLLLMPRSPAGTMGGARGRQCSFPPPCFRRCEISDDEEELLWDTDNCLRCPPGPTQDQGRGVSGHATKRRQSSSPGPNAPPKKPTWKRFLSMFQNKVKHKPSSLKQKRPSSAMLQECASLVRVVRRTAAECFAPAVAGGDEVDELPCYYMQLDQVSYGVRREAYGPIYLVT

SEQ ID NO: 13534 - protein, 224 aa, Zea mays
  VARIANT 59..224: note = Derived polymorphism lacks residues 59 to 224
MLAVIPAFARPTSTNLFCRCPSRPSSSIPCLRRGRPSLAATRGLLQASAQGGAVAHGVRLHAPCNPSSPCRHAARLRLISLVLLPPSFPRGLLPPHGVVLDCRRLKPPRLATATPPAVWIRSWGGRTATARSNGGADLAVFEQFERMVYAWSQGVNHAIIRHNQPEVWAFCLGNGYAGLKDALGSNDSRLQSETLKPISEEVCNLDVVLSRFHFKEHQYSSSKI

SEQ ID NO: 13535 - protein, 417 aa, Zea mays
  VARIANT 250: note = Ancestral polymorphism is E, Derived polymorphism is K
  VARIANT 246: note = Ancestral polymorphism is A, Derived polymorphism is D
  VARIANT 223: note = Ancestral polymorphism is V, Derived polymorphism is I
  VARIANT 221..417: note = Ancestral polymorphism lacks residues 221 to 417
  VARIANT 106: note = Ancestral polymorphism is A, Derived polymorphism is T
  VARIANT 93: note = Ancestral polymorphism is P, Derived polymorphism is H
  VARIANT 65: note = Ancestral polymorphism is L, Derived polymorphism is P
  VARIANT 17: note = Ancestral polymorphism is A, Derived polymorphism is G
MIDEQMEVLRKQISIYATICEQLVEMHRILTEHQDTIAGRSAQLRAKPIDTLLALWSSSCLFCLLGFANGKLERFLFFALGLALRIVNSVRLPRHVSDKRHFCGTALVEFSEEDEAKGVFEKNLIFAGELSKTIAKLAEDGKVAIRNIRRDAIKAYDKLEKEKKLSEDNMKDLSADLQVRMNFLFFSSCKSHRRLHEKDRIHPEAEGTGTDENLNLKLTVWLVLEEGVLNPESTVVAIFPSPMHYAGPTEVQWHAKARINAGANFYIVGRDPAGMSHPTEKRDLYDADHGKKVLSMAPGLERLNILPFKVTAYDTKQKKMDFFDPSRNSSSSLAQRCALLPRTTRVPGMVLCARVARKCSLNTMTAWCHSRAAASCASQLQPKIWEALQIRNPTISAQAVLCDIEPLLYDCILVCKT

SEQ ID NO: 13536 - protein, 422 aa, Zea mays
  VARIANT 82: note = Ancestral polymorphism is T, Derived polymorphism is M
  VARIANT 90: note = Ancestral polymorphism is A, Derived polymorphism is D
  VARIANT 174..422: note = Derived polymorphism lacks residues 174 to 422
MYLSKLPIDSCRPTFFKATMAGTGTVKIHNVSLKASEQDISEFFSFSGEIVHVELKSCDERSQSAYITFRDNQGAERAMLLTGATIEDMAVIITPATDYKLPAFVLADLESKNTGGMESALQKAEDIAVSMLAKGFVLGMDTVEKAKAFDEKHQLTSTATAKVASLDRTMGLSQKFSTGTLVVNEKMKEMDEKYQVAEKTKSALAAAEQTISTASSVIMSNRYVLTGAAWVTDAYNKVATTTTDASKSIKERMMAEQEGANQSGETTKVDLLEISEADEKEWKRHKDDSTKNVVQESPEMTCQESEHQAGERQMTNVAGNSKTGIEEQKNHEGEIAVVSHMQENIDTAEKDPSCHESEVSKANVHDSVLMTKQSEREHNQPEGEFANTHVPGSPVTILVTVSTIDRNSSNGPKKPDSAEGFL

SEQ ID NO: 13537 - protein, 124 aa, Zea mays
  VARIANT 71: note = Ancestral polymorphism is E, Derived polymorphism is K
  VARIANT 70: note = Ancestral polymorphism is I, Derived polymorphism is T
MAWSGRGGRGGLGVLMGLFFGALENPIMAEEMTARQQIVYTTKQMGSRSISNAKTFAVMGLIFSAAECTIKKVRAKHDTTNTAVAGCVTGGALAVKGGPKATCFGCVGFVAFSVAIEKFFDRYT

SEQ ID NO: 13538 - protein, 414 aa, Zea mays
  VARIANT 11..414: note = Derived polymorphism lacks residues 11 to 414
MKASRKVIQIQFFVPRMESLSVGLCHNKPKKSAATAIVPKDYICTQGDLALINFIKEIPCEPRVEVMLIDDAFVERKSMECLFQPNAYIGDEVIDCYINLIKAQKHLKCRSGGRVHIENAFQFNFLKRDGDVEIKTEELYPIEDMTQICSVERRVLLYLDHDMVFIPINIRETHWYLAVIHAINMEIQVLDSLGTSQDRKDLTDSIKGLQRQIDMISQRKELKDHRWPDLQVASWPLREIDIGYAKQTDSSSCGLFLLNYIEYWTGDELSDSFTQDDMSHFRKKMAAILLFLDLNKRRGCLLYKNDKEVDSGSPSDVEILENPTDSKKRKLLHVLHDSEVVYEDEEGPITQADLQKWFVDDSDKRAPVKVSNDGCTNDFLMVGLSTKDMPVTKADSIDVLYDYIMAIEDDTALE

SEQ ID NO: 13539 - protein, 179 aa, Zea mays
  VARIANT 161: note = Ancestral polymorphism is I, Derived polymorphism is T
  VARIANT 172: note = Ancestral polymorphism is R, Derived polymorphism is W
MTGTYEASDRPPPPNSAGYRTDKVRRKRLTAQKRKEIKEAFDLFDIDGSGTIDARELNVAMRALGFEMTPEQIGQMIAEVDKDGSGTIDFDEFVHMMTDKMGERDARDELHKAFRIIDQDANGKISDMDIQRLAIETGEHFTLDEVREMIEAADEDGDGEIDLEEFMKMMKRTDFGSGF

SEQ ID NO: 13540 - protein, 235 aa, Zea mays
  VARIANT 208: note = Ancestral polymorphism is G, Derived polymorphism is C
  VARIANT 127: note = Ancestral polymorphism is Q, Derived polymorphism is L
MKSLTPTAAGSAADFSDSLPSPISPAAVPCHSSPGRHYYLAVDRTQFKMRTLLELLGVVADRRGGLPIATCVSSRDELDAVCAAVANLPFVSASPLILLMVFYVQYSDQAEAERASILENFRQETTQWNKTAKATNIAESSKLESTGSKISIIVATDACLPQAAMAEAPLMARVLINYELPTKKEAYLRRMSTCLAADGIVINMVVGCEVVTLKALEENSGLLIAEMPIHVSEIL

SEQ ID NO: 13541 - protein, 751 aa, Zea mays
  VARIANT 509: note = Ancestral polymorphism is I, Derived polymorphism is V
MERELKLPGTHAPSQVNLSCSGTFFFLPPCALGRLRRCLAPSAPTTEAHARAQRPSRASPSALLCPPAWLLPPPPPPPLGLGHASRGPVAPGAMRRPSGAGVPSRRRRAIQVLVAVSLAYAVAVLLLESPLVSTSLPGAGASAAASRKLHLDGAWEGAGRAAPARPAKHPHRETLSADAGRGRARRLAGIVSGLELRHLNSTRSGSLRKVAAEAAESGARVFSDLEALATALTFSGDSSGEEEEKSKCPHSIVLSGDEFRERGRAVELPCGLTLGSYITVAATPHEAHPERDPKITLLREGEEPIMVSQFMMELQGLKTVDGEDPPRILHFNPRLRGDWSGKPVIEQNTCYRMQWGTPLRCDGWRSRADEETVDGLAKCEKWIRDDEGRSEESKTSWWLNRLIGRTKTVSVDWPYPFVENHLFVLTLTAGLEGYHVNVDGRHVTSFPYRTGFVLEDATGLSLNGDLDVQSVFAGTLPTTHPSFSPQKHLELLPSWQAPPLPDEPVEIFIGILSAGNHFAERMAARKTWMSAAQKSSNVVARFFVALHGRNEVNVELKKEAEFFGDIVIVPFMDSYDLVVLKTIAICEYGVHVVSARYIMKCDDDTFVRLDSVMAEVKKIQNGESLYIGNMNYHHKPLRDGKWAVTYEEWPEEDYPIYANGPGYVISSDIAGSILSEFLKHKLRLFKMEDVSMGMWVERFNNTRLVKYVHSIKFCQFGCIDDYYTAHYQSPRQMLCLWDKLQAGKAQCCNMR

SEQ ID NO: 13542 - protein, 358 aa, Zea mays
  VARIANT 6: note = Ancestral polymorphism is A, Derived polymorphism is P
  VARIANT 74: note = Ancestral polymorphism is P, Derived polymorphism is A
  VARIANT 112: note = Ancestral polymorphism is S, Derived polymorphism is W
  VARIANT 120: note = Ancestral polymorphism is G, Derived polymorphism is R
  VARIANT 230: note = Ancestral polymorphism is T, Derived polymorphism is I
MAPPLALLLLAAIVLSRAVSHAHGGGGGFYDPASVTQLSSRPRAFLYSGFLSDTECDHLVSLVGWVGVGFANRPFCSAAARVVAMIRGALTYGAVSILLSVGFQAKGSMEKSMVADNDSGKSVASQARTSSGTFLAKRELLMWGTDIYLFMLSPPQPKDEIVSAIEKRVAAWTFLPEENAESLQVLRYETGQKYDAHFDYFHDRNNLKLGGQRVATVLMYLTDVNKGGETVFPNAEGSHLQYKDETWSECSRSGLAVKPKKGDALLFFNLHVNATADTGSLHGSCPVIEGEKWSATKWIHVRSFDNPPDVRTDAPCSDDKELCPRWAAIGECHRNPTYMVGTKDTLGFCRKSCGICDA

SEQ ID NO: 13543 - protein, 686 aa, Zea mays
  VARIANT 366..686: note = Derived polymorphism lacks residues 366 to 686
MDCPQLNSPLPVNWDALDALVLDFARSDRLVAPPTASASPSPPSSPSSTTTVTSSAPSSSSLSSSSSYRSRLLIRCARRAIELGDVDAALALLRARAPAALADHRLLFHLHKQRFVELVRRGTEADRDAALDCLRTALAPCALDAYPEAYEEFKHIMLVLIYDKEDQSSPVVNEWSIKRRFELAGLLSSILRAHLEAYDPVLSLTLRYLISIHKAFCTRQGIQSPISDLTERLLFEDRDPPVVPPECSLEAPSFDEVDVQALAHAVELTRQGAVDSLKFAKGHLYQAFQNELCRMKLDLTLLDKLVHEYCVYRGIVEGSSHVLSGTADLKCNQNNDVNNETQLYCEMTNNQNGHCSTSGINLDDSWSRRLHRDRHIMPGQQRRKRWRGRLDDLDYACDALLDPSKHDSLSPTLDMDEDTMVEKQDLVENFNLSDKHMEDQKYEIILEMRDLTRKGMASKVVEEISSIDPDFFQQNPILLFQLKQVEFLKLVAAGDHVSALKVASTYLGPLAANNEALLKPLKETLVTLIQPNEDVVMNALSLPVLASSVQVAMSRRLGIEEPQLMKIVRTTIHTHTEWFKLQMCKDRFEHLLKIDSLKEVDPSLGSHRKSKVLTDECANGSSQMTTCSSGKVPDEGSSPQVSSEVACDENAILKVMEFLALPRADAIQLLMQYNGNAEAVIQQIFQ

SEQ ID NO: 13544 - protein, 236 aa, Zea mays
  VARIANT 172: note = Ancestral polymorphism is L, Derived polymorphism is P
  VARIANT 166: note = Ancestral polymorphism is S, Derived polymorphism is I
  VARIANT 125: note = Ancestral polymorphism is P, Derived polymorphism is A
  VARIANT 120: note = Ancestral polymorphism is Y, Derived polymorphism is H
  VARIANT 103: note = Ancestral polymorphism is A, Derived polymorphism is V
  VARIANT 96: note = Ancestral polymorphism is G, Derived polymorphism is R
  VARIANT 90: note = Ancestral polymorphism is T, Derived polymorphism is I
  VARIANT 72: note = Ancestral polymorphism is S, Derived polymorphism is L
  VARIANT 14: note = Ancestral polymorphism is G, Derived polymorphism is D
MGQQSLIYAFVARGTVVLAEYTEFTGNFTTIASQCLMKLPASNNKFTYNCDGHTFNYLVEDGFTYCVVAVESVGQQIPIAFMDRVKEDFTKRYGGGKAATAAANSLNREFRLKLKEHMQYCVDHPEEVSKLAKVKAQVSEVKGVMMENIEKACFMDWSLIVERRSSCLLTRLRICAHRFSCIPLSCSVAQDFRQQGTNVRRKMWLQNMKIKLIVLGIIIALILIIILSVCHGFKCH

SEQ ID NO: 13545 - protein, 217 aa, Zea mays
  VARIANT 39: note = Ancestral polymorphism is D, Derived polymorphism is N
MAGGGDKVDYVFKVVLIGDSAVGKSQILARFARNEFSLDSKATIGVEFQTRTLVIEHKSVKAQIWDTAGQERYRAVTSAYYRGALGALLVYDITKRQSFDHIPRWLEELRGHADKNIVIMLVGNKSDLEDERAVSTEDAKEFAEKENLFFLETSALQATNVENAFQTVLTEIFKIHSKKNMAADPRANGAAPSLAGKKVIVPGPAQEIPKSKCCSSM

SEQ ID NO: 13546 - protein, 656 aa, Zea mays
  VARIANT 329..656: note = Derived polymorphism lacks residues 329 to 656
  VARIANT 438..656: note = Derived polymorphism lacks residues 438 to 656
  VARIANT 441..656: note = Derived polymorphism lacks residues 441 to 656
MCPAAATTSSAKPSKKRKQPVIAPPESDSEEESVYDTASDDDEEEEETQELESEDVDEEVEEGSEGGEENEIGDDSEVEEEEVKEKKEKEETVKEKKEKKDMKQEGKKAKKQEEKKAKKDKKEEEKKVMEDKKEEEKKAKKKSEGSGILSNKLFSELPLSELTAKAIREMNYTHLTQIQARSIPHLLEGNDVMGAAKTGSGKTLAFLIPAIEMLYHTHFSPRNGTGAIVVCPTRELAIQTHNVAKELMKYHSQTLGYVIGGNNRRSEADQLAKGINLLVATPGRLLDHLQNTKSFIYRRLKCLVIDEADRILEQNFEEDMKQIFKRLPQNRQTVLFSATQTPEVEKFAKLSFEKNEESKKKPVYVGVDDDKSKATVEGLQQGYCVISSDKRFLVLYAFLRKKRNKKIMVFFSSCNSVKFHAELLNFLGIECSDIHGKQKQQKRTTTFFSFCKAEKGILLCTNVAARGLDIPDVDYILQYDPPDEPKDYIHRVGRTARGEKGKGSALLFLLPEELKFLIYLKAAKVTLTEYEFNQKNVPNLQSQLLTRADEQENIVGENYFLNQSAKEAYRSYVLAYDSHSMKDIFNVHQLDLQKVAASFGFKNPPKVNLDLDSSAAKHRKKMRRVDGGKRHGISASNPYGRKDKGGAGDKRQLARF

SEQ ID NO: 13547 - protein, 363 aa, Zea mays
  VARIANT 67: note = Ancestral polymorphism is K, Derived polymorphism is T
  VARIANT 255: note = Ancestral polymorphism is D, Derived polymorphism is Y
  VARIANT 272..363: note = Derived polymorphism lacks residues 272 to 363
  VARIANT 275: note = Ancestral polymorphism is T, Derived polymorphism is M
  VARIANT 336: note = Ancestral polymorphism is T, Derived polymorphism is A
  VARIANT 338: note = Ancestral polymorphism is R, Derived polymorphism is S
MAAILARAGVIATAGKGFSGRRRGNGIVVAAVTKTGAAVPQEGALERPAWSGETTLSRLVGALIAFKPLYAVLKLASREVIIRTAEKSNIPWREMTKEVLESDVYEVFERIQDPNLVYPDYYLNPFHAYDEGNLSWLAAAEAEPATMSIAKRAIPEATSIEEANQIVRGNWLNVIEEHHLKYSGNCQVNDILDIGCSVGVSTRYLAEKFPSAQAVGLDLSPYFLAVAAQKEEKLSRPKPIRWVHANGEATGLSSDSFDLVSLAYVCHECPARAITGLVKEAFRVLRPGGTIALTDNSVGISFVWLFPRELSPVLFTLMKSTEPFLDEYYMLDLEETMRKVGFVNVCSVLTDPRHRTVTATVPY

SEQ ID NO: 13548 - protein, 329 aa, Zea mays
  VARIANT 298: note = Ancestral polymorphism is R, Derived polymorphism is L
  VARIANT 184..329: note = Derived polymorphism lacks residues 184 to 329
  VARIANT 151..329: note = Derived polymorphism lacks residues 151 to 329
  VARIANT 97..329: note = Derived polymorphism lacks residues 97 to 329
  VARIANT 21: note = Ancestral polymorphism is Y, Derived polymorphism is N
  VARIANT 11: note = Ancestral polymorphism is R, Derived polymorphism is Q
MELFARAKVVRLRSHHDKFLYADEDEVRVTQDRDGSSANARWTVEAAPHSAGAVRLRSRYGRYLTASGEPFLLGMTGRKVRQTAPAAPRPANASVDWEPLRDGFQARLRTKAGHFLRANGGLPPWRNSVTHDVPHRTATQDWVLWDVEVVQLLTPAPRPERTGSAPVAKLPDSPPAPDLGKPPQAHGPHHRPSKSYATPPPTLEPVAPPPPPPPPSRLNKLESSLSFSAPLHKVEGRAIHYHIADDLGNVDEGTVGHSFTFNGSNLEELAHKLQEETGLEDIIICTRSPINGKLTPLRLQLPPNNAAMHIVLVQESSKVAKSFPWPYGS

SEQ ID NO: 13549 - protein, 924 aa, Zea mays
  VARIANT 6..924: note = Derived polymorphism lacks residues 6 to 924
MGKRKQRGGGDGEPAAEGGAGGGHSPSTVFVSNLPYTFKSSDLEAVFSEVGPVRRCFMVAEKGSEKSRGFGFVQFATVQDADRALQQKNGSPVAGRKIRVKLAMNRAPLKERLQKGNMQVKDSDAKDEADEISPAEKHKGKSHKTDPEQLHLLSNDAKVSKEAPIGDSEKVKNSEKQRVAKTVIFGGLQDSAMATEVFRQAREIGSVVSVNYPLPKEEMRFNGLARDGCTSDMAAVLFASVKSAWDSVVQLHNKEVKGATVWARQLGGEGSKIRKWRAIVRNLPFKITEKEIVDMFSSAGFVWDVTIPHKSDEGISKGFAFVSFTRKQDAENAIKNINGKDVAKRPVAVDWAVPKKVYTVAAKVDAKDNEPENIPDNVSDDDTSDDNLVGEASFELDQETSNRPSEDDFETEADISKKVLENLIKSSEKSEPSGIEGSDIGTDTETEDDTSEKEKSDSPVADKLVKSKRVTDAEISNPASKPKKNDTGLDRTIFISNLPFDISNEEVTARFSVFGKVESFFPVLHKLTKRPRGTGFMKFSTTEAADAAISAASVAPGLGISLKSRPLNVMKAMDKESAHKKALEKAKTEVEDRRNLYLAKANSPALEGEILAGIPAAEGVSDADMNKRNWLARRKAEMLQSPKFHVSRTRLIIYNLPKTMTINDVKKLCREAVISRATKQNPVIRKVNILKNEKKGIQKHSRGVAFVDFQEHEHALVALRVLNNNPETFGSERRPIVEFALEDVEKVRLQKIRMERHRKSAAETAEVQQTPSGDQPASEGRNADNSRTFRKGNKRKSHSLPSKPSDSVEGLAKDPLVPGVRNAKAAKRARKSNVGTILPDRGLTAATPNTAQNQVASSELDQAAAPKKRKNRKDGQAEQKRGKVTKRTRKEPSGEGGVDKSLVEQYRFKFLQHGVSKTKTKTKG

SEQ ID NO: 13550 - protein, 510 aa, Zea mays
  VARIANT 5: note = Ancestral polymorphism is S, Derived polymorphism is R
MFLESFRVESPRVKYGDGEIQSEYRYDTTEVVPPGNGGGAGWVVRPKSVTYNFKTSTNVPKLGVMLVGWGGNNGTTLTAGVIANREGISWETKEKVHKANYFGSLTQASTIRVGSHNGEEVYAPFKSLVPMVDPNSIVFGGWDISKLNMADAMARAKVLDFHLQKQLRPYMESMLPLPGIFNPDFVAANQGARADNVIKGTKKEQVEQIKKDIKEFKEKNKVDKVVVLWTANTERYSNVVAGLNDTMDKLLASLDKNEAEISPSTLYAIACVLEGVPFVNGSPQNTFVPGLMELAIKKNSVIGGDDFKSGQTKMKSVLVDFLVGAGIKPTSIASYNHLGNNDGMNLSAPQVFRSKEISKSSVVDDMVASNPILYKPGEHPDHVIVIKYIPYVGDSKRAMDEYTSEIFMGGKNTIALHNTCEDSLLAAPIILDLVLLAELSTRIQLKAEGQDKFHSFHPVATILSYLSKAPLVPPGTPVVNALAKQRAMLENILRACIGLAPENNMMLEHK

SEQ ID NO: 13551 - protein, 824 aa, Zea mays
  VARIANT 317: note = Ancestral polymorphism is A, Derived polymorphism is V
  VARIANT 314: note = Ancestral polymorphism is S, Derived polymorphism is C
  VARIANT 313..824: note = Derived polymorphism lacks residues 313 to 824
MAAASTSVRVLPDGGADDEERWLAEGIAGVQQNAFYMHRALDSNNLKDALKYSAQMLSELRTSRLSPHKYYELYMRAFDEMKKLEMFFREETRRGSCSVVDLYELVQHAGNVLPRLYLLCTVGSVYIKSKEAPAKDVLKDLVEMCRGIQHPLRGLFLRSYLSQISRDKLPDIGSEYEGDVENINDAVEFVLQNFIEMNKLWVRMQHQGPAREKEKRGKERNELRDLVGKNLHVLGQIDGVDLDMYKETVLPRILEQVVNCKDDLAQFYLMDCIIQVFPDEYHLQTLETLLSAFPQLQPSVDIKTVLSQLMDRLSNYAASSPELLPEFLQVEAFAKFSNAIGKVIEAQPDMPVVGAITLYVSLLTFTLRVHPDRLDYVDQVLGACVKKLSGKAKLEDSRATKQIVALLSAPLEKYSNIVTALELSNYPRVMDYLDNATTKVMAVVIIQSIMKNTTCISTSDKIEALFDLIKGLIKDMDGAQDDELDEEDFKEEQNSVARLIHMLHNDDPEEMLKILCTVQKHILQGGPKRLTFTVPSLVFSSLKLVRRLQGQDGDVTGEDVPATPKKIFQILHQVFIIILHASNFGYSIITDAYTTIEALSCVPSPELALRLYLQCAEAANDCDLEPVAYEFFTQAFILYEEEITDSKAQITAIHLIIGTLQRMNIFGVENRDTLTHKTTGYSAKLLKKPDQCRAVYACSHLFWTDDQDGIMDGERVLLCLKRALRIANAAQQMASATRGSSGSVTLFIEILNKYLYFFEKGIPQITNTVIQDLIELIRTEKQSDNSVADPSTEAFFSSTLRYIEFQKQKGGTIGEKYEQIKTSS

SEQ ID NO: 13552 - protein, 941 aa, Zea mays
  VARIANT 552: note = Ancestral polymorphism is G, Derived polymorphism is E
MYADVVARRIENLANMCDERARMLQDQFNVSMNHVHALAILVSSFHHGKDPSAIDQKTFEDFTARTTFERPLMSGVAYALKVLHNERQQFEEQHGWKIKKMEDGDQSLVHDYNLEKLEPSPVQDEYAPVIFSQETVKHIISVDMMSGKEDHDNILRSWSTGKGALTSPFKLLKSNHLGVVLTFTVYKYDLPPNATPQERIHATLGYLGASFDVPSLVDKLLEQLASKRKIVVNLYDTTNHTSPIEMYGSDFTPSGDLHISSIDFGDPTRKHEMHCRFKHEPSLPWSAIIISTAVAIIVLLVGHIIYATLNSLEKAEHDYRVMRELKGQAEAADIAKSQFLATVSHEIRTPMNGVLGMLQMLMDTELDTTQQDFVVTAQESGKVLINLINEVLDLAKIESGRIELEAVPFDVRDILDNVISLFYDKSQAKGIELAVLVSDQVPDVLIGDPWRFRQIITNLVGNSMKFTEQGHIFVQVHLVKELNRKGNNFCDVSAHNREILYDSDNSMLWNTLSGLEVADSWRSLENFTMFKNSNGETDTIRLAVRVEDTGIGITKDAQMRIFTPFMQADSSTSRTYGGTGIGLSITKRLVELMGGEIGFTSKSGVGSTFSFTAIFKENRGCPGDMKRYYSEPTPLDFQGMRALIIDGRSARAEVTMYHLRRLGIQCSLVATSESESASSALMKACTSSSKNNPDMVLVDTEAWGKGSGLAFYHRFVDCQLKGAHKFSQPMPKTILLGSSISPVESDYLRLTGFGDCIRKPLRLSTIVACLRKTLGVGVTRQQSRDQSLVLQSVLTGKQILVVDDNAVNRKVAAGSLKKYGSKVTCVDSGSDAIDMLKPPHTFDACFMDVQMPEMDGFEATRLIRSIEKKINDMIMMGEISANNYGNKAHWHVPILAMTADVIQATFEKCMQCGMDGYVSKPFEEQQLYFAVAHFLETDETE

SEQ ID NO: 13553 - protein, 619 aa, Zea mays
  VARIANT 477: note = Ancestral polymorphism is K, Derived polymorphism is N
  VARIANT 386..619: note = Derived polymorphism lacks residues 386 to 619
  VARIANT 375: note = Ancestral polymorphism is T, Derived polymorphism is I
  VARIANT 362..619: note = Derived polymorphism lacks residues 362 to 619
MRRSSHAMGAQAFRLLLLLLLAAAAAEARFVVEKNSLMVTSPTSLRGRHDSAIGNFGIPQYGGSMAGAVVYPKDNAKACDDFDGRHPFRAKPGAMPTFLLIDRGECLFAKKVWNAQNAGASAVLVVDDKDEPLITMDLPREDDEASKYIQNITIPSALIDEKFGDQLKKAVKDGEMVNVNLDWREAVPHPDDRVEYELWTNSNDECGPKCDMLMNFLKEFKGAAQLLEKGGYSQFTPHYITWYCPQAFVISKQCKSQCINHGRYCAPDPEQDFSTGYEGKDVVVENLRQLCVFKVANENKKPWVWWDYVTDFHIRCPMKEKKYNKKCAETVIKSLGLDVKKVDKCMGDPNADSDHPLLKMEQDAQIGKGSRGDVTILPTLVVNNRQYRGKLERKAVLKAICAGFEETTEPNVCLSDDIETNECLNDNGGCWQDKSANVTACRVCVDRTPSVVECVNAPLSMAYNLKAMATAIVNVIKRFIIVIYVIAAAGPGKCLINHGGCWHETRNGKTFSACQESGDGKCLCPAGFRGDGVKKCEDIDECKEKKACQCPECNCKDTWGGYDCTCSGDLLYIREHDTCISKTAVQAKAAWAAVWGILIVVAVVAAGSYVVYKYRLRVS

SEQ ID NO: 13554 - protein, 618 aa, Zea mays
  VARIANT 386..618: note = Derived polymorphism lacks residues 386 to 618
  VARIANT 375: note = Ancestral polymorphism is T, Derived polymorphism is I
  VARIANT 362..618: note = Derived polymorphism lacks residues 362 to 618
MRRSSHAMGAQAFRLLLLLLLAAAAAEARFVVEKNSLMVTSPTSLRGRHDSAIGNFGIPQYGGSMAGAVVYPKDNAKACDDFDGRHPFRAKPGAMPTFLLIDRGECLFAKKVWNAQNAGASAVLVVDDKDEPLITMDLPREDDEASKYIQNITIPSALIDEKFGDQLKKAVKDGEMVNVNLDWREAVPHPDDRVEYELWTNSNDECGPKCDMLMNFLKEFKGAAQLLEKGGYSQFTPHYITWYCPQAFVISKQCKSQCINHGRYCAPDPEQDFSTGYEGKDVVVENLRQLCVFKVANENKKPWVWWDYVTDFHIRCPMKEKKYNKKCAETVIKSLGLDVKKVDKCMGDPNADSDHPLLKMEQDAQIGKGSRGDVTILPTLVVNNRQYRGKLERKAVLKAICAGFEETTEPNVCLSDDIETNECLNDNGGCWQDKSANVTACRDTFRGRVCECPTFNGVQFKGDGYSNCEPAGPGKCLINHGGCWHETRNGKTFSACQESGDGKCLCPAGFRGDGVKKCEDIDECKEKKACQCPECNCKDTWGGYDCTCSGDLLYIREHDTCISKTAVQAKAAWAAVWGILIVVAVVAAGSYVVYKYRLRTYPDSLICMKNHMYDQLDL

SEQ ID NO: 13555 - protein, 328 aa, Zea mays
  VARIANT 183: note = Ancestral polymorphism is K, Derived polymorphism is E
  VARIANT 190..328: note = Derived polymorphism lacks residues 190 to 328
  VARIANT 195..328: note = Derived polymorphism lacks residues 195 to 328
MNYAAAATNAPAAAPAAAPASGTEHAHYPYYAGYSYPYGAYHQPAPPTYSSAVAAASSSYYYPVPAAASSTAAQYDPYSGYQHYSHPEGGGSAGAGLVGCYSTVGEALQQAAVASTTQAALEATTKEAGKQFGFDPQSYAQAAVARASNGITQPAAAPGLHHAQWNAHFGYPVPKYVLRKQMKKKPKTVQPAPCEVCKIQCDTLEVLLIHKQGKKHKKNLEKLQDSITRKPIIKPPSNVIGPSMPPVAVSNCVVPSVQPKKKSSSAATREDLEVKKRRVLEAGAAQGEVKICQVCNVVVNSQKVYEFHIAGQKHQALVRKQQPLRFVT

SEQ ID NO: 13556 - protein, 151 aa, Zea mays
  VARIANT 16: note = Ancestral polymorphism is N, Derived polymorphism is T
  VARIANT 36: note = Ancestral polymorphism is D, Derived polymorphism is E
  VARIANT 49: note = Ancestral polymorphism is S, Derived polymorphism is Y
  VARIANT 51: note = Ancestral polymorphism is P, Derived polymorphism is S
  VARIANT 58: note = Ancestral polymorphism is V, Derived polymorphism is L
  VARIANT 61: note = Ancestral polymorphism is T, Derived polymorphism is K
  VARIANT 73: note = Ancestral polymorphism is A, Derived polymorphism is T
  VARIANT 76: note = Ancestral polymorphism is R, Derived polymorphism is K
  VARIANT 77: note = Ancestral polymorphism is C, Derived polymorphism is Y
  VARIANT 78: note = Ancestral polymorphism is S, Derived polymorphism is N
  VARIANT 79: note = Ancestral polymorphism is V, Derived polymorphism is M
  VARIANT 84: note = Ancestral polymorphism is V, Derived polymorphism is M
  VARIANT 89..151: note = Derived polymorphism lacks residues 89 to 151
  VARIANT 112..151: note = Derived polymorphism lacks residues 112 to 151
  VARIANT 121..151: note = Derived polymorphism lacks residues 121 to 151
MLATSTMLCCPSFVINPLQFHYWWMVLFIGKVEMEDSKTLTSEPCHHQSIPPNPSVHVRCTDMRLLVNPHDEAYYRCSVLKYVMRYYKQNADETWVDISLNSLLPGSVLNCQRQLSGCLIQEKPNGYSNVCCLSMIEIFSFHTFSVQYLMV

SEQ ID NO: 13557 - protein, 371 aa, Zea mays
  VARIANT 29: note = Ancestral polymorphism is V, Derived polymorphism is M
MELPRPMGVLLLVFFVLCRVGDAATFMFVNRCTDTVWPGVLSNAGSPRLEPTGFELPPGAARAVPAPAGWSGRMWARTGCSQDGATGRLVCATGDCGSGSAECAGAGAAPPATLAEFTLDGSGGLDFYDVSLVDGYNLPVLVETSGGAGSSGPASCAAAGCAADLNAMCPAELRAGGGAACRSACDAFARPEYCCSGAFATPAACRPTAYSQVFKSACPRSYSYAFDDPTSTFTCGGGPDYTVTFCPGATPSQKSTTTPGATPATVPGTMTTTVPEATPMPGATPAMPTGTMMPPGATFTDATPDSAMMPMGGLGIEGGGQGSVLLGGSSSEGSVSWLANMATGDAAVPLVASARLLVAPLATLLCGLHLL

SEQ ID NO: 13558 - protein, 845 aa, Zea mays
  VARIANT 169: note = Ancestral polymorphism is D, Derived polymorphism is Y
  VARIANT 496..845: note = Derived polymorphism lacks residues 496 to 845
MRLLAAAARQSNTPQRILVTLHHFISTATTTTSSSAYDPTAQFIHPDQHRLLPLPASLRRHAVLALADLLKTSLQCHLALHAVSPLSGSPYSTPFASRFAAAAHLATSDPALRPFAAILIAALLPVASSDLLLWSSSDSASGSARAHYCALRLALHAFLAAGMAAEALDVLARVRRSGNTPSLSALSALLRLLFRSGEVRAAWNVFEEMTAEGPRPSLATFNAMLLGFCHRGMVRVASGLLGIMGKSGIAPDVCSYNILIKGHCVFGWSRDAFKMFEGMHRSGCEPTVVTYNILVDVLCHEGRMPEARRLFDEMAQVGIQVNTITFNVLIDGYAKSGQMDQASAAYREMQARGLVPDSCTFNIIAARAHKFGYAAQLVHDHDMFSSHMSADGLDMLVCRLCWDHRLDDAWELLLGAIEQGVPLRVTGFNALIAAYSKEGLHEEASELYRIMNKLGLAPSSSTFNYLIMGLCNQGRLDEAQLLLEHMVSKGYCLSTSFTICLDAYFRDGNAVGALKCWDDMGNIGLQTDFIAFSAYINGLCRLDCVNEAYQAFAEMTSRGIVPNNITYNSIISALCKAGNMTEALKLVQNMRQSGLVPDIYTSNILIDGLCREGKLKMVDNLLLDMCSNGLTPDTVTYNTIINAYCRAQDMNSAMNFMNKMLVAGCEPDIFTYNIWMHSLCRNHMLNQAGKLLDELVAVDCSPNSVTYNTLMDGICSDVLDRAMILTGRLIKMAFKPNTITLNVFLSHFCKQGFGNRALMWAEKLREDSFVFDGATRNIIDWARREMEDDPKANNEDIGRCMFLEFLMFMTYEAMLNSRSSKATHMLTEKGFDPASSSMIRILDTG

SEQ ID NO: 13559 - protein, 116 aa, Zea mays
  VARIANT 6: note = Ancestral polymorphism is P, Derived polymorphism is S
  VARIANT 56: note = Ancestral polymorphism is P, Derived polymorphism is T
MSQLSPAGHMAATLLLILLASAAAAAVSADQQVSACQNDIDALWRSCKQFVQKEGPKMPPSEDCCKTIKALDAHASCICDYVGSPDARNKLDLDKVFFVTKQCGVTVPKGCGSKQD

SEQ ID NO: 13560 - protein, 327 aa, Zea mays
  VARIANT 160: note = Ancestral polymorphism is A, Derived polymorphism is T
  VARIANT 161: note = Ancestral polymorphism is T, Derived polymorphism is M
  VARIANT 168: note = Ancestral polymorphism is R, Derived polymorphism is Q
  VARIANT 314..327: note = Derived polymorphism lacks residues 314 to 327
MPVAASVLAAAAVSPPLTWRRWTPLLAASHPQANPPPALRPRAPAPPLRASSVPRDSCAGAAVRRTPCAAAAALGGCVKAESTEREALDRDALKRVALLALGCCAAAAALGCGAAAAALGCGAARAAAEDSIKASGFGLRVAESLRRLGWPDDTVVFALATLPVIELRGAIPVGYWLRLHPVRLTILSVLGNMVPVPFIILYLKKLATFLSQNSASATRIMDLLFERARRKAAPVEEFQWLGLMLFVAVPFPGTGAWTGAFIASVLGMPFWSGFTANFVGVVLAGLLVNLLMNLGLKYAIVTGVVLFFVSTVMWSVLRSLKKSVNVK

SEQ ID NO: 13561 - protein, 658 aa, Zea mays
  VARIANT 409: note = Ancestral polymorphism is T, Derived polymorphism is I
MGEGVKEMLAPPIQLADEVAKQCAAARSFRAECAELKARADKLAALLRQAARAPELYDRPAARILAGATQALSRASALAARCARGHPRLRSLFTLSPAAGFPRAVAALDTALEDVAWLLRISSPGATGEGDDDSLLGLPNIAQNEPILFLIWDHVARLHTGSPAARADSAANLASLARDNQHFAKLIIEEDGVPPLLKLLKDGTDESQEAAARALGFLGCDAENVDKLVQAGVCSSFAAALKEPPMRVQAAVAEAIASLADRSSTCQDLFAQNNAVRYLVAHLASGTIQEHSRYSVGSSSSKNSAAAAATAQQHMKSLHSVVLAKTLSMRHSGDCDTSIRGADGLPRMSNGTPGCDQDTKRNPQMQSVVHSAMSAKTNTNGSLVPPFRPQLGTSGSSGRGAREVEDPETKAQLKAMAAKALWKLAHNHLGVCKSITESRALLCFAVLLEKGDGDMGTDVQYFSAMAIMEIARVAEHSLVLRQSAFKPSSPAAKAVVDQLLGVVCRGEYDTLLLPCITGLGCLARTFTASETRIVAPLVQLLDEREPPVIKEAVVALTKFACTENHLHVNHCKAIVDDGGARHLVQLVYLGDEVQIEALILLCYIALYVPESEELAQAGVLAVLLWASKQAQMVQDTRVEALLPDAKGRLELFQSRASR

SEQ ID NO: 13562 - protein, 487 aa, Zea mays
  VARIANT 312: note = Ancestral polymorphism is D, Derived polymorphism is Y
MTKKQRREAGAMRRRDRHHHHRRQPRDERCVSCTTFNILAPIYKRMDNENCRESQYRAYWFSRNEKIIDRLLADHSSIICLQEVWLGNDELVDMYQKRLGDANYMLFKLARTNNRGDVWIMALPNAYGVDICGDCQLVWDLCSLPECLLTAVHRNYFNVLNYRELLFNDIGDRVAQLLHVESAMPFLQNRSTSCVHQQSLIVNTHLLFPHDHSLSIVRLRQVYKILQYIEAYLEEHKLGPLPIILCGSVSSVHRIGMEVNVAKFTSSFARKGLFHRMTLLINTVTAKKMHISHRNHRGNICGVDFIWLLNPDKCRKPLKTSWNEAVFGIIKYFLQVAFLSEENAFALLKADSLYDHITYSSFYQALCQLGMVHPDRLKSEEIEELWSEADRDGDGVINYKEFQCIWSPNCCSQEEEDTEIDITDESLDTFEANNEAFGFTVKEAVLFPPEVEKGMWPENYSLSDHAPLTVVFSPIRMPCSPRNRGEL

SEQ ID NO: 13563 - protein, 396 aa, Zea mays
  VARIANT 60..396: note = Derived polymorphism lacks residues 60 to 396
MEQQQHQEVRRNRKGVLQVQDGSEIRALVENKAEFARFVDDRFRKLDADGDGRLSVKELQPAVADIGAAIGLPARGSSPQADHIYAEVLNEFTRGKQESVGKAEFQRVLSDILLGMAAGLKRDPIVILRINGEDLSEFVESPRYEPEAVAIFSQAVGGPTNTNDATLRQCLLAAVGELTIDHGMPPASDPWVMENVVEPAFQELPASATQQLDLDQPVPSQEAFLQEFRRLLGAITLRLRQHPVIVAHTENNFDGSGVRRLLSNKFEFDKLLDSVWREVPKERKDKQASKEYLRIALDRIADSAGLPPLGAVGQVDAVVNEAFKMAKADDLRAVDEAEFKKLLTEVLGAVMLQLDASPVAVSTNTVVHEPMCTSSSSSALLSPTPLSPMVSSPASE

SEQ ID NO: 13564 - protein, 226 aa, Zea mays
  VARIANT 3: note = Ancestral polymorphism is L, Derived polymorphism is F
  VARIANT 45: note = Ancestral polymorphism is A, Derived polymorphism is D
  VARIANT 69: note = Ancestral polymorphism is D, Derived polymorphism is N
MVLGLYTFADIDADGAPRLEVADGEEFVRVDRVVELALGPRVLKAPGTLYLTTRRVIWVSDGGEGYAVDFVAISLHAVSRDPEAYPYPCIYTQIGVMHVKIETEAISDEESDVSDSETNGELELSKVMEMRIIPSDPGQLDELFEAFCNCAELNPDPSAESDEEHGWVHGDEGYEDTVDGSDTEFSDVNPIGQTGEQDINHAVIELQINDQRFEDAVDEESHRNGN

SEQ ID NO: 13565 - protein, 501 aa, Zea mays
  VARIANT 238: note = Ancestral polymorphism is I, Derived polymorphism is T
  VARIANT 223: note = Ancestral polymorphism is F, Derived polymorphism is V
MESAIAAVAGELVSRFISFALNRCCSSSYERSEEKRERLRHLLMRSHTVVEEADARHITNSGMLTQLKVLSEAMYQGYHALDALRFQLDDEVSDDDSPACSSSATRRLKRRRAVLAPAAKGEGKAQAALENLETAMANSAEFVALLCGCERLSRRPYDAYLYLGSIMFGRHAEKQRLLNFLLQQQPGDDGAPPPVLPIVGALAAGKKTLVAHVCADDRVRSKFASVLHLRGDDFLLNTVHHEKAMLLGVSSLVVVELVSDVGDEEWDAFYSFVARAASAGSKVIVIAKHARSVARFGGSARPPIFLGALSYEEFWYLFKNLAFQAADPGEHPRLVHIAEGFAKELHQGGSLVAANALADVLRRNLNAQVWLSILNRCRRVVEKNLCAYGQQPKLLLEQGREVDITEFVVPSPAGIGHLRMIPCTSRGSSKAYSRVVNDLPKVAFGELLLDPSVRPKGEFSLLTWKSRLPPYTSFINFVPDCTADMPQGHSLSGRKRQAVPF

SEQ ID NO: 13566 - protein, 482 aa, Zea mays
  VARIANT 142: note = Ancestral polymorphism is T, Derived polymorphism is M
  VARIANT 221: note = Ancestral polymorphism is S, Derived polymorphism is C
MEVALSAISGEILSRLISFVIKKHTDRSCVEDKLERLQHLLLRLHTVVEEAEGRYITNSKMLLQLRMLVDGMHEGYHVLSTIRFKPVEEDTSSHSQVTQPPALSSPLKRTRAAASSFRTAITSNHELQASLKKLETIVANMTEFVILLGGCKQMHRRPYDTYIYIDNFMFSRLVEKQELINALLQDDSPVGAPAVVPVTGAYRAGKKSLVGYVCNDNMVRSHFSSVLHLKSNSFLKVSRKMFMPVRTLVVVEFISDVGDSEWVKFYSDASPQMGAGSKVVIVSRFQEIARFGTVKPVVLRSLSQAEFSYLFKALAFGGTDPENHPQLSSIAMELAMNVNGLLLVANTLADLLRKNQSVRFWFHMLKRFRQSVERNFSRFGEHPKQLVERDHPTDITMLVQPSSAVLRLMPPHGDARLCMEQLPKVKFADLVQGSATVQPDEEFQITMWESRLPPFTKFVASCVAEEHPCTSSDNKRHKSCKQ

SEQ ID NO: 13567 - protein, 432 aa, Zea mays
  VARIANT 44: note = Ancestral polymorphism is Q, Derived polymorphism is R
MGEAAMAMAGCSSPTTLRSSRLTTSISTSRLHKCMAYSVDQVEQSLLITGFGYEHDDARMTNINLFKEFTALSRATILTTKEARTIAEMMLNHLCMQSIKKETRHMLMKHLKSCVQSMADYHCPQILTGVGKSSLVHLLLKDSAVARPAQTIGCAVGVKHITYSSPGSSSNSVKGDAERNFFVELWDVSGHERYKECRSLFYSQINGVIFVYDLSQRKTKTNLNKWAVEVSESGTFSAPLGSGGPGGLPVPYLVIANKVDIAPRDGRRVSSGNLVDVARQWVEKQGLLPSSEVLPLADNFPGNSGLLTAAKEARYDKEALIKFFRMLIRRRYFSNELPAPSPWSLTPREDTILPVETVNDDDMFQRKSYGGQSYKYNGVTPLPAQRNLTPPPTLYPQQPMSSSSENYRYHRFSSSSIPDSSGGSKSRANLNI

SEQ ID NO: 13568 - protein, 168 aa, Zea mays
  VARIANT 50: note = Ancestral polymorphism is Y, Derived polymorphism is H
  VARIANT 79: note = Ancestral polymorphism is A, Derived polymorphism is G
MDAPGGEALGGVIGVARHMIQTEGFFSLYKGLVPSLISMASSGVVFYGVYGILKMAYLHSPEGKKMVSMMKQQKQETNALDQLELGTVRTLLYGAIAGCCAEAATYTFEVVLRQLQMQVKATRMNALATCLKIVDQGGVPALYAGLIPSLLQVCILSAENLLPHICQW

SEQ ID NO: 13569 - protein, 47 aa, Zea mays
  VARIANT 1: note = Ancestral polymorphism is M, Derived polymorphism is I
  VARIANT 42..47: note = Derived polymorphism lacks residues 42 to 47
MVRQQFKKNMHETDPEKIQKMKDDAARGLINHILYESEKITGRKFSG

SEQ ID NO: 13570 - protein, 283 aa, Zea mays
  VARIANT 201: note = Ancestral polymorphism is W, Derived polymorphism is L
MLASSLNPARSPWKGPPPPPRIRVPAILHLGSASASTLPARSPWKGPPPVDLAPTALVLYTGEKFPSKYLGQTSSPRISLAIHGSGPAPDSARVKGQYSAWAALSAALVAYRCLSGSPKNRLDMSAVVQALEPLLDLDDDVPMAPLGHADPVVLFVAAAAEENKERAPRKDVLGHRRRPMSPKASPRKHPSAGTKDEFWVWHLPADQKTRLSLGDVVQAFCCYDEMRCRVSPPSVSGSCGSSSADPYGVPEFRWRGIRRYKQFRSVDTNMSTGDDSALGQRLK

SEQ ID NO: 13571 - protein, 526 aa, Zea mays
  VARIANT 6: note = Ancestral polymorphism is P, Derived polymorphism is R
MELTWRLLAALVLPLSFLLLYHAKNGGKASRRLPPGPAAVPVIGNLFWVRLQGIEILHAIRRFHARHGPLLTLRIGSHLEVTVSDRRLAHLALVERGAALADRPASASRDLLGLNASTISTSSYGPLWRMFRRNFVAEVANPARLRLFAPARAAVLAELTDKLRHQQEADGTIVQTFQYAMFRLLVAMCFGERLDERAVRDIAAAQRDLLLYSSTKMRVFAFLPAVTRLLFRGRLQAMVAMRQRLKDMYMPLIDARRERKNKNPGVGAAADRDAVEDEATQTTLPHSYVDALLDIRLNEDDGRELTDDEMIALCSEFLNGGTDTTSTALQWIMAELVKNPGIQDKLHDEIKATMATSGGSDGHVSEEDVHRMPYLKAVVLEGLRRHPPGHMVLPHAPAEDMELGGYMIPKGTMVNFLVVDMGMDQRAWERPTEFAPERFLPGGDGESVDITGTREIRMMPFGAGRRICPGLNVATLHLEFFVANLVREFEWRQLEGETVDVEGEKAEFTVVMAKPLRARLVPRASD

SEQ ID NO: 13572 - protein, 322 aa, Zea mays
  VARIANT 183..322: note = Derived polymorphism lacks residues 183 to 322
  VARIANT 14: note = Ancestral polymorphism is A, Derived polymorphism is V
MSATAESGGDLSAARRRWDLTNKGAESTPILKDAVEISTDEESDGVVTCHPNGNTDGCEETISGSHDDDSPEGQETSSIKEPDVEGDTQEDKRVNQDSLKLIDEESAPPKSPAKSATASSRSERPKRVVPRPFSLSNQRSLFGVNGGVANPLANKDKSGDKSSISPASMTKKSTQMALRKTLQPEKFYTKLEEKHKALEAEKDEAEARKKDEQDVALKQLRKSLVIRAKPMPSFYQEGPPPKAELKKVPPTRAKSPKFTSSRRRSCSDTPLTPGGENTNATSTRPHRHSIGSPRDANRVQQCSPKSGVATKTRSVKAELKAL

SEQ ID NO: 13573 - protein, 568 aa, Zea mays
  VARIANT 197..568: note = Ancestral polymorphism lacks residues 197 to 568
MGSADLVLKMACEGCGNTSDLYGTGCKHTTLCSDCGKSMARSRARCLVCSAPITRLIREYNVRANSVMDKTYSIGRFVTGLPPFSKKKNAENKWSLHKEGLQGRQIAENMREKYNKKPWILEDETGQYQYQGQMEGSQSATATYYLLMRHGKEFNAYPAGSCCHTLVWYKIKQHETTEVLSVTNYLNHLHILYKVQCYWFNFSKIAQYKQLTLEEAEEKMNKRKTSATGYERWMMKAAANGPAAFGSDMKKLEATNGGEKESARPKKGKNNEEGNNSDKGEEDEEEEATRKNRLGLTKKGMDDDEEGGKDLDFDLDDEIEKGDDWEHEETFTDDDEAVDIDPEERADLAPEIPAPPEIKQDDEENEEEGGLSKSGKELKKLLGRAAGLNESDADEDEEDEDQEDDSSPVLAPKQKDQVKDEPVDSSPSKPAPSGHARGTPPASKSKQKRKSGVDDAKTSSGAASKKAKVELDAKASGLKEEASSLAKPASKTSAASKSGTSVSPVTEDEIRSVLLAVAPVTTQDLVSRFKSRLRGAEDKNAFAEILKKISKIQKTNGHNYVVLRDDKK

SEQ ID NO: 13574 - protein, 498 aa, Zea mays
  VARIANT 371..498: note = Derived polymorphism lacks residues 371 to 498
  VARIANT 339..498: note = Derived polymorphism lacks residues 339 to 498
  VARIANT 249..498: note = Derived polymorphism lacks residues 249 to 498
  VARIANT 68..498: note = Derived polymorphism lacks residues 68 to 498
MNASRKSSHLSSKDSAETARDIITTSGQIQPLKIPDAIAALAQAAAKANGETEKYLPGWSLFSPPKVQLNKCTKCSREFYSAINFRRHTRVHRVVIEGVTGSSILTALSSWMCKPGYASLPVAYARAGSELLDLIQAKPSMHLPVSSDELFSLLDEASEKTFLCTNIVACIQKFLFDGEVEKNATELKNVVSCASYMLEQKLLEAWCADKTAEALRCQKLLEDEEEAAQKRQAELMKRKRMKKLRQKEQRLKNLKDEDVSVQSPDIMDDATCSTAIQSVNSIYDPDCFEQEESQYLQFPALITLETNNDFNVDLPVEDISCDLGPKMDKGVVLRQQVVSRHHLGRTEKLAESSILYGSVVTSKHVASARPSNYKDPNVCSAPSRNKTCELKLWSEIEEQCQKHELDVDECGMGPSKNSRVLIGSIIVAIEDGSEHLLDLGSKNDPVPPSSKTKKHASVKVVQQVTSEGNRNEGVPDSDNRSSLSVTTDEINTYIQQIR

SEQ ID NO: 13575 - protein, 197 aa, Zea mays
  VARIANT 170..197: note = Derived polymorphism lacks residues 170 to 197
  VARIANT 158..197: note = Derived polymorphism lacks residues 158 to 197
MYMKCQMVQKGVMKDHDISLSSCHPPPPPPPPRHDSAGPLNLDVNDKMITGDQLAIGKETTRRLGMGTKCKDESLASLPIDELTEKADGFARVFPEHMYEKHLCGMTWDGVNDAPTLKKADIGIAIADSTDAARGASDIVLNEPGLSNATLIVVYANWAFAAIKGIGWGWAGVKWLYIIVFYFLLRIINFLILLYAE

SEQ ID NO: 13576 - protein, 176 aa, Zea mays
  VARIANT 71: note = Ancestral polymorphism is A, Derived polymorphism is V
  VARIANT 130: note = Ancestral polymorphism is C, Derived polymorphism is Y
MGSVQLLQNSPGSPRSRPLQCQTPWWRVRCCEAPEAERRGIPGPDMVPYQLLGSPRSSSSSNNKTIKCFFAEAHYKPTSISSPSSSSSSLAITAVPIVEICIIIEEPLSQYRRSCVFCPNYRDILHPKGCHKFACGNDKDRFEQRLDPCCCTGMGIGKMPFTARPDMSAFLNISPK

SEQ ID NO: 13577 - protein, 343 aa, Zea mays
  VARIANT 27: note = Ancestral polymorphism is L, Derived polymorphism is F
  VARIANT 57: note = Ancestral polymorphism is G, Derived polymorphism is E
  VARIANT 139: note = Ancestral polymorphism is S, Derived polymorphism is L
  VARIANT 218: note = Ancestral polymorphism is R, Derived polymorphism is C
MASLLQKSVDAVEWDAEDISGRLGLVLHAAFLFAGFQPYGRQPRSGYLLKKQSRKRGGSACLSRLYTAPELAQREGADAAVLMLCVQGSNVALLVFITTDGDDTPEDVYLEHLDLEIVRPLLSRSLGGVEPWASRICKSLANGVCWCFLDKLCRRNGLALSGFSSLHDDLKAVVLAKLTDGKDLARVECVSSQLRLLVAERDHELWRTLYKALPAGRRRGWWWSLRWFLPNAESSDDETLDVASTWKDKYVEAMRRPYPYRMSFRSRSWYFDPVDWRRDLLSQPLGYWFVQDPPEEDEEKTNPPRVDRSGGGHRRKLARNDFKKWHGGGAIHSPSSRYRWKHR

SEQ ID NO: 13578 - protein, 341 aa, Zea mays
  VARIANT 91: note = Ancestral polymorphism is V, Derived polymorphism is A
  VARIANT 97: note = Ancestral polymorphism is V, Derived polymorphism is A
  VARIANT 175: note = Ancestral polymorphism is A, Derived polymorphism is V
  VARIANT 231: note = Ancestral polymorphism is S, Derived polymorphism is F
MASLLKKFVDAVQWNAEDVAGRLGIVLHAAFLFAGFQPYGRQPRSGHLRKEQSRKTGGSACLCRMYTAPDLAQREGADAAVLLLCVQGNDVALLVFATSDGDGNDTPENAYLERLDLKIVRPLLSRSLGGVEPWASRICKSLADGLCWCFLDKLCRRNGLALSGFSSLHDDLRAVVLEKLTDGKDLARVECVSSQLRLLVAERGQELWRTLYKALPSWQCLPSRYRYLPKSESPDAEAETLNIASIWKHKYAQARRRPDPTFRNLLWHFDFDDDYIQLFCHVRPSIGYCFVQDPSEEKRIPPRVDRSGGGHRRRLPRDDRKEWHGGGAIHSPSSRYRWKHR

SEQ ID NO: 13579 - protein, 260 aa, Zea mays
  VARIANT 47: note = Ancestral polymorphism is T, Derived polymorphism is R
MRPVLSCRAGAHEGMLGWNLDWPTGSFSVRQRKATVVLMLGLGPLTTSLTSDPELLHPAPPEARARQHRPILDPTAETHPPGNPSAATLYNLLSSPCSDLTHLPNPTLPAAAAAAQQRQQHPKMVKFLKPGKAVILLQGRFAGRKAVIVRVFEEGTRDRPYGHCLVAGLAKYPKKVIRKDSAKKTAKKSRVKCFIKLVNFTHLMPTRYTLDVDFKDVATGGPDALSTHDKKVAACKTAKARLEERFKTGKNRWFFTKLRF

SEQ ID NO: 13580 - protein, 131 aa, Zea mays
  VARIANT 109..131: note = Ancestral polymorphism lacks residues 109 to 131
  VARIANT 69: note = Ancestral polymorphism is D, Derived polymorphism is Y
  VARIANT 65..131: note = Derived polymorphism lacks residues 65 to 131
  VARIANT 61: note = Ancestral polymorphism is L, Derived polymorphism is M
  VARIANT 53..131: note = Derived polymorphism lacks residues 53 to 131
  VARIANT 36: note = Ancestral polymorphism is R, Derived polymorphism is C
  VARIANT 15: note = Ancestral polymorphism is Y, Derived polymorphism is N
  VARIANT 12: note = Ancestral polymorphism is H, Derived polymorphism is R
  VARIANT 6: note = Ancestral polymorphism is R, Derived polymorphism is H
  VARIANT 3: note = Ancestral polymorphism is V, Derived polymorphism is I
MTIDEHYESLQHCKNADTSGPANDVYELVRTSELKRTKGISTSDIITTILKDYNQYIMWNLTCGYNHKDLGISYVKENQLMVNMGISKLREKVKEQQEKLCGGDIHPHRMNNKQTQIPVTTQCGIVDPFNP

SEQ ID NO: 13581 - protein, 751 aa, Zea mays
  VARIANT 401..751: note = Derived polymorphism lacks residues 401 to 751
MSVVGFDVGNDTLVAAAARQRGIDVLLNAESKRESPAAIAFSRNARLIGCHAASASSAHAPFSSVKRLLMGATGRHPDSSLLRDLSRLPFPAAVGGGAVVHADHIGRRIALSPTHLLSMLLAYLKQLAEADLGGAPVADCVISVPCYFTQAQRRAYLDAAAIAGLRPLRLMHDLAATALGYGLYRSDLGGSGGPTCVAFVDVGQCDTQVAVVSFDMSGMKVLSHGFDADLGGRDFDEVLFEHFAEEFKDRYMIDVTGNVKASMRLRAACEKAKKVLSANAEAVVNIECLIEEKDVRGVIRREDFEKLCARLLERVVEPCNRAVTDSRIGLERLHSVELVGSGSRVPAIAKVLKEFFRKEPSRTLNSSECVARGCALQCAMLSPTFRVREYEVHDAIPASIGFYTSDGPVSTLSSDALFRRGLPFPSVKIITLQKNDSFSFDAYYVDANELPPGTSTDIGSFQIGPFQAHMEASKVKVKIRLNLHGLVSVESAALIDDYQRNATSADHMEVDTSGDDMQGHKSRSERSIQRQELPITEYICCAMSKQELLEAQEQEHQLAYQDKLMERTKDRKNALESYVYDTRNKLSERYRSFATDSEREQISFNLQQTEDWLYEEGDDETEVVYSSKLEELKKLVDPIENRCNDDEVRAEIARELLKCIVDHRMAAKSLSAPERDAVDNECNKAEQWLSEGSKLQESLPKNVDPVLWSCEIKGKEEELDMFCRNITRHKGSPARTDGSRGSDHMPTPDRD

SEQ ID NO: 13582 - protein, 123 aa, Zea mays
  VARIANT 119..123: note = Derived polymorphism lacks residues 119 to 123
  VARIANT 114..123: note = Derived polymorphism lacks residues 114 to 123
  VARIANT 89: note = Ancestral polymorphism is R, Derived polymorphism is C
  VARIANT 78: note = Ancestral polymorphism is A, Derived polymorphism is V
  VARIANT 76: note = Ancestral polymorphism is G, Derived polymorphism is S
  VARIANT 74: note = Ancestral polymorphism is L, Derived polymorphism is P
  VARIANT 73: note = Ancestral polymorphism is R, Derived polymorphism is K
  VARIANT 69: note = Ancestral polymorphism is R, Derived polymorphism is C
  VARIANT 60: note = Ancestral polymorphism is L, Derived polymorphism is Q
  VARIANT 56: note = Ancestral polymorphism is F, Derived polymorphism is L
  VARIANT 55: note = Ancestral polymorphism is A, Derived polymorphism is T
  VARIANT 50..123: note = Derived polymorphism lacks residues 50 to 123
  VARIANT 48..123: note = Derived polymorphism lacks residues 48 to 123
  VARIANT 34: note = Ancestral polymorphism is T, Derived polymorphism is I
  VARIANT 33: note = Ancestral polymorphism is A, Derived polymorphism is T
  VARIANT 28: note = Ancestral polymorphism is V, Derived polymorphism is I
  VARIANT 25: note = Ancestral polymorphism is A, Derived polymorphism is T
  VARIANT 20: note = Ancestral polymorphism is G, Derived polymorphism is D
  VARIANT 14: note = Ancestral polymorphism is A, Derived polymorphism is T
  VARIANT 10: note = Ancestral polymorphism is R, Derived polymorphism is H
  VARIANT 9: note = Ancestral polymorphism is T, Derived polymorphism is M
  VARIANT 4: note = Ancestral polymorphism is E, Derived polymorphism is V
MPKEVEAATRGFTAVLDAAGTAYRARFVGGLVATVVRLRHDDDHRQGEGGGPTDAFYLELQLLARLNHRHVVRLRGFALAHHARPVPFRPPTLSSFPPHRSLSLLLRIGEIHLWIWLGWGGTF

SEQ ID NO: 13583 - protein, 54 aa, Zea mays
  VARIANT 41: note = Ancestral polymorphism is K, Derived polymorphism is I
MNICIHFFDTDQSQDSSGPATLNGMVDLAQALGLPSSNGKKSDKPGVSTAQQPI

SEQ ID NO: 13584 - protein, 181 aa, Zea mays
  VARIANT 106: note = Ancestral polymorphism is P, Derived polymorphism is S
  VARIANT 128: note = Ancestral polymorphism is A, Derived polymorphism is V
MEMIDAELRLGPPGSSNRDVINVVQPSLAAAKRPSSSVVESEASGTDDHDHDDAAPTSKVQVVGWPPVRVYRKNAFHAAAEARRTRRGEQQGGGGLYVKVSMDGAPYLRKVDLRTYGGYRELRDALDALFGCFSSSADGGCQFAVAYEDKDGDLMLAGDVPWEMFICSCKKLRIMRGSEAR

SEQ ID NO: 13585 - protein, 320 aa, Zea mays
  VARIANT 88..320: note = Derived polymorphism lacks residues 88 to 320
MAHGGYPRRGAAVRRPKSSASAAVADRKRKRTAAAAKTTSLKNQIRSTERFLRKDLPDEIRVAQEKKLEELKRQQELQNQLVVQRTLQFRDRKIKFFERRKIERMIRRLEKQQRSNGDGVNNNLSKLREDLEYVRFFPKNEKYVSLFTGGNSQDIVQERNKWRKQIKENLMAAAANGKDLEETASDDDTLDVSDDDFFMSGSSSDEEADDEWTDKSAKEPASSASGRAASGMSSDEKNQRQRDARVLMPPPRSLAPNRGRHADKRAISSSSSTSNSTSGESFKNRRVPNRPADNNSNLSSNSDVHKPRRKRRHKKKRKLV

SEQ ID NO: 13586 - protein, 285 aa, Zea mays
  VARIANT 234: note = Ancestral polymorphism is V, Derived polymorphism is I
  VARIANT 167: note = Ancestral polymorphism is A, Derived polymorphism is V
  VARIANT 150: note = Ancestral polymorphism is M, Derived polymorphism is L
MAGQPPPQGPEDDFFDQFFSMTAGGSYPGATAGGGRAPGDQPFSLALSLDAAAAEASGSGKHADGGKADREAIQLPGLFPPAFGGGVQPPHLRATPPTQVFHAQQPKQGGAAVGPQPPAPRPKVRARRGQATDPHSIAERLRRERIAERMRALQELVPNTNKTDRAAMLDEILDYVKFLRLQVKVLSMSRLGGAGAVAQLVADIPLSVKGEASDSGSKQQIWEKWSTDGTERQVAKLMEEDIGAAMQFLQSKALCMMPISLAMAIYDTQHSQDGQPVKPEPNTPS

SEQ ID NO: 13587 - protein, 389 aa, Zea mays
  VARIANT 15..389: note = Derived polymorphism lacks residues 15 to 389
  VARIANT 252: note = Ancestral polymorphism is H, Derived polymorphism is Y
MSWRWAFARHVAQAQRLLPTSSAGGGTGLLGRHHHHMPLASQIRSKEQQDPFELVADEVSLLVNRLRFMVSAEVPKLASTAEYFFKVGVEGKRFQPTVLLLMASAVKFSLSESTEGKVLSILADKLRSRQQNIAEITEMIHVASLMHDDVLDNADTRCGVRSLNLIKGNKLSVLAGDFLLSRACVALAALGNTEVASLMATTVEHLVTGETMQISTSTEQQRSMEYYLQKTYYKTSSLISNSCKAVAILAGHTAEVSVLAYEYGRNLGLAFQLIDDVLNFTGTSASLGNGSLSHIRHGIITAPMLYAMEEFPQLLEVVDRGFGNPANVEIALDYLRKSHGVERTKELAREHTDRAVKAIESLPYSDDKDVLTSRRALVDITERVITRTK

SEQ ID NO: 13588 - protein, 281 aa, Zea mays
  VARIANT 195: note = Ancestral polymorphism is R, Derived polymorphism is M
  VARIANT 169: note = Ancestral polymorphism is A, Derived polymorphism is T
  VARIANT 84..281: note = Derived polymorphism lacks residues 84 to 281
  VARIANT 32: note = Ancestral polymorphism is T, Derived polymorphism is M
  VARIANT 31: note = Ancestral polymorphism is V, Derived polymorphism is I
  VARIANT 26..281: note = Ancestral polymorphism lacks residues 26 to 281
MSNVSHTSEVIFELVDKAIQDLGPDSVVQVVTDNASNNMGAKALLHDKRPNIFWSSCATHIINLMLQGIGNLPRFKKRIDQANSFTIFVYGHHRTLACMKSFTLKRDIIRPGVTRFATTYLTLQSMMEKKDDLRKMVFEPLVKLLRLVDGDVKPSMGFLYGELINEKKAIEEAFGNVEIKYKEVMSIVEKKMKNRLDSPLHVAAYMLNPYYSYTNSSILCDSTIMEKFMLCVETFYHGEDEKSYRAVNDDLDRFQTKQGSFSKNMARSCQRIDFNPGNIVL

SEQ ID NO: 13589 - protein, 148 aa, Zea mays
  VARIANT 12: note = Ancestral polymorphism is D, Derived polymorphism is V
  VARIANT 21: note = Ancestral polymorphism is S, Derived polymorphism is F
  VARIANT 23..148: note = Derived polymorphism lacks residues 23 to 148
  VARIANT 40: note = Ancestral polymorphism is G, Derived polymorphism is R
  VARIANT 43: note = Ancestral polymorphism is K, Derived polymorphism is N
  VARIANT 45: note = Ancestral polymorphism is E, Derived polymorphism is K
  VARIANT 49: note = Ancestral polymorphism is G, Derived polymorphism is R
  VARIANT 58: note = Ancestral polymorphism is E, Derived polymorphism is K
  VARIANT 62: note = Ancestral polymorphism is V, Derived polymorphism is L
  VARIANT 74: note = Ancestral polymorphism is S, Derived polymorphism is Y
  VARIANT 78..148: note = Derived polymorphism lacks residues 78 to 148
  VARIANT 82: note = Ancestral polymorphism is A, Derived polymorphism is T
  VARIANT 83: note = Ancestral polymorphism is R, Derived polymorphism is C
  VARIANT 86: note = Ancestral polymorphism is E, Derived polymorphism is V
  VARIANT 87: note = Ancestral polymorphism is G, Derived polymorphism is E
  VARIANT 92: note = Ancestral polymorphism is Q, Derived polymorphism is H
  VARIANT 94: note = Ancestral polymorphism is F, Derived polymorphism is S
MRFLPQVWRVNDKDKVQLSPSDQSKFYTGDCYIFQYTYPGDDKEECLIGTWFGKKSIEEDRLIAVSLASKMVESAKFQAIQARFYEGKEPIQFFVIINQCGSDVVVVLLNLLLECISQTRLQSSGVVLPFQQTINDLVVNDLIIVMLL

SEQ ID NO: 13590 - protein, 917 aa, Zea mays
  VARIANT 471..917: note = Derived polymorphism lacks residues 471 to 917
  VARIANT 568..917: note = Derived polymorphism lacks residues 568 to 917
  VARIANT 599..917: note = Derived polymorphism lacks residues 599 to 917
MRLSSSSGSVLPAQPGSPEAVEEHKCLNSELWHACAGPLVSLPAVGSRVVYFPQGHSEQVAASTNKEIESQIPNYPNLPPQLICQLHNVTMHADAETDEVYAQMTLQPLNPQELKDPYLPAELGSANKQPTNYFCKTLTASDTSTHGGFSVPRRAAEKVFPPLDFTQQPPCQELMAKDLHGNEWKFRHIFRGQPKRHLLTTGWSVFVSAKRLVAGDSVLFIWNDNNQLLLGIRRANRPQTVMPSSVLSSDSMHIGLLAAAAHAASTNSRFTIFYNPSCFCRASPSEFVIPLVKYVKAVYHTRISVGMRFRMLFETEESSVRRYMGTITGICDLDSVRWPNSHWRSVKVGWDESTAGERQPRVSLWEIEPLTTFPMYPSPFPLRLKRPWPTGLPSLHGGKDDDLANSLMWLRDTANPGFQSLNFGGLGMSPWMQPRLDATLLGLQPDMYQAMATAAFQDATKQASPTMLQFQQPQNIAGRASPLLSSQILQQAHHQFQQQPYLQNISESTIQAQGQSEFLKQQIQRSQSFNEQKPQMQHQQESQQQQQPQCLPVPQHQQMQQQNMTNYQSISNALSPFSQLSPVSQSSPMALQTILPFSQAQSFTDTNVGSLSPSNGNTMQNTLRPFSSEAVSHLSMPRPTAIPVADPWSSKRVAVESLLPSRPQVSSQMEQLDPAPASIPHSSALAPLPGRGCLVDQDVNSDPQNHLLFGVSIDSQSLLMQGGIPGLQNGNDSAAIPYSTSNFLSPSQNDFPLDHTLNSSGCLDDSGYVPPCSDNSDKVNRPPATFVKVYKSGTYGRSLDITRFSSYHELRRELGRLFGLEGQLEDPLRSGWQLVFVDREEDVLLVGDDPWQEFVSTVSCIKILSPQEVQQMGKQGLELLSSAPARRLGSSCDDYVSRQESRSLSTGIASVGSVELG

SEQ ID NO: 13591 - protein, 612 aa, Zea mays
  VARIANT 242..612: note = Derived polymorphism lacks residues 242 to 612
MWRGRCAPGISVAALALLAVAAAAGAAAGDPDPDDLERAFPIVEPDHRHTKLRLSEQGLEAIRRIETPIAVVGVIGPYRSGKSFLLNQLLSLSCDKGFGVGHMRDTKTKGIWIWGTPVEMDVDGSKVSVLYLDTEGFESVGKSNVYDDRIFALATVLSSVLIYNLPETVREADISRLSFAVEIAEEFYGRVKGQDVAFEPAKLLWLIQRDFLQGKSVQQMVNEALQRVPNDNGDRYINEVNQIRDSLAVMGNHSTAFSLPQPHLQRTKLCDMEDKELEPLYVKRREQLKQLVSSIVKPKIVQGRTLNGKDFVSFLQQILEALNKGEIPSTGSLVEIFNKAILDRCLKVYREKMDSLNLPVPVDELQKLHEMTNGEARILFDKQHFGKHHAAQSALKLEDEIKEVYRNFLLANEYQSSKLCEARFSECEDKMDHLQVLKLPSMAKFNAGFTHCNQSFVKDCVGPAKESYERRMSKMLAKSRALFIKEYNNKLFNWLATFSLVMVVIGRFVIKFFLLEIVAWVMFIFLETYTRMFWSAESLYYNPAWHIIVSSWEMIVYSPILDLDRWAIPIVIMLSLGVLYWRCFGRRRKRVKGSLLPLYKNSYKNSSRPRSD

SEQ ID NO: 13592 - protein, 122 aa, Zea mays
  VARIANT 74: note = Ancestral polymorphism is D, Derived polymorphism is E
  VARIANT 78: note = Ancestral polymorphism is Y, Derived polymorphism is F
MEGPPGLSQAIPVSGDAYCNSSTTHVDAAGSSSPAVAKLRKLLFRRMLIGVNDGRYFHGLFHCIDKQGNIILQDAVEYRSARHCLPPTEHRCLGLILIPAACRSSCQVDCSVEEKMSLMCLE

SEQ ID NO: 13593 - protein, 342 aa, Zea mays
  VARIANT 227: note = Ancestral polymorphism is G, Derived polymorphism is V
  VARIANT 224: note = Ancestral polymorphism is S, Derived polymorphism is I
  VARIANT 16: note = Ancestral polymorphism is G, Derived polymorphism is V
MVGLGWRVGSKVQRWGRSCLRGFSSAAVPSQLENVGFIGLGNMGSHMARNLITAGYKVTVHDINENSMKKFSEDGIPTKQSPLEVSESSDVIITMLPSSTHVLEVYNGPNGLLCRGERLGPWLYIDSSTVDPQTSRKISTAISRCLLKEKKGYAESPKILDAPVSGGVPAAEAGKLTFMVGGLEEAYLAAKPLLQAMGEKTIYCGGAGNGSAAKICNNMAMAISMLGVSEAFALGQNLGIKATTLTDIFNCSSARCWSSDTYNPVPGVMEGVPSSRNYSGGFTSKLMAKDLDLAMASASGVGFKCPMGSNALEIYRKLCEDGCELKDFSCAFRHYYSGKNEE

SEQ ID NO: 13594 - protein, 482 aa, Zea mays
  VARIANT 19..482: note = Derived polymorphism lacks residues 19 to 482
MESAEGPSPYSGDRAAPVQDGNGQTTPGHNSRRPNLSLQIPARTLDTNIPSSTRVTISCSPSSTRVGLPPRPNSTRTKSSIKNMNPQHSFRARSSAQEGDRVVLLNPGTSSEGQQDNPSTARSFSFRKVINSLSAKRTHSLPVTPVGTTDKAASPPNQLDTLPTTTNEGVEAKIRRSLSVPGNRKNRSLRRADSLGVIRVIPTTPRPVPVEATTSSDIIEETIDVPEDGGEDIPEEEAVCRICFVELNEGGETLKMECSCKGELALAHQDCAVKWFSIKGNKICDVCKQEVQNLPVMLLRIPTQTANRRVANAAQQRAAQQYRFWQDIPILVMVSMLAYFCFLEQLLVTDLQSRALAISLPFSCVLGLLSSMIASTMVSKSYLWAYASFQFAIVILFAHIFYNVLKVNPVLAVLLSSFTGFGIAISTNSLLVEYLRWRARRNQRLAQQAANAAQHQESGNDGGNDNDDAQQGHDPNSGNNAV

SEQ ID NO: 13595 - protein, 408 aa, Zea mays
  VARIANT 339: note = Ancestral polymorphism is S, Derived polymorphism is L
MATASLALLDQTLLPSPLAYNGGSDRLSQEIFSILESNFLFGASPLEGGACSAGRVRVLSIDGGADGGALAAAALVRLERRLQELSGNPAARVADFFDLAAGSGAGGFLAAALFACRMPAEAARDVVAKNRKVLSGRGGGLMSFRRPEAAFRKVFGDLTVRDAAKPLLIPCYDMATAAPFVFSRADAVEADAFDFPLWQVCAAACGVGPAEVASLDGRTRLRAASGAGAGGGGASAAVANPTAVALTHVLHNKREFPFAAGAGDLVVLSLGGRAAASLGRLSSSSLLRIAGACQADMVDQAVSMVFGESRATNYVRIQGNGIAPGETAEAALAERGVESVLFRGKKLMAQTNGERLDGVAEQLVREHHRRLESKTPVVLVKPSATPRTSSSSASTLITVSTNSSSESP

SEQ ID NO: 13596 - protein, 258 aa, Zea mays
  VARIANT 32: note = Ancestral polymorphism is A, Derived polymorphism is S
MFGYRKADPDLEAGGSSLLYPGMTESPELRWAFVRKIYVILTVQLAMTAAVSAFVVKVPAVSNFFVSSNAGIALYIFLIVLPFIVLCPLHYYHQKHPINLLLLGLFTVAISFAVGMTCAFTSGVSISVICPSNTNAFGKIILEAAILTAVVVNSLTAYTFWAAKRGHDFNFLGPFLIAAIMVLMVFSLIQIFFPLGKISVMIYGGLASLIFCGYIIYDTDNIIKRHTYDQYIWAAVSLYLDVINLFLSLLQLLRAADS

SEQ ID NO: 13597 - protein, 194 aa, Zea mays
  VARIANT 38: note = Ancestral polymorphism is D, Derived polymorphism is G
  VARIANT 37: note = Ancestral polymorphism is I, Derived polymorphism is F
  VARIANT 25..194: note = Derived polymorphism lacks residues 25 to 194
MDAASIAAAAAAVATPPPGPAVTVQVPRGQVDLIDFIDWTGVECLNQDSSHSIVNALKQSLRDDEGLYLASDSDEQLLIYIPFMQVVKLHSVLFKGPEEEGPKTVKLFSNKEHMGFSNVNDYPPMDTLELSSDHLIENKPLPLKYVKFQNVRSLTVFIEDNQSGSDVSKIQKVALYGTTVDTTNMKDLRKTEEH

SEQ ID NO: 13598 - protein, 192 aa, Zea mays; identical to SEQ ID NO: 6926
  VARIANT 75..192: note = Derived polymorphism lacks residues 75 to 192
  VARIANT 65..192: note = Derived polymorphism lacks residues 65 to 192
  VARIANT 50: note = Ancestral polymorphism is R, Derived polymorphism is W
  VARIANT 42..192: note = Derived polymorphism lacks residues 42 to 192
  VARIANT 9: note = Ancestral polymorphism is R, Derived polymorphism is W

SEQ ID NO: 13599 - protein, 105 aa, Zea mays
  VARIANT 63..105: note = Derived polymorphism lacks residues 63 to 105
  VARIANT 51: note = Ancestral polymorphism is R, Derived polymorphism is C
  VARIANT 38: note = Ancestral polymorphism is K, Derived polymorphism is N
  VARIANT 28: note = Ancestral polymorphism is F, Derived polymorphism is L
  VARIANT 4: note = Ancestral polymorphism is E, Derived polymorphism is K
  VARIANT 3: note = Ancestral polymorphism is T, Derived polymorphism is I
MDTEMGIVWKANIEKMYSDLAEIEVGFFPPEVEAKIKKGLDEVRAAKIDFCREGRRALARQSQLEASSVGDDQTSEVIDTNEEIRGGSKSLDAPGQIMEGLLLAH

SEQ ID NO: 13600 - protein, 247 aa, Zea mays
  VARIANT 222: note = Ancestral polymorphism is V, Derived polymorphism is I
  VARIANT 219: note = Ancestral polymorphism is I, Derived polymorphism is T
MNTTQCFSDPVFSFWFNRHADEGEGGEIVFGGMDSSHYKGDHTFVPVTRKGYWQFNMGDVLVDGKSTGFCAGGCAAMADSGTSLLAGPTAIITEINEKIGAAGVVSQECKTVVSQYGQQILDLLLAETQPAKICSQVGLCTFDGTHGVSAGIRSVVDDEAGKSNGGLKSDPMCNACEMAVRLPSPMGESAVDCGSLASMPDIVFTIGGKKFKLKPEQYILKVGEGQAAQCISGFTAMDIPPPRGPLW

SEQ ID NO: 13601 - protein, 345 aa, Zea mays
  VARIANT 312: note = Ancestral polymorphism is D, Derived polymorphism is Y
MEMLAEIHLLNRAVKRKSRRMVHLHVQFVVLCLDNSKVYPFLPNFPGHTHRYKQTEQETGPYLSLQLFGSTEEDFPPKMDSVNKYLSYESSNPLDERSPSSLPITRKFFPIHSVDEEVRHPHITDYGEDATMGDVSTNQAWLAPPLDLFKDSERPIKNGSPPNPGYQSCYASTSCSDHSNSTSNSDGQLEENLLQRVNSLVQSSDLDFWRKGRFLVRTNSQLVSYKAGITCLSKSWRTWNTPELTLVSPIAVVGGQKTSLILKGHDLSIPGTQIHCTSIGKYISKEVMCSAYPSTIYDDSGVETFDLTGKPDLIIGRCFVEVENRFRGTSFSVIGGLCTLCCFEE

SEQ ID NO: 13602 - protein, 70 aa, Zea mays
  VARIANT 15: note = Ancestral polymorphism is E, Derived polymorphism is Q
  VARIANT 24: note = Ancestral polymorphism is G, Derived polymorphism is R
  VARIANT 28: note = Ancestral polymorphism is T, Derived polymorphism is M
  VARIANT 38: note = Ancestral polymorphism is G, Derived polymorphism is S
  VARIANT 43: note = Ancestral polymorphism is R, Derived polymorphism is I
  VARIANT 46: note = Ancestral polymorphism is N, Derived polymorphism is K
  VARIANT 50: note = Ancestral polymorphism is R, Derived polymorphism is Q
  VARIANT 52: note = Ancestral polymorphism is E, Derived polymorphism is K
MSITWTGEKKLYMQEIMDAVNNSGKFDTKFGGFTGTDGPLGKRMENSKTRAEIGWEPKYPSFTKILDISS

SEQ ID NO: 13603 - protein, 116 aa, Zea mays
  VARIANT 85..116: note = Derived polymorphism lacks residues 85 to 116
  VARIANT 83..116: note = Derived polymorphism lacks residues 83 to 116
  VARIANT 55..116: note = Derived polymorphism lacks residues 55 to 116
  VARIANT 35: note = Ancestral polymorphism is E, Derived polymorphism is D
MARRGSGVADGWGWRDGRVTEVAGNWVFRRGQSWDWGCRWLLGGDGTAVAALKPRGTGSSRGGTRGGRRLESEDGVAESEDGWAWRVVAFHSWSGCEISGTGEEEEAAESANADAQ

SEQ ID NO: 13604 - protein, 160 aa, Zea mays
  VARIANT 104: note = Ancestral polymorphism is S, Derived polymorphism is L
  VARIANT 89: note = Ancestral polymorphism is K, Derived polymorphism is M
  VARIANT 65: note = Ancestral polymorphism is T, Derived polymorphism is A
  VARIANT 35: note = Ancestral polymorphism is R, Derived polymorphism is H
  VARIANT 32: note = Ancestral polymorphism is R, Derived polymorphism is Q
  VARIANT 28..160: note = Derived polymorphism lacks residues 28 to 160
MLPSFWVWDQTTVTLYSLCGSSALLQHWRWGRACRARRFSSSRGPRISMSLRAGIIGLPNVGKSTLFNAIVENGKAQAANFPFCTINPKVGVVAIPDPRLQVLLKLNKSLQTVPTSIELVYIVGLVKGASKGEAPVLSLSLINLQGRISPTLSKVEMVPD

SEQ ID NO: 13605 - protein, 83 aa, Zea mays
  VARIANT 47: note = Ancestral polymorphism is A, Derived polymorphism is T
  VARIANT 37: note = Ancestral polymorphism is H, Derived polymorphism is N
  VARIANT 36: note = Ancestral polymorphism is S, Derived polymorphism is L
  VARIANT 34: note = Ancestral polymorphism is P, Derived polymorphism is S
  VARIANT 24: note = Ancestral polymorphism is D, Derived polymorphism is N
  VARIANT 19: note = Ancestral polymorphism is L, Derived polymorphism is P
MDLGAGDRILVSWDLHDWLFPVRDASPPAAATAPPSHAIFVFRFELAGRDDVERDPANAMEKEVLQVKGSLVVYVDSRWGRGD

SEQ ID NO: 13606 - protein, 213 aa, Zea mays
  VARIANT 192: note = Ancestral polymorphism is A, Derived polymorphism is T
  VARIANT 169: note = Ancestral polymorphism is P, Derived polymorphism is S
  VARIANT 161: note = Ancestral polymorphism is A, Derived polymorphism is V
  VARIANT 147: note = Ancestral polymorphism is P, Derived polymorphism is L
  VARIANT 115: note = Ancestral polymorphism is L, Derived polymorphism is R
  VARIANT 106: note = Ancestral polymorphism is S, Derived polymorphism is F
  VARIANT 23: note = Ancestral polymorphism is S, Derived polymorphism is F
MPLPHAPRAKGKDADLAKFTKVSKTSAKSEAAIAARKAKKPPAPNSTADAGAKPTKSGKKASVLADAKAKANATVDSKEELAAEVEVEEDVLLTKQVEEGTDDLISEFRDLPSRLQETLMPDLARLSHHSKAYLSAANAGIADGVHPILGGRWAAMVDLVAVFSSTASPEDDCNGDAAKALGLAQMVVGLAAGVHYYVIVFHRAVAGAAPHAN

SEQ ID NO: 13607 - protein, 1470 aa, Zea mays
  VARIANT 1279..1470: note = Derived polymorphism lacks residues 1279 to 1470
MSCQISKALVRLRLIVFSTVPVLFLLVAWRFQRKTRKTSRVASTRHVLEPCGAGIGKQASTTAIPQTTARLLFAVATDLYMAMEASAASDETLAAVFAQLKLHTVALLDLLRTRRPISSSGSSLREMAAFLRAAPAPALQLCFDYTVFPLLLLLDAAVQCRKQGNAPGQVAGGIDIGDAVAEAGLTCLEVLLTKCHLTSVNQMVAMLKKLTSGAMLSPSEASEEFRGAIIRCFRALVLQLQPCLDHFCSCKHGIVLPTIPTSTCLEVRSVVRPNHSAQPEECLLAFLQSQNASAAVGHWLSLLLQASELEASRGHRGSADVRKESLHTLRILIGKVGSADALAFFLPGIVSRLGKVLYTAKTMISGAAGSSLSIEQAILGLTEALMIVLNDKENLSALGKHKNENHSGGSESTEHILQMLRQLPTKNISDKISHDEITDDSVSNVNNSFADRKALHVKRTKKWLEETTSNVDKLLSATFPHLAIHSSEKVRKAVVSGVKGLLSSCSSTLKRTKMLLLECLCVLACDDAAAVSEAAQDALDHLFNQGHNLVTEKEISDTFTRLVERLPQVVLGSEETTALSHARMLLALTFYAGPQFLINHLHRSPVIAARFFDCLGLCIGHSSQFSGSMDKLIVSKPLSIGYLYSVAELKSGAYSKDTTNISLHATSTSAASKISVIHDNALPNALLGTVEYELPHVPPWFFHAGSQKLYGVLAGIIRLVGLSTVSGEGTAATLSLFVDILLDQFRRLSTELRDKDVYNDGLQRWYMKGEAGQALRQASSAVCMLNELMYGLSGRSLGMFLQLFSNGSAQMPRTVCQKNQLLACVKHNAVTNKREVWGFSEQKGTKDNILHCISSILHEYVSPEVWDLPTEKDTELHLIELNLPLHFYRDTTALHTVVLEGIGVLGVLLGQDFALSGFMHSSLYLLLRELISSSAQIRTACDAVLRALATAGGHCSVGQFVVANADYIIDSLCRQLRHLDLNPHVPDVLASMLCYIGKLDGHEEARRHNSQRASREERKQGFKRKNMMQSISSELEVLGRHDHPRLTVPFLKAVSEISKACRHESTCLPDEAQSFYEKVSSEGQEVKIMIEKRMESSAISERKNVDARSYFMTLEYWEDLFCKLNEMRRYRRIVGSLAGSCLSAAIPLLSSNKETACLVALDIVESAAISIANVEEAYKCECQSKGVIEEAIQFCSFDELLDGTDATEDVDENRLLPAMNKLWPYLVICLRNKISVPVVRKCTEMLRRAICISGGDFYVRRFHKDGPIVWRLLALSPFRRLSKMDEKAIILPYRDTSLNSEEPMAEISSQKIQIAVLDMIAAISSNKRSAVALESVLKKVCGLVVGIAYSSLTGLQEAAIRALAGLACMDADLVWLLLADVYYSLNQRESLLPNQDLALVSDLLPPPVSSREYLFVQYGGEGVRFLILCISNIRTHDDNEGCDGFVSVSHIRLHVKHAPDLPDEQQDFGT

SEQ ID NO: 13608 - protein, 125 aa, Zea mays
  VARIANT 4: note = Ancestral polymorphism is S, Derived polymorphism is Y
  VARIANT 9: note = Ancestral polymorphism is G, Derived polymorphism is D
  VARIANT 17: note = Ancestral polymorphism is P, Derived polymorphism is A
  VARIANT 22: note = Ancestral polymorphism is G, Derived polymorphism is R
  VARIANT 24: note = Ancestral polymorphism is E, Derived polymorphism is D
  VARIANT 25: note = Ancestral polymorphism is L, Derived polymorphism is M
  VARIANT 26: note = Ancestral polymorphism is K, Derived polymorphism is R
MACYGQMHDGDGSSSRPVLVWGLEMRQETWFSFLSYAHCLLVVIRCRSRSPDTGEWLPVENSPRQICHVGAVTGAKGVAVTGPASQGGAIIGTPGNPRKICHVGVVATSETDVITCSSVLMIKRR

SEQ ID NO: 13609 - protein, 167 aa, Zea mays
  VARIANT 6: note = Ancestral polymorphism is G, Derived polymorphism is E
  VARIANT 30: note = Ancestral polymorphism is M, Derived polymorphism is I
  VARIANT 36: note = Ancestral polymorphism is V, Derived polymorphism is I
  VARIANT 38: note = Ancestral polymorphism is R, Derived polymorphism is S
  VARIANT 39: note = Ancestral polymorphism is R, Derived polymorphism is H
  VARIANT 40: note = Ancestral polymorphism is F, Derived polymorphism is L
  VARIANT 41: note = Ancestral polymorphism is S, Derived polymorphism is A
  VARIANT 59: note = Ancestral polymorphism is C, Derived polymorphism is R
  VARIANT 65: note = Ancestral polymorphism is I, Derived polymorphism is T
MSLIAGEDFQHILRLLNTNVDGKQKIMFAMTSIKGVGRRFSNIVCKKADIDMNKRQASRFSSKDIIRSLWAGELTPDELERLMTVVANPRQFKVPDWFLNRKKDYKDGRFSQVVSNALDMKLRDDLERLKKIRNHRGLRHYWGLRVRGQHTKTTGRRGKTVGVSKKR

SEQ ID NO: 13610 - protein, 195 aa, Zea mays
  VARIANT 117: note = Ancestral polymorphism is V, Derived polymorphism is L
  VARIANT 108: note = Ancestral polymorphism is L, Derived polymorphism is P
  VARIANT 103: note = Ancestral polymorphism is E, Derived polymorphism is D
  VARIANT 83: note = Ancestral polymorphism is V, Derived polymorphism is D
  VARIANT 73: note = Ancestral polymorphism is L, Derived polymorphism is V
  VARIANT 72: note = Ancestral polymorphism is V, Derived polymorphism is M
  VARIANT 69: note = Ancestral polymorphism is R, Derived polymorphism is C
  VARIANT 64: note = Ancestral polymorphism is L, Derived polymorphism is V
  VARIANT 61: note = Ancestral polymorphism is T, Derived polymorphism is A
  VARIANT 51: note = Ancestral polymorphism is A, Derived polymorphism is T
  VARIANT 50: note = Ancestral polymorphism is A, Derived polymorphism is S
  VARIANT 35: note = Ancestral polymorphism is T, Derived polymorphism is I
  VARIANT 10: note = Ancestral polymorphism is Q, Derived polymorphism is K
MEVTATPRIQEAKTVPGTAKATVDDEVTLRRFELTDVDAMMEWASDPQVAAFCRWEPYASAEPLLEFLRDAVLPHPWYRAICVSGAVVGAVSLAPTPERCRWELGYVLARAHWGKGVATAAVRRALRDAFADLEPEGLRRVEALVDVGNPASQRVAEKAGFRREGVLRRHYWHKGRARDMVMYSFLSSDLLPDPE

SEQ ID NO: 13611 - protein, 187 aa, Zea mays
  VARIANT 26..187: note = Derived polymorphism lacks residues 26 to 187
  VARIANT 47: note = Ancestral polymorphism is E, Derived polymorphism is K
MSRWVSRSIHARLLPILADAHIVDLQDLLLRLTFDNICGLAFGKDPETLARCLPDNAFASALDRATEATLNRFIFPECVWRCKKWLGLGMETTPARSVRHVDRYLSAVIKARNLELSASLPPPPRGRTSSRPRRTTTSSRASCARGPTPTRRCSTWRSTSSSPAATAPRWRSPGSFGWKIYSRTEDG

SEQ ID NO: 13612 - protein, 78 aa, Zea mays
  VARIANT 53: note = Ancestral polymorphism is D, Derived polymorphism is Y
MVGRKNRACKKFRLASFKNEEDLEIMFSGVSCTNAYAMAPGAKEGLPANDSDDVEEMAFTSSESNESDITSNSSDSSD

SEQ ID NO: 13613 - protein, 136 aa, Zea mays
  VARIANT 45: note = Ancestral polymorphism is G, Derived polymorphism is R
  VARIANT 99: note = Ancestral polymorphism is P, Derived polymorphism is H
MEDVHNVIDHWMELDKIIARHQSSSIIDPNQLEGNTPGAPITPEGGAPPTKVPTYNMLHTKVTPNYFSTDSSKGSLDGTSSTKEDTDAATVTIKSTTIPVRGHGTVTVDDHNRRHQTLIFDDLTSAQLTIQHTTSR

SEQ ID NO: 13614 - protein, 327 aa, Zea mays
  VARIANT 318..327: note = Derived polymorphism lacks residues 318 to 327
  VARIANT 142: note = Ancestral polymorphism is A, Derived polymorphism is P
  VARIANT 115: note = Ancestral polymorphism is L, Derived polymorphism is I
  VARIANT 113: note = Ancestral polymorphism is D, Derived polymorphism is N
  VARIANT 33: note = Ancestral polymorphism is G, Derived polymorphism is A
MASCIATGVREPRAAPRNSTIDEYEEICCLGMGAFGAVYKKVRHRATGQIVAIKRLTDAVGFVAQIPLLREAGLLKKSCRDNPFVVGLLSIARNPATMDSFLVMECVGPSLCDLLRQRHHAGMPPLPEATVRAVMWQLLTGAKKMHDGHVVHRDIKPGNILVSADGTIVKICDFGLAMGMDVQEPPYEATGTLWYMAPEMLLGKPDYDARVDTWSLGCVMAELIKGSRLFAHSDAANQLAGIFEVLGVPDETAWPWFSSTPFATQIVPIQGRNLLREFFPETKLSEEGFQVLSGLAAHVQPREAAHRSCRAQAPVVCQDERARTAKQ

SEQ ID NO: 13615 - protein, 98 aa, Zea mays
  VARIANT 84..98: note = Derived polymorphism lacks residues 84 to 98
  VARIANT 70: note = Ancestral polymorphism is C, Derived polymorphism is W
  VARIANT 62: note = Ancestral polymorphism is R, Derived polymorphism is C
  VARIANT 57: note = Ancestral polymorphism is P, Derived polymorphism is L
  VARIANT 55: note = Ancestral polymorphism is P, Derived polymorphism is L
  VARIANT 12: note = Ancestral polymorphism is Q, Derived polymorphism is R
MVWAHMWIGGAQTGMEGMRGGIWKGRARMEGRRGRRMTVGFAVGYEPYFGKTVYPEPERCRRTDDKKWRCSNEAAPVSKYCERQMHRGHNRSRKHVKK

SEQ ID NO: 13616 - protein, 174 aa, Zea mays
  VARIANT 69: note = Ancestral polymorphism is F, Derived polymorphism is I
  VARIANT 55: note = Ancestral polymorphism is C, Derived polymorphism is Y
  VARIANT 47: note = Ancestral polymorphism is P, Derived polymorphism is S
MSTPARKRLMRDFKRLQQDPPAGISGAPHDNNIMLWNAVIFGPDDTPWDGEQTVCFLILTVSLLTYVKFTLVGTFKLTLQFTEDYPNKPPTVRFVSRMFHPNIYADGSICLDILQNQWSPIYDVAAILTSIQSLLCDPNPNSPANSEAARMFSENKREYNRKVREVVEQSWTAD

SEQ ID NO: 13617 - protein, 613 aa, Zea mays
  VARIANT 353..613: note = Derived polymorphism lacks residues 353 to 613
MAAMNGEVLGECGRNINSLKRKRESPAAYAAGVFCTSELHQHTVNDSAVRFHLDKDRKAKIVCHFNKQVLQSYKKFMSSAPPKRILLRQGAVWKDFPEKIVKLAQADFRAKKMITETGYQNQLFLLDFAHMTFIDTKTGFQRPIAWIDENEKCYFPESFIQDQKLFMKKDFGNGNHEYISEERNGTRETNHQFGASESSAESSNFESSIGDVSSPKRARAEKNFIVKKYCDMGEAIGENESCTLLPTACNLLPHQANLGEVSRAQRTIEAVEKLLLQGMGSVIESKDIIGIYRTPLLDDHGQVRYHIHQKQVQVTGCHRGNANVRYAWLPCSKSTVHVMMLNGVLQVDKPPNKCAAYGEGTLLTPANRSDACVKYSDVDENGIVRMMLCRVIMGNVEIVHPGSKQCQPSNKYFDSGVDDLKNPRHYVVWDMNLNSHIYSEFVVTVKLPSKTKDSFVSQENCQNSSDLSLVLNSSSPDCISQEMNLEAPPALGGGCAAPMLGDSMEKAPSSPWMPFSMLFAAISTKVSPENMDVIIGCYEEFKSPSLVWYPKSLVDCICQSKKISRGELVKKLRHVVGDRVLISTIMRLQDKQLPPVDKREEPDTSASKVVAEP

SEQ ID NO: 13618 - protein, 297 aa, Zea mays
  VARIANT 1: note = Ancestral polymorphism is M, Derived polymorphism is K
  VARIANT 19: note = Ancestral polymorphism is T, Derived polymorphism is I
  VARIANT 26: note = Ancestral polymorphism is L, Derived polymorphism is H
  VARIANT 33: note = Ancestral polymorphism is S, Derived polymorphism is I
  VARIANT 37: note = Ancestral polymorphism is D, Derived polymorphism is H
  VARIANT 50: note = Ancestral polymorphism is S, Derived polymorphism is L
  VARIANT 55: note = Ancestral polymorphism is G, Derived polymorphism is S
  VARIANT 72: note = Ancestral polymorphism is I, Derived polymorphism is V
  VARIANT 82: note = Ancestral polymorphism is T, Derived polymorphism is I
  VARIANT 95..297: note = Derived polymorphism lacks residues 95 to 297
  VARIANT 101: note = Ancestral polymorphism is N, Derived polymorphism is Y
  VARIANT 107: note = Ancestral polymorphism is E, Derived polymorphism is K
  VARIANT 112: note = Ancestral polymorphism is D, Derived polymorphism is N
  VARIANT 120: note = Ancestral polymorphism is R, Derived polymorphism is H
  VARIANT 124: note = Ancestral polymorphism is R, Derived polymorphism is K
  VARIANT 146: note = Ancestral polymorphism is R, Derived polymorphism is G
  VARIANT 156: note = Ancestral polymorphism is V, Derived polymorphism is I
  VARIANT 160: note = Ancestral polymorphism is C, Derived polymorphism is F
  VARIANT 179: note = Ancestral polymorphism is R, Derived polymorphism is G
  VARIANT 184: note = Ancestral polymorphism is G, Derived polymorphism is E
  VARIANT 188: note = Ancestral polymorphism is P, Derived polymorphism is Q
MPIAIETDKAKAQHYELPTTFFKLVLGRNLKYSTLEDAEVAMMDLYCERSKLQDGQSILDVGCGWGSLSLYIAKKYRNCSVTGICNSTTQKAFIEEQCREYELSNIEIIVADISKFEMERSFDRIVSIEMFEHMKNYKSLLKKISGWMKEDGLLLIHLFCHKAFPYHFEDKNDDDWITRYFFTGGTMPSANLLLYFQEDVSVVYHWLVSGMHYARTRGKVHESETSGHPGQAHTYTYLIVVESCHFLSCCCPICFVGYCYCSDNSHNKRLREIGLFCDATTARERCSLHSNARAFTM

SEQ ID NO: 13619 - protein, 199 aa, Zea mays
  VARIANT 66: note = Ancestral polymorphism is W, Derived polymorphism is R
  VARIANT 37: note = Ancestral polymorphism is T, Derived polymorphism is A
MAAALRAVLRGIKEKGLTNFIRDVRDEGYLIVLALIAPQSLMLHNTITYAAYASVDSFYQQMPSGREPFVSGHLTVPPFSRNGCDYVSQTVSTTIIFRQTKIHNIGATLVGVDKFGNKYYEKLHDTQYGRHRWVEYAEKGRYNASQLLNQKTARYLVEHKQNYSGEGEELIYHSKGHALNPGQRDWTRYQPWEPKKEQA

SEQ ID NO: 13620 - protein, 1009 aa, Zea mays
  VARIANT 773..1009: note = Derived polymorphism lacks residues 773 to 1009
  VARIANT 528..1009: note = Derived polymorphism lacks residues 528 to 1009
  VARIANT 339..1009: note = Derived polymorphism lacks residues 339 to 1009
MGLSLQSPDCYTFGDSRAFQSPERNEWMQKNTIHNRCQTLRLSYFSVSASRYQRLPLCLPPRALISLYPLAATRGFQTANKSAGSRLQKLSNHAAAPSLAVAVSVAAHPSWFWLPAPPLRPSSLAVFATEILFFGLEKGRASLSSTYLAREKTCFIKVWKPYLWFGKRKGFINFYISGQGENLLHQENPYLWFGKRKGFINFYISGQGKNLLHQVSKNATLARQNRKRALEQKRLLTRGPKHSINTPMTSVYFSSEYINALKDRSHLGTPDYECQHCHALFWHAERNSSNRYGIVQYYNCCKGGKLSIPSYTPRPEPLASLSKFHGDSISKRFMRSIRQYNCLFAFTSMGAQIDNTMNDGRGPPLFKICGQVHHRIGSLLPSDGSSPKYLQLYIYDTANEVQNRLKCLNSNNMTTEVLDPSIIEELIKMLDECNPFAKTFRMARDRMAEYGDENFIIRIIGAKEGDSVQYNLPTTDELALLVVRDFSLDTFKRDIIIETHSRELKRISSLHPAYMALQYPLLFPFGERGFQVGVLYNGVNLANKPKRCHMTMQEYYCYQFHYRRNQPNPFLCYGLLSSQAKVDVRPAIDESRLQYIVQNQTKLRMESIQGISDAVSRGCINGEEMGKRVILPASHVGGRQYMLQNYHDGLAICKLYGPPNFFVTFTCNPNWIEITKSLEPGQAPTDRSDVIVRVFNLKLNELLQDIRSGSIFGLFVAGFQHKKWYYNCRCLQKTTLFHLTSQNVNTKTIKELLEFDPYTIPKEGCECTVTIVRISEKNKWWYPACTKCPKKPAMNRKTMQCRECGSIDYCFRYRLSFIASDGTAEANMFCFENVATKIVGKSSASLLASAADPEITPPDIAAIVSLKFTFVVTYDNESYGGHSKIFLIRSILATYGRDSLLPQIQENVDITYPNTPMQLTAKEHKSPSTAMSNLTTNSPPHAKRVLTYLSSQTSTSEKDDLSKQKGPQMPENTLEDSNPTKATFESPPKRRKELDSSCTFNDSDATKTP

SEQ ID NO: 13621 - protein, 163 aa, Zea mays
  VARIANT 60: note = Ancestral polymorphism is A, Derived polymorphism is V
  VARIANT 61: note = Ancestral polymorphism is D, Derived polymorphism is G
  VARIANT 102: note = Ancestral polymorphism is A, Derived polymorphism is T
  VARIANT 104: note = Ancestral polymorphism is G, Derived polymorphism is R
  VARIANT 142: note = Ancestral polymorphism is Q, Derived polymorphism is P
MKVGLVEKTVVLFTKDGDQHNNLHDMWCMWYELASGESYYCQGDLGQALNNFLAVEKHYADMTEDQFDFYSYCLRKMTLRAYVFMLKFQDCLHAHEYFHNAAAGAIRCYMKLHDSPTKSTTEENDEIPKLPPAQRKKLRQKQKEAKACAKHKLYMCLIHYQLF

SEQ ID NO: 13622 - protein, 354 aa, Zea mays
  VARIANT 341: note = Ancestral polymorphism is F, Derived polymorphism is S
  VARIANT 317: note = Ancestral polymorphism is A, Derived polymorphism is S
MLWVDKYRPKTLDKVTVHDQVARNLRKFVSEQDCPHLLFYGPSGSGKKTLILALIKQMFGAGAEKVKLENKTWKIDTGTRTLEIELAMLSSAHHVEMNPSDAGFQDRYVVQEIIKEMAKNRPIDAKGRRAFKVLVLNEVDKLSREAQHSLRRTMEKYSSSCRLILCCNSSSKVTEAVRSRCLNVRVNAPSEDQIVQVLEFIGKKENLILPAGFAARIAAQSNRNLRRAILFFETCKVQQYPFTSNQVAPPLDWEQYVSEIATDILTEQSPKRLFDVRQKFYELLVNCIPPESILKKLLAELLRKLDADLKYEICRWAAHYEHKMRLGSKAIFHLEAFVAKFMSIYKEFLVATFG

SEQ ID NO: 13623 - protein, 385 aa, Zea mays
  VARIANT 21: note = Ancestral polymorphism is A, Derived polymorphism is T
MALQYVEAQRQARPDLADWYASLADLYQQKLWHQLTLKLDQFLQLQAAQTGDTIIQLYNNFITDFETKINLLKLAHFAVIASRQYPDKDAAITFLEGVITKLRDTRESRINEPILYVKMQIAAINLEKGNQKECKNSLEDGKTTLDSMTDVDPTVHASFYWISSQYHKSCQEFAEFYKNALLYLAYTTVESLSESFKLDLAFDLSLAALLGDNIYNFGELLAHPIINSLIGTKVEWVYHMLQAFNTGNLAFYQELCRVHNAALTAQPALVQDERKLLEKINILCLMEIIFSRPSEDRTIPLSVIAEQTKLSISDVEYLLMKSLSVHLIEGIIDEVDSTVHVSWVQPRVLGIPQVKALRDRLDAWVGKVHTTLLSVEAETPDLVAA

SEQ ID NO: 13624 - protein, 471 aa, Zea mays
  VARIANT 152..471: note = Derived polymorphism lacks residues 152 to 471
MGDGRTGGANRPAWLQQYELIGKIGEGTYGLVFLARLKPPHPAPGRRGPPIAIKKFKQSKEGDGVSPTAIREIMLLREINHENVVKLVNVHINHADMSLYLAFDYAEHDLYEIIRHHREKLSSSINPYTVKSLLWQLLNGLNYLHSNWIIHRDLKPSNILVMGEGDEHGIIKIADFGLARIYQAPLKPLCDNGVVVTIWYRAPELLLGGKHYTSAVDMWAVGCIFAELLTLKPLFQGVEAKNPPNPFQLDQLDKIFKVLGHPTVEKWPTLANLPWWQNDHQHIQGHKYENPGFHNIVHLPPKSPAFDLLSKMLEYDPRKRITAAQALEHEYFRMDPLPGRNALLPSQPGEKIVQYPIRPVDTTTDFEGTTSLQPTQPPSGNAPPGGQSVARPMPRQMPQQPMVGGIPRVAGGVTMAAFNAASQAGMAGLNPGNMPMQRGAGGQSHPHQLRRKADQGMGMQNPGYPQQKRRF

SEQ ID NO: 13625 - protein, 1425 aa, Zea mays
  VARIANT 296..1425: note = Derived polymorphism lacks residues 296 to 1425
  VARIANT 380..1425: note = Derived polymorphism lacks residues 380 to 1425
  VARIANT 395..1425: note = Derived polymorphism lacks residues 395 to 1425
  VARIANT 1179: note = Ancestral polymorphism is E, Derived polymorphism is K
MEMGKAAAVVLAVNGKRYEAAGVDPSTTLLEFLRTHTPVRGPKLGCGEGGCGACVVLVSKYDPATDEVTEFSASSCLTLLHSVDRCSVTTSEGIGNTKDGYHPVQQRLSGFHASQCGFCTPGMCMSIFSALVKADKAANRPAPPAGFSKLTSSEAEKAVSGNLCRCTGYRPIVDACKSFAADVDLEDLGLNCFWKKGDEPADVSKLPGYNSGDVCTFPDFLKSEIKSSIQQANSAPVPVSDDGWYRPRSIDELHRLFQSSSFDENSVKIVASNTGSGVYKDQDLYDKYIDIKGIPELSVINRSSKGIELGSVVSISKAIEVLSDGNLVFRKIAGHLNKVASPFVRNTATIGGNIVMAQRLPFASDIATILLAAGSTVTIQVASKRLCFTLEEFLQQPPCDSRTLLLSIFIPEWGSNDVTFETFRAAPRPLGNAVSYVNSAFLARTSLDAASKDHLIEDICLAFGAYGADHAIRTRKVEDYLKGKTVSSSVILEAVRLLKGSIKPSEGSTHPEYRISLAVSFLFTFLSSLANSLNESAKVNGTNEHSPEKQLKLDINDLPIRSRQEIFFTDAYKPVGKAIKKAGVEIQASGRQSYPNTQINMFISSPYPFSSAYSTTKSFSDPPFCHLHLNIFSAENSNKLHPLTFLAPAVSLQDNAFNNIPFTDTGEAVYVDDIPAPKDCLYGAFIYSTHPHAHVKSINFKPSLASQKIITVITAKDIPSGGQNVGYSFPMIGEEALFADPVAEFAGQNIGVVIAQTQKYAYMAAKQAVIEYSTENLQPPILTIEDAIERSSFFQTLPFVAPKPVGDYDKGMSEADHKILSAEVKIESQYFFYMEPQVALAIPDEDNCITIYSSTQLPESTQNVVAKCVGIPFHNVRVITRRVGGGFGGKALKSMHVACACAVAALKLQRPVRMYLDRKTDMIMAGGRHPMKVKYSVGFKSNGKITALHLDLGINGGISPDMSPMIAAPVIGSLKKYNWGNLAFDTKVCKTNVSSKSSMRAPGDAQGSFIAEAIIEHVASALSADTNTIRRKNLHDFESLAVFFGDSACEASTYSLVTMFDKLASSPEYQHRAAMVEQFNRSNKWKKRGISCVPVTYEVQLRPTPGKVSIMNDGSIAVEAGGVELGQGLWTKVKQMTAFGLGQLCPDGGESLLDKVRVIQADTLSMIQGGVTGGSTTSETSCEAVRKSCVALVERLKPIKENLEAKTGTVEWSALIAQASMASVNLSAHAYWTPDPTFTSYLNYGAGTSEVEIDVLTGATTILRSDLVYDCGQSLNPAVDLGQVEGAFVQGVGFFTNEEYATNSDGLVIHDGTWTYKIPTVDTIPKQFNVELINSARDQKRVLSSKASGEPPLLLASSVHCAMREAIRAARKEFSVCTGPANSAITFQMDVPATMPVVKELCGLDVVERYLESVSAASPTNTAKA

SEQ ID NO: 13626 - protein, 429 aa, Zea mays
  VARIANT 315..429: note = Derived polymorphism lacks residues 315 to 429
MDPVADPSPSRRSLKRRPPARSPELSPKAGPGAREAAAAEELIRRVEELEAAAARLRGEKEAAEDAARGLRQELDAERASAETAASEAMLMIERLQREKAAAQMEARQFKRYAEGREDREREVQDELASLSDLAASYHSRLQSHGIDPDSFTDEDDEESYEEVGAEDVEQIHMAALEVKPNARESTNGMVKTMVVGNDGEEEVEDAEEEPSSPVEKEFEYTVDVTCASTTKPATSVVAEYVGDGNSGGLYARVEALEADRVALRREISVLRAERAQLVMAREMARRLCWEMVAEQRAIVKKAVVPASSFSVLGICKGAKLGTFGVFSHIAMIDLVERFSCDFLRSEGPTINVDVPECCKWFAVGAINTVLEKRKVYSQVYLWSVDYVPWPPAASRQIHVVESLAASAKATKMTKAFSIPAGSSQMLVNP

SEQ ID NO: 13627 - protein, 241 aa, Zea mays
  VARIANT 7..241: note = Derived polymorphism lacks residues 7 to 241
  VARIANT 32: note = Ancestral polymorphism is G, Derived polymorphism is S
  VARIANT 41: note = Ancestral polymorphism is R, Derived polymorphism is S
  VARIANT 63: note = Ancestral polymorphism is T, Derived polymorphism is I
  VARIANT 66: note = Ancestral polymorphism is Y, Derived polymorphism is C
  VARIANT 86: note = Ancestral polymorphism is R, Derived polymorphism is W
  VARIANT 92: note = Ancestral polymorphism is C, Derived polymorphism is W
MNVRVSQERFTNWSYCLKNLPGGSSGIWISFGTTQRATADRPWLEATMACSTQVHLNQTLTIIVLCCGTASCMGTKVLSTLDGIQRHKQDPCLRTLREKLGRDRSAPDQPGRHQHEPHLRDEPRRARPERKEEGEQDVRRPHHPCRARRSSSRAHETGVPSNSQGREPAEPAAAAERQRPGNRRRRGDPGAGARAGGGDAAHNRGPLLYRVCSRPQLLRSCVPVARVFDWIFFQPFSVCIS

SEQ ID NO: 13628 - protein, 182 aa, Zea mays
  VARIANT 162: note = Ancestral polymorphism is S, Derived polymorphism is P
MTMTVATMPSSDASSSPPPKRPTATGGGLLGPRPLPLKVTSSSPSSSSSSRSSSPASNKPPASTTAKKPPVIVYEHTPRVIHASPQEFMTVVQRLTGKRPRAAPTSSLPSGTVSPAATAEEGGGDPLLLTLGQRQQAAAPAPPTTTLLLPSSAMAAAGMLLSPGFIFSPSTMQAIQELNPLF

SEQ ID NO: 13629 - protein, 293 aa, Zea mays
  VARIANT 38: note = Ancestral polymorphism is V, Derived polymorphism is M
  VARIANT 58: note = Ancestral polymorphism is S, Derived polymorphism is N
  VARIANT 66: note = Ancestral polymorphism is T, Derived polymorphism is M
  VARIANT 67: note = Ancestral polymorphism is P, Derived polymorphism is L
  VARIANT 71..293: note = Derived polymorphism lacks residues 71 to 293
  VARIANT 72: note = Ancestral polymorphism is C, Derived polymorphism is Y
  VARIANT 75: note = Ancestral polymorphism is A, Derived polymorphism is V
  VARIANT 76: note = Ancestral polymorphism is R, Derived polymorphism is C
  VARIANT 85: note = Ancestral polymorphism is E, Derived polymorphism is V
  VARIANT 88: note = Ancestral polymorphism is R, Derived polymorphism is Q
  VARIANT 128: note = Ancestral polymorphism is A, Derived polymorphism is V
MAWIFRRTVGRHSDVDGAGDDEQVLLLITARCLLGKEVRERMLDKVDEVWEKITNLTSLLFLYAPTPVLRQCDRVRVALASIFAEVVRSRRRSSIRAGDVDVMQSLMEARYRDGRDTTEPEVMGLVVAIIFSGTGAEAHIGSNVAVPTRDKLVVHMELAAADVGTGPGIDCSNVGPVGCAVDAPVVQQLQIDGHGGPMWTSVGGDAAPFLCLGGFGNTCAVYEYGLEDDGGGFVLELDETRFDFGTRYELECETAEPDRVKEVLERLLTVAGVPYEYCGSSKFACFMSGKLRP

SEQ ID NO: 13630 - protein, 352 aa, Zea mays
  VARIANT 183..352: note = Derived polymorphism lacks residues 183 to 352
MAMLVPDLSFSASISSVKLPRYGASKSETFFVKKPPTFRAEARPAESGKYGTNNGRATKMVPTTEFRRTSGGLVRSGTVNGSPNSAVNGSTKVLINGSANAIDNSSTKAVINGTPKVAVNGTSLVKSSKTSLVKTQKQVRPKDDPFQEELKVLPSDEGFSWAKDNYNSVQRSIDIWSFVLSLRVRVLFDNAKWAYPGGFSEEKQDRVPAFSPEKAKAFIEKEMGCSIDVVYKEFEERPIAAASLGQVHRAMLHNGERVAVKVQRPGLKKLFDIDLRNLKLVAEYFQRSETFGGPSRDWIGIYEECSKILYEEIDYINEGKNADKFRRDFRNIKWVRVPVCFLDITMQFFGGV

SEQ ID NO: 13631 - protein, 496 aa, Zea mays
  VARIANT 318: note = Ancestral polymorphism is S, Derived polymorphism is I
  VARIANT 275..496: note = Derived polymorphism lacks residues 275 to 496
MGGAYCRRRSPLEQQLLPAVLVLLVIVAASSSFWGVAAKETGRNVITHIKGFRGPLPFHLETGYVEVDDENGARLFYYFIESERNPAEDPLILWITGGPGCSALSGLLFEIGPLKFDVAGYTEGTFPRLVYFEDSWTKVSNIIFLDSPVGTGFSYSREEAGLNVSLTESGRQHHVFLRKWLAEHPEFASQPLYIGGDSYSGYTVPVTAMDIATSSRSRDDDDGYPKPNLVGYLVGNPGTDDRYDSGGKVPFMHGMGLISDELYEAARLGCGGDFYKTPDLTNTRCASAMIAIYMVTVGVNPMHILEPFCGPQGPGVRSIFQDNGSRRSMLVQDDVPHPGFFTKQPVECRNNGYRLSNIWADDPEVRDALGIHKASIGSWSRCTMLPYYRHDVSTAIPYHVNLTKAGYRALVYSGDHDLGMTFVGTQEWIRRIGYPIVSDWRPWFVNRQVAGFTRTYAHNLTFATVKGGGHTAPEYRPKECLAMLDRWTSSAAGQLS

SEQ ID NO: 13632 - protein, 473 aa, Zea mays
  VARIANT 2: note = Ancestral polymorphism is G, Derived polymorphism is D
MGAPVNGAVVLFLLLLAGTGAVTEETAPQEPTLPAAGSGSGSGAGAGAAVGVNSNSVLVALLDSHYTELAELVEKALLLQTLEDAVGKHNVTIFAPRNEALERDLDPEFKRFLLEPRNLRSLQALLLYHVLPSRLPSGSWPAAPHPTLSGEDVELASAGAGGMRVGHAAVTRPDAVLRPDGVIHGIERLLVPRSVQEDFNRRRSLAAISAVLPTGAPEVDPRTHRLKKPAPPVPPGAPPVLPVWDAMAPGPSIAPAPAPGPGSGKHHFDGHSQVKDFIQTLLLYGGYNELADILVNLTSLATEMGRLVSEGYVLTVLAPNDEAMARLTTDQLSEPGSPENILYYHMIPEYQTEESMYNAVRRFGKVRYDTLRLPHKVVAREADGSVKFGQGEGSAYLFDPDIYTDGRISVQGIDAVLFAPDDAKATQTADPNRKPPAIVTHKKKIKLRRGKLLEATCQVAGLFGQRSRFASCQ

SEQ ID NO: 13633 - protein, 620 aa, Zea mays
  VARIANT 164: note = Ancestral polymorphism is G, Derived polymorphism is W
MGNTCVGPSITMNGFFQSVSTALWKTPQDSDALPAAAANGPGGASPGRSQSALPKPASDVHHHIAVLSEAPEPVKIGAYHSEPAPAVQSEAPEPVKIAASHSEPAPMAAKPGAAAANASPSPSPRPRPQVKRVSSAGLLVGSVLRRKTENLKDKYSLGRRLGQGQFGTTHLCVERGTGKELACKSILKRKLATDDDVEDVRREIQIMHHLAGHPSVVAIRGAYEDAVAVHLVMELCGGGELFDRIVRRGHYTERKAAELARVIVGVVEACHSMGVMHRDLKPENFLFADHSEEAALKTIDFGLSIFFRPGQIFTDVVGSPYYVAPEVLKKRYGPEADVWSAGVIIYILLCGVPPFWAENEQGIFEEVLHGRLDFESEPWPSISDGAKDLVRRMLVRDPRKRLTAHEVLRHPWVQVGGVAPDRPLDSAVLSRMKQFSAMNKLKKMALRVIAENLSEDEIAGLREMFKMIDADNSGQITFEELKVGLEKVGANLQESEIYALMQAADVDNNGTIDYGEFIAATLHLNKVEREDHLFAAFQYFDKDGSGYITADELQVACEEFGLGDVQLEDLIGEVDQDNDGRIDYNEFVAMMQKPTVGVLPKKADLQNSFSIGFREALRMA

SEQ ID NO: 13634 - protein, 947 aa, Zea mays
  VARIANT 377..947: note = Derived polymorphism lacks residues 377 to 947
MPMGALQVMLLRLVLLAASAATTAVTVTAAPPPSEVAVGALFTYDSTIGRAARLAIELAVDDVNADRTVLAGTRLNLLAQDTNCSGFLGAVEALQLMERNVVAVIGPQSSGIGHVISHVVNELHVPLLSFAATDPTLSASEYPYFIRTTISDYFQMNAVASIVDYYQWKEVTAIFVDDDYGRGGVSALGDALAAKRARISYKAAIPPNSNTDVINDVLFKANMMESRVMVVHVNPDTGTRIFSVANKLQMMATGYVWIVTDWLAAVLDSSTSRDRKEMSHIQGLIVLRQHTPESVAKNKFISKWNNAARNRSITSGLNSYGFYAYDSVWAIARGVDQFLNNGQQINFSTDPVLHDTNGSSLHLSTLKIFDGGEQMLQQLLLTNFTGLTGRVQFNSDRNLVHPAYDILNIGGSGSRLIGYWSNYSGLSVAAPEILYQKPPDTSSIAQRLHNVVWPGDSTTTPKGWVFPNNGQPLRVGVPIKPSFKELVAAGKGPDNVTGYCIDIFNAAIRLLPYPVPCQFIAIGDGRKNPNYDDIISMVAANSLDAAVGDFAIVRNRTKIAEFTQPYIESGLVIVAPVKQATSSAWAFLKPFTLEMWCVTGALFIFVGIVVWILEHRSNEEFRGSPRRQLITIFWFSFSTMFFSHRQNTVSALGRFVLIIWLFVVLIINSSYTASLTSILTVQQLATGITGIDSLISSGLPIGYQAGKFTRNYLIEELNIPESRLVPLNTIQEYADALKRGPKDGGVVAIVDEMPYVEIFLSYHCNFRIVGQEFTKEGWGFAFKRDFPLAADLSTAILQLSESGQLQRIHDEWFTRPSCSSDDSEVGATRLGLGSFWGLFLVCALICLLALLVFFIRICWQYNKYSNSEAAGEPSAAAAAAAAVDAAAAAADAVERQRRPSRLGSFKDIIQFVDKKEEEIKKTMKRRVSEKDNNQAAGSSEAHSVASA

SEQ ID NO: 13635 - protein, 417 aa, Zea mays
  VARIANT 303: note = Ancestral polymorphism is S, Derived polymorphism is L
  VARIANT 299: note = Ancestral polymorphism is L, Derived polymorphism is Q
  VARIANT 269: note = Ancestral polymorphism is G, Derived polymorphism is C
  VARIANT 258..417: note = Derived polymorphism lacks residues 258 to 417
  VARIANT 256: note = Ancestral polymorphism is V, Derived polymorphism is L
  VARIANT 239: note = Ancestral polymorphism is P, Derived polymorphism is S
  VARIANT 234..417: note = Derived polymorphism lacks residues 234 to 417
  VARIANT 233: note = Ancestral polymorphism is G, Derived polymorphism is R
  VARIANT 231..417: note = Derived polymorphism lacks residues 231 to 417
  VARIANT 191..417: note = Derived polymorphism lacks residues 191 to 417
  VARIANT 176: note = Ancestral polymorphism is I, Derived polymorphism is T
  VARIANT 175..417: note = Derived polymorphism lacks residues 175 to 417
  VARIANT 171: note = Ancestral polymorphism is G, Derived polymorphism is S
  VARIANT 154: note = Ancestral polymorphism is K, Derived polymorphism is N
  VARIANT 148..417: note = Derived polymorphism lacks residues 148 to 417
  VARIANT 72..417: note = Derived polymorphism lacks residues 72 to 417
MFGRAPKKSDNTRYYEILGVSKDASQDDLKKAYRKAAIKNHPDKGGDPEKFKELAQAYEVLSDPEKREIYDQYGEDALKEGMGGGGGMHDPFDIFQSFFGGGSPFGGGSSRGRRQRRGDDVVHPLKVSLEDLYNGTSKKLSLSRNVLCSKCNGKGSKSGASSRCAGCQGSGFKVQIRQLGPGMIQQMQHPCNECKGSGETISDKDRCPQCKGDKVVPEKKVLEVVVEKGMQNGQKITFPGEADEAPDTATGDIIFVLQQKEHPKFKRKGDDLFYEHTLILTESLCGFQFVLTHLDNRQLLIKSNPGEVVKPDSFKAINDEGMPMYQRPFMKGKLYIHFSVEFPDSLSPEQCKTLEAVLPLKPVSQYTDMELDECEETMPYDVNIEEEMRRRQQQHQEAYDEDDDVPGGGQRVQCAQQ

SEQ ID NO: 13636 - protein, 920 aa, Zea mays
  VARIANT 290: note = Ancestral polymorphism is S, Derived polymorphism is F
MGAAQLVILFLALATAVGAPPSEVAVGALFTYDSTIGRAAKLAIELAVDDVNSDGKVLPRTQLNLVPQDTNCSGFLGTIEALQLMEKNVVALIGPQSSGIGHVISHVVNELHVPLLSFAATDPTLSASEYPYFIRTTISDYFQMNAIASIVDYYQWKRVTAIFVDDDYGRGGVEALGDALALKRAKISYKAAIPPNSNTDVINDVLFKANMMESRVMIVHVNPDTGMRIFSVAKNLQMMASGYVWIVTDWLAAVLDSSANRGLKDMSHIQGLIVLRQHIPESEAKDKFISKWNNVAHNRNITSGLNSYGFYAYDSVWAVARAVDKFLSNGQQINFSTDPRLEDSNGSTLHLSSLKIFDGGEQMLHQLLLTNFTGVTGPVQFDSEHNLVRPAYDILNVVGSGSRLIGYWSNYSGLSVAAPETLYQMPRNTSTSAQQLHDVVWPGDSTTKPKGWVFPNTGLPLRVGVPIKASFKELVSGRGDNMSGYCIEIFNAAIKLLPYPVPCQFITIGDGTKNPSYIDIIRMVAANSLDAAVGDFAIVRNGTQLAEYTQPYIESGLVIVAPVKHVTSSAWAFLEPFTLEMWCVTVALFILVGIVVWLLEHRTNEEFRGSPRRQVITMLWFSFSTMFFSHRENTVSTLGRFVLIIWLFVVLIITSSYTASLTSILTVQQLSTGITGIDSLVSSSLPIGYQAGKFTKRYLTENFNVPLSRLVPLNSIQEYADALNRGPKNGGVAAIVDEKPYIDIFLSNYCSFRIVGEEFTKEGWGFAFQRDSPLAADLSTAILQLSESGQLQRIHDEWFSRSSCSSDDSEVGATRLGLGSFWGLFLVCALICLFALLVFFIRVCRQYNQYSSSEAAGEPSTAAADPVLRQRRPSRLGSFKDLIQFVDKKEEEIKKTMKRRSGEKDSQAAGFSYAQSVASA

SEQ ID NO: 13637 - protein, 500 aa, Zea mays
  VARIANT 239: note = Ancestral polymorphism is A, Derived polymorphism is G
MDVNDVLLVVLAAALAAMWWRRCSKTGGVDGLPPGPPGWPVVGNLFQVILQRRPFMYVVRDLREKYGPIFTMRMGQRTLIVVTSAELIHEALVKQGPMFASRPEDSPTRLLFSVGKCTVNSAPYGPLWRALRRNFVAEIVSPHRVKGFSWIREWAVDAHLRRLRAELAADGAVRVMASCRLTICSILICICFGAKIPDELIREIEEVLKDVMMMTMPKLPDFLPLLTPLFRKQLTEARGLRRRQLNCLVPLVRARRDFLRDGTAAAADGVEMMSGPGEAYVDSLFDLEPPGRGKRLGEEELVTLCSEVMSAGTDTSATALEWAMMHLVLDPAAQERLYDEVVAKAVVKETFRRHPPSHFVLSHAATRDTELGGYRVPADASVEFYTAWVTENPATWPDPDAWRPERFLEGGEGFDTDITGTRALRMMPFGAGRRICPAATLGVLHIQLMLANMVREFRWLPPAGEGPPDPTETFAFTVVMKNPLRAAFVERATTETATTA

SEQ ID NO: 13638 - protein, 391 aa, Zea mays
  VARIANT 28..391: note = Derived polymorphism lacks residues 28 to 391
  VARIANT 163..391: note = Derived polymorphism lacks residues 163 to 391
  VARIANT 218..391: note = Derived polymorphism lacks residues 218 to 391
  VARIANT 220: note = Ancestral polymorphism is A, Derived polymorphism is T
MVETIPNKFDNHLVYTEAFQNPTLEEIWHQIDSRMDTISRGLDVDCYEWSKNCRRSNEFNIKLNLENGKNMPRKGDLMLFSERGLESREKIIKAGSFCTILVVNHPTSMVFLMSHSPYGGSLNDQSSYKVMHPCNLTTFACSWAVMKGGCQDNTEIINLILTKNKENVDNMLQADGDYGQFTCTGKTKTASVVLLMLLKLLRTQRTLVCAPTNTALMQLASRLVSLLEESTGTSHLLDDIIIFGSEKLMNSENDMSKISLDCRIRGQYPKYTVKNSPHIVNKFLCKAKLVFCTPCNSFRFVGNQQFDNLVIDEAANLKECESLIPLGIGGIKHVVLMGDDKQLQSVMHGILCSSRFDNLAWDLKVANVELYYKAVHFYFQENPDLINDMLD

SEQ ID NO: 13639 - protein, 269 aa, Zea mays
  VARIANT 106: note = Ancestral polymorphism is P, Derived polymorphism is A
MAARPVALALPLLALVCALAASADATQFRVGGQSGWSVPGAGSEPYNTWAGRLRFQIGDQLLFVYPKETDSVLLVDAAAYNACNTSSYVSRFDDGSTVFTFDRSGAFFFVSGNEASCRANEKLIVVVLADRSGSRTPTPSSAPLPSPPSPPAAAPAPATSPSSSPPSSAAPAATPTSPTSPALAPAPAPTTTPSSPPAPVPTTTPSSPPAPTPTTPAGGGSPPPTASASAPAAEGGSSTTPPQPSTAAPVVAGFVGSLGAFIGFAMLAA

SEQ ID NO: 13640 - protein, 268 aa, Zea mays
  VARIANT 237..268: note = Derived polymorphism lacks residues 237 to 268
  VARIANT 220: note = Ancestral polymorphism is H, Derived polymorphism is Y
  VARIANT 206: note = Ancestral polymorphism is M, Derived polymorphism is T
  VARIANT 200: note = Ancestral polymorphism is A, Derived polymorphism is V
  VARIANT 197: note = Ancestral polymorphism is T, Derived polymorphism is M
  VARIANT 110: note = Ancestral polymorphism is D, Derived polymorphism is G
MEVTFATPGGREFTLEVWYFATVREMKEAVHVREGIPVASQRFFLAGQEDDGLELDDARDTAHYGIVQGSRVLLLLRDDAPPSASPAPATAVHVTVSAPEIGLCSVALDDVPTSDTVARLKELLQDRTDGALSIARTVLFLGKTEMEDGKTLAEYDPPADGMDLSAVVRQQPLVASGGGAEARSQQRIEVSVMFGETVVALEVGATDVVRDLRKEVERLHLPVRDSSGNEYFFVYKQNVMDEDRTLRWHEVKNGDTIEIFNGTVTGGA

SEQ ID NO: 13641 - protein, 244 aa, Zea mays
  VARIANT 63: note = Ancestral polymorphism is F, Derived polymorphism is S
  VARIANT 111: note = Ancestral polymorphism is G, Derived polymorphism is V
MATATSSRRVSVPALAAAAVLLLASVAAADDHNGVYDPCADASVQRGDGFTFGVVFSGRDSFSSGGVQLSPCDSRLGLANRAQVALFRPQVDEISLLTVNSSSFDPSSSGVYMVAFAGKKYAARSPPVFVGNISYTVTGFTLVLEFQKGTLQNLFWKAGGCSSCSGRSDFACVDGSCAVRTASCRGKGGQVECSPGIQLAFSGTDRHEAVLNSWYEVSKLRQYSLFGLFSNLKDSLTNQFSSFF

SEQ ID NO: 13642 - protein, 146 aa, Zea mays
  VARIANT 89: note = Ancestral polymorphism is A, Derived polymorphism is T
MQPAAMNSLFSSSWKRGVGDGGDIESGGVEMSALLPGAAAGASLDRLFEDVESIKDELRDLERIQRSLHDANEGGKSLHAAAAVRNLRTRMDADVAAAIEKAKVVKHRLESLQVARKHHTSTRKWICIAILILLLVILVIVLPIVS

SEQ ID NO: 13643 - protein, 860 aa, Zea mays
  VARIANT 382..860: note = Derived polymorphism lacks residues 382 to 860
  VARIANT 336..860: note = Derived polymorphism lacks residues 336 to 860
  VARIANT 315..860: note = Derived polymorphism lacks residues 315 to 860
MSQSYAAAASKRPFSSPTTSPSPTSSPATPLMKKAKHPAAASSSSVGTVEKNGIQLDTVAAAMGGGRTNGEEDADMVLVNQDKLPAPSVPASAGVAANLFRKKATLPQPSTSARKPLRIKIALCLNAILAALHSLGQPKLPKNFEEDTWSILKDAITAIFLKQKLSCDVEKLYQAAGDLCLHKLGANLYDRIKKECGIHIAEKISALVGQSPDLVVFLSLVQRTWQDFCDQMLIIRGIALLLDVKYVKNVANICSVWDMGLQLFRKHLSLSTEIEHKTVTGLLRLIESERLGEAIDRTLLSHLLKMLTALGMYSESFEKPFLECTSEFYATEGVRYMQQSDIPDYLKHVESRLQEEHERCILYLEANTRKPLIATTEKQLLERHTSAIIEKGFTMLMDANRINDLSRMYNLFQRVNAVELLKLALSSYIRATGQGIIMDEEKDRELVPFLLDFKASLDKILEESFAKNEAFSNTIKDSFEHLINLRQNRPAELIAKFLDEKLRAGNKGTSEEELEGILDKVLVLFRFIQIWGSFSSNMHYVRVKGKDVFEAFYKKDLAKRLLLGKSASIDAEKSMITKLKTECGSQFTNKLEGMFKDIELSKEINDSFRQSSQARTKLPSGIEMSVHVLTTGYWPTYPPMDVKLPHELNVYQDIFKEFYLSKYSGRRLMWQNSLGHCVLKADFPKGKKELAVSLFQSVVLMLFNDAQKLSFIDIKDSTGIEDKELRRTLQSLACGKVRVLQKIPKGRDVEDKDEFVFNEDFSAPLYRIKVNAIQMKETVEENTSTTERVFQDRQYQVDAAIVRIMKTRKVLSHTLLITELYQQLKFPVKPADIKKRIESLIDREYLERDRSNPQIYNYLA

SEQ ID NO: 13644 - protein, 630 aa, Zea mays
  VARIANT 347..630: note = Derived polymorphism lacks residues 347 to 630
  VARIANT 212..630: note = Derived polymorphism lacks residues 212 to 630
  VARIANT 175..630: note = Derived polymorphism lacks residues 175 to 630
  VARIANT 125: note = Ancestral polymorphism is Q, Derived polymorphism is L
  VARIANT 92: note = Ancestral polymorphism is L, Derived polymorphism is P
  VARIANT 51: note = Ancestral polymorphism is P, Derived polymorphism is L
  VARIANT 49: note = Ancestral polymorphism is P, Derived polymorphism is L
  VARIANT 16: note = Ancestral polymorphism is R, Derived polymorphism is H
  VARIANT 13: note = Ancestral polymorphism is A, Derived polymorphism is V
MPPPPAVPHDVGAVLRLLESRDLPAAARLAAGSASSSPLPLAAVLLHRPLPPRLGYSLHARAARAGLLADRYLANALLAFYVRLPDHLPHALRAFDDLPRRDVVAHSSVLAAFLRAGLPRRALLQLRTMASGGYGADDDVAPSAHALSASAKACAVLHDLRAGACVHGTTVVRGYGDDGVVLSALVDMYGHSGAPGDARKAFEEMRAPDGICYTSLISAFVRNDWFDEALRWFQAMLRTDGVWPDGCTFGSMMSALGNMKRARQGREAHAQVVTRGLCGNVIVESSTLDMYAKCGMMVDARKVFDRMKAPNAVSWCALLGGYCQTGKHEKVLSLFRQMHMQEQDDDWYSLGTLLRSCAGLSAVKLGKEIHCRSMRMRGCGDVIVESALVDLYAKCGAVDYAYRVFKMSSVRNMITWNAMICGCAQNGHGERAISLFNEMVRGGVKPDYISFIGVLFACSHTGMVEEGRNYFNSMSKDYGIPPGIEHYNCIVDLLSRVELLEEAEDLVNKSQFRDDSSLWAAILGACATHTNPDVAVRVAKKMMELEPQYHLSYVLLENVYRTIGHWEDAVKVRKLMKSRKVKKEPGTSWINANRSKLYMCNAKGAASEPVASEDFRKCSSLTDLACDFGI

SEQ ID NO: 13645 - protein, 112 aa, Zea mays
  VARIANT 85: note = Ancestral polymorphism is A, Derived polymorphism is T
  VARIANT 63: note = Ancestral polymorphism is V, Derived polymorphism is I
  VARIANT 58: note = Ancestral polymorphism is S, Derived polymorphism is L
  VARIANT 57: note = Ancestral polymorphism is R, Derived polymorphism is H
  VARIANT 54: note = Ancestral polymorphism is N, Derived polymorphism is Y
  VARIANT 53: note = Ancestral polymorphism is W, Derived polymorphism is C
  VARIANT 48: note = Ancestral polymorphism is V, Derived polymorphism is L
  VARIANT 45: note = Ancestral polymorphism is S, Derived polymorphism is F
  VARIANT 35: note = Ancestral polymorphism is G, Derived polymorphism is R
  VARIANT 30..112: note = Derived polymorphism lacks residues 30 to 112
  VARIANT 25: note = Ancestral polymorphism is D, Derived polymorphism is Y
MNGGSKAVVVVHKHAGVFISKSKEDALCTKNMVSRESVYGEKHASVQVEYRVWNPFHSKLATIVLGGVDNIWIAPGTRVLYLGAASGTIVSHMSDIQNPFPFVVRMCNGRKK

SEQ ID NO: 13646 - protein, 351 aa, Zea mays
  VARIANT 180: note = Ancestral polymorphism is N, Derived polymorphism is S
MAAALVVVIALSTTPAASAIDYTEHDLASEESLWALYERWCAHYNMARDLGEKTRRFNLFKENAHRIYEHNQGNATYTLGLNRFSDMTDEEFSRSPYGRCLFAPVQRISDGENEELQQHEDVSFNLTHGGATAALGLPPSVDWRGRSVTRVKDQGLTCGSCWAFAAIAAVEGINAIRTWSLVTLSEQQLVDCDNVDHGCAGGWIPSALDFIVRNRGIVPEGTYPYIGTQGRCRHVMAPPVTIDGYRRVLPFDVNALMSAVAAQPVAVAMESSAWAFRHYQGGVFNGNCGGRLGHAAAVVGYGDGAGGPFWIVKNSWGPKWGEGGYVRISRNAPNRLGICGILTQPLYPVKR

SEQ ID NO: 13647 - protein, 56 aa, Zea mays
  VARIANT 9: note = Ancestral polymorphism is V, Derived polymorphism is F
  VARIANT 35: note = Ancestral polymorphism is M, Derived polymorphism is I
  VARIANT 52: note = Ancestral polymorphism is G, Derived polymorphism is R
MAEGVVAGVAAPVAVARAVAGGAGDPGAGPREWKMCIYAADCSEISLVQVRGSAMN

SEQ ID NO: 13648 - protein, 380 aa, Zea mays
  VARIANT 54: note = Ancestral polymorphism is A, Derived polymorphism is G
MGSVGVGCGSPDEEQQTEGSGPLPPPAVCVTGSTGYVGSWLVRTLLRRGYRVHATARDTGKALQVLAVVEEGRDRLRVFRADMGEEGSFDAAVTGCVALFHVAASMDLHVSPAHQDNLEEHVRSSMLEPATRGTINVLRSCVRAGTVRRVVFTSSVSTLTAVDAVGRRKAVLDESCLRALDDVWRTKPVGWVYILSKRLTEEAAFRFARENGVHLVSLVLPTVAGPFLTTSVPTSIQLLLSPITGDPKLYSVLASVHARFGCVPLAHVQDVCDAHVLLMEAPRAEGRYLCAAGGYAAAQLARLLASRYLPAGDRHVVSAMATSGLFRLSKDFDDVSCSPPVVSSRRLLDLGFRFRHDVEDVVKDSVAQCLAHGFLEHPET

SEQ ID NO: 13649 - protein, 106 aa, Zea mays
  VARIANT 7: note = Ancestral polymorphism is G, Derived polymorphism is D
  VARIANT 25: note = Ancestral polymorphism is I, Derived polymorphism is T
  VARIANT 26: note = Ancestral polymorphism is A, Derived polymorphism is E
  VARIANT 73..106: note = Derived polymorphism lacks residues 73 to 106
  VARIANT 92..106: note = Derived polymorphism lacks residues 92 to 106
MASVCGGCLALQDVGVPIKFPVAGIAMGLVLDTQEFGGDGSPLILSDITGAEDASGDMDLKIAGNESGISAFQMDTKVVGITLPVMEKALLQAREGRQHILSKSVL

SEQ ID NO: 13650 - protein, 178 aa, Zea mays
  VARIANT 24: note = Ancestral polymorphism is R, Derived polymorphism is C
  VARIANT 70..178: note = Derived polymorphism lacks residues 70 to 178
  VARIANT 137: note = Ancestral polymorphism is P, Derived polymorphism is S
MLHLTAVVWNATRLAGIGSERRLREAIRIVGGEATVLADIVVIFVLAEKDSTSSALTWCRCQGMTERSRSRTGRATERDDSSFDAIPEISHARDIRPLVSLARILSPSPTPVSAVSKLDPLLETPDRWVTAFLRRFSAAFVESVGQHNIPWFRLSDAATQLLQEEWSVFAARRAGASS

SEQ ID NO: 13651 - protein, 299 aa, Zea mays
  VARIANT 1: note = Ancestral polymorphism is M, Derived polymorphism is I
  VARIANT 242: note = Ancestral polymorphism is T, Derived polymorphism is I
MMGWGEEVVALSLRGYGYGNEEDDRPEKPRRYGVTEMRSPFYSFRPANQALQEILDSLSPFVDGLKFSGGCHSLMGKELVREITDLAHRHDIYVSTGDWAEHLLRQGPSSFKQYVEECKALGFDTIELNAGSLNLPEEALLRLVRLIKSSGLRAKPMFSVKFDSSDIPASGDRAFGAYIAPVKGKTSERVEDVDLLIRRAERCLEAGADMIMIDADDVCQRAESLRTDIIAKIVGRLGLDKTMFEASNSNTSEWFVRRYGPRVNLFVEHSDVMNLERLRGFNMRRSNSASRFASPFFLI

SEQ ID NO: 13652 - protein, 207 aa, Zea mays
  VARIANT 197: note = Ancestral polymorphism is W, Derived polymorphism is R
  VARIANT 82: note = Ancestral polymorphism is P, Derived polymorphism is R
  VARIANT 64: note = Ancestral polymorphism is K, Derived polymorphism is N
  VARIANT 16: note = Ancestral polymorphism is I, Derived polymorphism is S
MAGMASLQGAMASLSISALGAATASSSSFWGNRLATYSAPQPGVCSCFPIPFRSADGLVRFMVKICPIEMRLKRWERKKCKPNSLPVLHKMHVRIGDTVQVIAGREKGKVGEVTRLFKHNSTVIVKDLNLKSKHKKGTDDEPGEIVMIEGPIHSSNVMLYSKEKSVVSRVGHKFLEDGTKVRYLVKTGEVIDSVEKWVKVFKEGNSE

SEQ ID NO: 13653 - protein, 495 aa, Zea mays
  VARIANT 205: note = Ancestral polymorphism is G, Derived polymorphism is C
  VARIANT 215: note = Ancestral polymorphism is L, Derived polymorphism is M
  VARIANT 217: note = Ancestral polymorphism is H, Derived polymorphism is R
  VARIANT 256: note = Ancestral polymorphism is I, Derived polymorphism is T
MAVLTLVNILISFAACAEALRRADFPQGFVFGTASSAYQYEGAVNEGQRGPTIWDTLTRRPGRVIDFSNADVAVDHYHRYKEDVDLIKDIGMDAYRFSISWSRIFPNGTGEPNEEGLNYYNSLINTLLDKGIQPYVTLFHWDLPQALEDRYGGWLNSQIVYETKLCRDDFVHYASTCFKEFGDRVKHWITFNEPHNFAIEGYDLGIQAPGRCSILSHIFCREGKSSTEPYVVAHNILLAHAGAFHTYKQHFKLLLIILIVKLSKCEYRFLDPLMFGHYPPSMQKLVGDRLPQFSARASMLVSGSLDFVGINHYTTLYVRNDRMRIRKLVMNDASTDAAVIPTAYRHGKKIGETAASGWLHIVPWGMFKLMKHIKEKYGNPPVIITENGMDDANNRFSKLEDDLQDDKRIQYHKDYMSNLLDAIRKEGCNVHGYFVWSLLDNWEWNSGYTVRFGLYYIDYNNNLTRIPKASVEWFRQVLAQKTAGLEYSGSTVASS

SEQ ID NO: 13654 - protein, 132 aa, Zea mays
  VARIANT 19: note = Ancestral polymorphism is A, Derived polymorphism is G
MASQQRQQQAGAAAAASSAVGFEDYLPVMAERLGEDGLMRELASGFRLLMDPARGLITFDSLRRNAPLLGLGGMSDADLRGMLAEGDFDGDGALSETEFCVLMVRLSPELMDEPRRWLDDAVDQAARFLFTS

SEQ ID NO: 13655 - protein, 476 aa, Zea mays
  VARIANT 8: note = Ancestral polymorphism is P, Derived polymorphism is Q
MEEDPLIQLVHVWSNAACDNAAASSSVCHAHSPAPASAREGEGDKENLRPEPDVEAEIGHIEAEILRLSSRLHHLRTSQQLQPPKCAEVAPAPETKAAAARPRPRGRSLGPLDIVAAVNPNLLTTDKQQPPRAAQGLKPIKQAPAAARGRGFSLAPLDTVAANPRVPSAAPQRKIQGEGGGAWPTLRPIKEPPVQRRRGVSLGPLEIHHGVGSKPGATVAAARVKPLSNKLGAVREEGQRSKQHAVPARPWPSSNAKHPLDAKQSTVASRAKARSGSMSPSRLRRQSTSKATETRAGNAKATEARGGNATLGDNNVADVLTLKCAVADHNRNVSTGKRPAGSSKVRIVPSRYSLTPGSSLIAAPVTQGKLCKQPLSGSARAASHREEMGAKLTEPSNDELSPESLAKVAELLPRIRTMPPSDESPRDSGCAARRVADLAGKRSFFTAAADDGNPVTPYQARVVELETPETAAAAEA

SEQ ID NO: 13656 - protein, 580 aa, Zea mays
  VARIANT 381: note = Ancestral polymorphism is P, Derived polymorphism is S
  VARIANT 252: note = Ancestral polymorphism is N, Derived polymorphism is K
  VARIANT 127: note = Ancestral polymorphism is M, Derived polymorphism is T
MGEAEEAPGDSNGEALELLMSMASSSLACSVSQFPAKWQSIKDKLQLLCCSLNSLCGGGGDHDDDDDKEHPVLAELLRLASATVRSIQVVASQCSDGSYKGGRLRLRSDLDNLSCKLDAHMKQLKEMAVSSGAPSPSKAIVAVRPSAEASVGEKAFYLKDLFSRIRIGGTVQRSQALAAIRELLVEDELCAKVVALDVDDGVALLTGFLESTDARIQEEAAGAVAVVASSERYRGMLVKAGVIAPLVQLLENADTASELGKQRAAHALRELTENSDNVWAVCAHGGLTTLLHACAHAGSSSKLVSSSFAVLRNLSRVEEVKMFMVEQGVVTELVKLSQKKEEVRKLGAVELLHAMALDDADVREEAVGMGVIQSLLQLIYPDLPYSYKAREVALAAIWFFCFSSANSLDDLISSDVLGWLLFYLNNGDYAVLECTLKILRHLSEVSEEYNRMMGRAGYLSALSGLLGAKSCRVREMAAQVLSSLLMLHPNRAIFIQDGDNLNRLLQLLDPAEGKLMAKDLILSAIMSLAETNSGRKKIVTSENFCSLKELAESGDFDAKKIVRKLSTNRLQTIFSKIWSV

SEQ ID NO: 13657 - protein, 408 aa, Zea mays
  VARIANT 40: note = Ancestral polymorphism is R, Derived polymorphism is C
MPGLMTMMALVPSPPMSVKQCFWSSSKKTSGCTVLLVKKCSSSQAHLLGRSWAPAATAATAAATAFRCDEQELMMMHRLADDGWVDEHMLPLLTPVEEAWQPADLLPSFSVSADEQRSQVADLQARAAAVPDDLLVCLVGNMVTEEGLPTYMTMGNRVTGASDATGCDDHGWARWLRGWTAEENRHGDLLNRYLYLCGRVDMRRVETTVHHLLRRGMRTMLRPSSAYHSLIYGSFQERATFVSHARTARLAGLHGDACLAKLCGVIAADERRHEAAYTRASDRAFEEDPDGMVRALAAVMRAKVTMPGELMADGRDDRLFDHFSAVAQRSGVYTAADYADMVEHFVRRWKVAELDAGLSGEGRRAQDYVCGLPRKIRRMEELAQDRAAQMEAQSVCFSWVFDRPVRIH

SEQ ID NO: 13658 - protein, 1061 aa, Zea mays
  VARIANT 846..1061: note = Derived polymorphism lacks residues 846 to 1061
  VARIANT 806..1061: note = Derived polymorphism lacks residues 806 to 1061
MAAPRATKRPKFASGAAPPQRGEDDYVPGNIVEIELFNFMTYDRLVCCPGPRLNLVVGPNGSGKSSLVCAIALGLAGDPSILGRASSVGAFVKRGEVAGHVKISLRGDTADDKICVTRKIDTKNKSEWLLNGATVTKKEVIDVIKKFNIQVNNLTQFLPQDRVSEFAKLSPIQLLEETEKAVGDPDLPIQHRQLVERSKELKAFEVAIRQNEQTLNNLKALNAEQERDVERVRLRDNLLRKAESMKKKVPWLKYDMMKKEFIEVIQEKEKIAKQEMEEAARVWEDSKGPIDKLKKHKATHTSNIKKISGQVNQNMDNRHKVMDHDLKLNAELKATFDEMDDLKKQEKSRQRRILKTKEDLAAAEKELEDLQPYELPKAEMAQLTDQIARISVEIKNLKAERNAMESQLKEMESKNSKLLQALRSAGADKIIEAYHWVQANKKNLRQEVYGPVLLEVNVQDKLHATYLEDHVPNYLWKSFITLDASDRDYIAREMKQYGIPVLNYLVREGTRRRPLNITPEMEQLGIYSRLDQVFQAPDTVKDVLISQAGLDDSYIGTDETHRRADEVSKLGIYDFWTPDNHYRWSKSRYSGYMSAFVDAIHPSRLFKSNLDVSGIEDLRLQKEDHVTNIEGMREAIKTLHRKQRQLEDEEANIHRQKEEIINAMRYHKKTREEIQRRVDIKKRILKDISREDDVESSTRKLVNQVAKINDERFHAMIKLKDLLTEAVALKWSHTEKNMTLIELDTKIIYYILKCRRITQEHRRRLSIAKQNAESIAMITKDLEKEFCAMPTTLEELETAIQDTESEANSMLFLNQNVLQEYQNRQHEVSKYVWFICAGQLAMLLNQSPTLPRILFDTISILQIESISNKLKDDKGEHEICCSEIETVKGKWLPTLRILVSKINDTFSRNFQEMAVAGEVSLDEHGIDFDHYGILIKVKFRQTSQLQVLSSHHQSGGERSVSTILYLVSLQDLTNCPFRVVDEINQGMDPINERKMFQQLVRAASQINTPQCFLLTPKLLPDLEYSDACSILNIMNGPWIEEPAKAWSSGDCWRTVVSAAGH

SEQ ID NO: 13659 - protein, 129 aa, Zea mays
  VARIANT 114: note = Ancestral polymorphism is W, Derived polymorphism is S
  VARIANT 108: note = Ancestral polymorphism is T, Derived polymorphism is M
  VARIANT 78: note = Ancestral polymorphism is V, Derived polymorphism is M
  VARIANT 75: note = Ancestral polymorphism is A, Derived polymorphism is V
  VARIANT 74: note = Ancestral polymorphism is A, Derived polymorphism is V
  VARIANT 67: note = Ancestral polymorphism is G, Derived polymorphism is R
  VARIANT 64: note = Ancestral polymorphism is S, Derived polymorphism is L
  VARIANT 27: note = Ancestral polymorphism is R, Derived polymorphism is W
  VARIANT 25..129: note = Derived polymorphism lacks residues 25 to 129
  VARIANT 19..129: note = Derived polymorphism lacks residues 19 to 129
  VARIANT 3: note = Ancestral polymorphism is R, Derived polymorphism is C
MYRRNPGRRPSEHLVSKLRRHEALQRRCGPGTTAYSSALEQLKSGKNADASPVDPECRYLVSISYRGLGNRIIAAASVFLYALLTDRVLLVDSSNEMGELFCEPFPDTTWLLPWRSFPLWNFSFDTRPQ

SEQ ID NO: 13660 - protein, 204 aa, Zea mays
  VARIANT 119: note = Ancestral polymorphism is P, Derived polymorphism is L
  VARIANT 100: note = Ancestral polymorphism is A, Derived polymorphism is T
  VARIANT 86: note = Ancestral polymorphism is P, Derived polymorphism is L
  VARIANT 72: note = Ancestral polymorphism is P, Derived polymorphism is A
  VARIANT 63: note = Ancestral polymorphism is G, Derived polymorphism is E
  VARIANT 62: note = Ancestral polymorphism is L, Derived polymorphism is P
  VARIANT 44: note = Ancestral polymorphism is A, Derived polymorphism is V
MFRPLSDKSRLGRKIARFISKYVIEYFPVTLHVEDYGAFDPNRAYVFGYEPHSVLPIAVGILGDLVGFMPLPKLKILASSVVFYTPFLRQIWTWLGLAPASRKSFYSYLGAGYSCIIVLGGVQEILYMDHDSELIDRPDGGYLTADLPMPRGEIVIGGPNITKGYFKNEAKTNEVYKQGIKYSDFSNLCQKQEAVKEVLGSLAK

SEQ ID NO: 13661 - protein, 287 aa, Zea mays
  VARIANT 206..287: note = Derived polymorphism lacks residues 206 to 287
  VARIANT 190..287: note = Derived polymorphism lacks residues 190 to 287
  VARIANT 169..287: note = Derived polymorphism lacks residues 169 to 287
  VARIANT 73: note = Ancestral polymorphism is T, Derived polymorphism is I
  VARIANT 52..287: note = Derived polymorphism lacks residues 52 to 287
MHDADLMLKGPTNVKKAQQQSSIKITRNHTKIRVPTDARVVDPPTRPSFASQIKGTDYPTTDGTCIRDYIDVTDLLDAHVKALNKQSLEKSAFTMLEQEEVVINTLLNLHGRSVNEFVDACKKAIGVYIKIEYLNRRPGDYAEVYSDPTKISKELNWTTQYTDLKESLSVAWRSGGGLRSENSKGEVPPEEANGGAWHGEGCAWSRMGGAGASRGVPNPRTGLPSMETADATTRTRTLMPGGGDDLGQRGTQSTREIGLSRTRIEGRRGDPGQRTHVPWIAESRGGV

SEQ ID NO: 13662 - protein, 311 aa, Zea mays
  VARIANT 32: note = Ancestral polymorphism is A, Derived polymorphism is S
MENPPPSSAGPYSAPAPAAQHQDAAKEDQDVAQLVLNLCIPELREKAIIILSKKREKCEDLALLLWHSFGTMAALLQEIVSIYRLLSPPQLSFDQSTRVCNVLVLLKCVASHPDTRMPFLNAQFPLYLYPFLNTTYKTREYEFLRISSLSVIGALVKSDDHEVIVNLLCSEIVPLCLRAIEMGSELSKKVATFILQKIMLDDTGLAYVCASSERFCAVANVLAQMVEALAEQPSPRTLKNTIRCYLRLTDDRRACQALRDYLPIALRDGTFNGLIEVDLTARLWLHQLLHNVMMSDSGGGPRPAPGPVMGM

SEQ ID NO: 13663 - protein, 174 aa, Zea mays
  VARIANT 20: note = Ancestral polymorphism is A, Derived polymorphism is V
  VARIANT 119: note = Ancestral polymorphism is R, Derived polymorphism is W
MGVRAAAAAVALVAVMGMLAPRAAAQTPNCAAKLVPCSSYMNTTGTPPDTCCGPLKDAVKNDLKCLCDLYATPEIFKAFNISLDEALGLSKRCGLSDTTAACKGTCRFTIRWWQWQQLRSSHSVGRFLRIHELLVASLVVCISIKFRMLQWTLPVLSHKMICTYDTINICLAVY

SEQ ID NO: 13664 - protein, 137 aa, Zea mays
  VARIANT 71: note = Ancestral polymorphism is L, Derived polymorphism is I
  VARIANT 70: note = Ancestral polymorphism is A, Derived polymorphism is T
  VARIANT 67: note = Ancestral polymorphism is N, Derived polymorphism is D
  VARIANT 38: note = Ancestral polymorphism is A, Derived polymorphism is T
MEPAPTATATASPALGSARPQGARPGRCHELTNTYACAQKYKKEETTTFVLYGDGAANQGQLFEALDISTLWKLPAILVCENNHYGMGTAEWRAAKSPAYYKCGDYVPGLKVDGMDVLAVKQACKFAKDHAVANGPI

SEQ ID NO: 13665 - protein, 141 aa, Zea mays
  VARIANT 7: note = Ancestral polymorphism is L, Derived polymorphism is P
  VARIANT 47: note = Ancestral polymorphism is N, Derived polymorphism is I
  VARIANT 50..141: note = Derived polymorphism lacks residues 50 to 141
  VARIANT 104..141: note = Derived polymorphism lacks residues 104 to 141
  VARIANT 124..141: note = Derived polymorphism lacks residues 124 to 141
MHILQNPKGLMAMQRGITCSSICLYSQQLSSACMSLGSAGFIIKIRNAEQITIWKAMTKTPASIALIIYTFIAVWFVGGLSVFHLYLMSTNQTTYENSRYRYDQRDNPYKRESWKTSKSSSLQRSLLPRTTSVVGANRSMV

SEQ ID NO: 13666 - protein, 445 aa, Zea mays
  VARIANT 54..445: note = Derived polymorphism lacks residues 54 to 445
  VARIANT 132: note = Ancestral polymorphism is G, Derived polymorphism is R
  VARIANT 182..445: note = Derived polymorphism lacks residues 182 to 445
MICSVMNYSNLEQTSGVLEEMDNKNMDRSSSLTRNEQEKQLECILVSILKLSKEFVDIEEKMSVERNENSPASALPQAAAHRSPDLDSRLELDDSQSQFLSSATAKSKTLAAGAELARASGPARFVCFAACGHASQPAAAPESIAATTRLRATTGWLRRRLSAEGYPAVVSRGWPVRAAKRQSPTLCQILGALDAGRTLPRAPSRCELNHSLLMGSLSAPPVLSPLVSGLIFSSDRVLKSRGLTTSSVMKSCRLSELSNAEVSSLKARPRIDSSSMSIFGTVNPIVEGVCVRGDAADKQYQVKNCRWRPTFALETDGPSNTDGQDFDEDSGFLGRTRLGRLIQAAARELLDKLNSARTNSPTKIFLVLLGFYTANALATILGQTGDWDVLVAGVVVAAIEGIGMLMYRKPIARPPGRFQSLISMVNYWKAGVCLGLFVDAFKLGS

SEQ ID NO: 13667 - protein, 72 aa, Zea mays
  VARIANT 29: note = Ancestral polymorphism is T, Derived polymorphism is M
MALLPLFLRPVVRFAARVVEGGPAVAVATILHRAGALPRNRGLERLVRDDALHGRGQDCIASFVVGVMRCLC

SEQ ID NO: 13668 - protein, 771 aa, Zea mays
  VARIANT 169..771: note = Derived polymorphism lacks residues 169 to 771
MGCKHAFKCIRTRMALIRRKKHAMIRFLKKDVADLLANGLDTHAFRRIDGLLVELNHASCYDMIEGFCHYIGKQLGSLQKQRDCPPEFREAVSTLIFAAARYPDLPELCDLRHIFTERYGNFVEHFVSQEFIRKLDSTEFTNEERFQVMQSVAEELSVSFDAKELELKLWASLQTEHDMLEKGSRKPAELAMPSSSKQICVENASCEEQEDILEKSLTRPTEPAMSLFDKTKYNGDAPCERKNKDMLENYSTKPIELATASSNKQKVTENVPGKRNYDAEPAHHTEKVEIQLVQKDIQSVADAHHTIDENSRKQQPYVSDEKEHLQKPVSPVDTNRTQKDVQKLNRRAVRHLEKELMEAVELDLNGLPKFGFGAVRFPEAEGNKTVQLNVKPNEAVRDFHIEKENDEVLHCSRLPGGSEHNGGHADSGLRAQGLENQGHPVSPLSGNTRKKAPYTKLNAVNIKNPTEKQANNGFLHDKPQHLADLGYPVQKGQGDPERALTMLPPYVEPKSNMQPVNDDPEKQTPSGYRKPNIPGQTDHLENKNVLRPVSVRRRTAKLPAPVDAYVEVPNNAKVTSQTPKSHRSHSSRRNGAKDDQNRKCNGTDDVGSETNAQITPSSQSKHVGRRNGALNHKNNSGRLMQRMQPEAAETAIDCGNLLPRNANGQMRHNSGRGGDMDEEERMMDKLLMHYSKKGSDLTNNETHTDAAQKVSLHPTGRAISLPPESVGPSKDAKVPARCTSLQPEGPRSAHVHPKMPDFDELAARVKALRKA

SEQ ID NO: 13669 - protein, 317 aa, Zea mays
  VARIANT 263: note = Ancestral polymorphism is G, Derived polymorphism is W
  VARIANT 186..317: note = Derived polymorphism lacks residues 186 to 317
  VARIANT 129..317: note = Ancestral polymorphism lacks residues 129 to 317
  VARIANT 70: note = Ancestral polymorphism is H, Derived polymorphism is Y
  VARIANT 12: note = Ancestral polymorphism is S, Derived polymorphism is L
MVAAARWIAKLLGPCLAQALQMYPDFKIKVVGHSLGGGTAALLTYVLREQNEFSSTTCLAFALGAESGVHFITTVINGADLVPTFSAASVDDLRSEVTASAWLNDLRHQIEQTRILSTFYRSASALGSWLPSMANAKARVAGAGAILRPVSTGTQGDSDDDIVDHHGDEDRMTDVELWQQLESELYRKREGEEDDIAEEMAESTIAEEVGGMAEDVLSETKEVHRFYPPRKIMHILFSSREEAVRGEEPEDDVTDGEAQSSLGIFLTPRSLYGKLRLSKMMINDHYMPIYRRNIEQLIAELEKDSLDHSSIQIARCS

SEQ ID NO: 13670 - protein, 171 aa, Zea mays
  VARIANT 7: note = Ancestral polymorphism is S, Derived polymorphism is F
MEQKPSSLVLIGLLATLCAGPGHALALRLLNGGLEFSFGSKAATAGTETEPLDPSLGDDYENEISHVEFEPELGSAAPYAAAAAGPATGPVRARNTAAGRHSMKWWLPPSTMPSFPLLPNPVGMPGPGIPGLPLPGMPFHPIGGWGAPAPPTTETTSTNVNDPNASGGGVN

SEQ ID NO: 13671 - protein, 488 aa, Zea mays
  VARIANT 292..488: note = Derived polymorphism lacks residues 292 to 488
MFPSDVDRINSDVTYTVCVQFGQFIAKFDDGSCVLVPHKYDEWVVDYQRCSLASLQKDFAARVNWGSNQEVEVSVFDKSINLETRLENDSVLRAFFDRCVDRRLYLFADVVDKSAQVISNSGLTVVSHSGVESAAYACSNSQLESASNVISPNVDVPFVDWDALEIVPITEELVGSIVPVVDEDNFYEHIGLRAEDERVEKGKDRLPDEVACEGALDVEGAAIPCTDTIPGEDAIFYDKEDPPMTVGSTYASMNEFRSAVRQHAIKGQFEVWTRKSDTCRFRGYCIAKGCPWFIVARLMHDEKSVRVTMNNFDHLCASTGRVKTRMTTYRWIAEKSIPFLKKDPNMGAKKLQEELEDKYNVKLGYSTVWAGRQKAVEQIFGTWEESFADLYRFKAEIDAKMPGSVVDLEVQEEEDGVYFRRFFCCFKPSIDGFLNGCRPFLSVDSTALNGRWNGQFSEKEESRQTRATIRISKYLHAQKAKSCAKRVN

SEQ ID NO: 13672 - protein, 750 aa, Zea mays
  VARIANT 480: note = Ancestral polymorphism is R, Derived polymorphism is W
  VARIANT 467: note = Ancestral polymorphism is D, Derived polymorphism is V
MEVLCIGTADTKFEELLFLAAQLRSALAASGSDSKVQVSIVDVSTTEKTTANDFKDIIFIPRNTILSCHLGVDQHNLPDNRGEAIALMSKALQSFLKKRYDSGMLVGAVGLGGSGGTALIAPALRLLPLGVPKLIVSTVASGHTTPYVETSDLVLFPSVVDICGINSVSRVILSNAAAAFAGMVHGILSASNESDETSTKPTVGITMFGVTTPCVNAVKDRLNKEGYETLIFHATGVGGKAMEDLVRGGFIQGVLDVTTTEVADHIVGGIMACDETRFDAIIENKIPLVLSVGALDMFDYSKNLGAESSSIFPVQVLVEVSLMRTTVEENKKFARFIADKINKSSSKVTVCLPQKGISAIDAPGMPFYDPEATSTLLGELNTLIQRTDIREVKLFPYHINDPEFANALVDAFLSMDVQASSSAQPKQDLNIGKSCSGQKISDSSIIWRTPVDFPDAKPASAKLALIDCSSMLTEILRRTRSILHKLKEQISDGTPVIGAGAGTGISAKFEEAGGVDLIVLYNSGRFRMAGRGSLAGLLPFGDANDIVLQMANEVLPVVKGVPVLAGVCATDPFRRMEYFLRQLETIGFCGVQNFPTVGLFDGNFRQNLEETGMGYSMEVEMISMAHRMGFLTTPYAFNPDEAAAMAKAGAHIVVAHMGLTTAGSIGAMTAATLDDSVLRVQAIADAAFGVNPDIIVLCHGGPISGPLEAEFVLKNTKRVHGFYGASSMERLPVEQAITNTMREYKRISLK

SEQ ID NO: 13673 - protein, 529 aa, Zea mays
  VARIANT 426: note = Ancestral polymorphism is P, Derived polymorphism is L
  VARIANT 396: note = Ancestral polymorphism is S, Derived polymorphism is L
  VARIANT 314..529: note = Derived polymorphism lacks residues 314 to 529
  VARIANT 310..529: note = Derived polymorphism lacks residues 310 to 529
  VARIANT 301: note = Ancestral polymorphism is H, Derived polymorphism is Y
  VARIANT 274: note = Ancestral polymorphism is R, Derived polymorphism is W
  VARIANT 273: note = Ancestral polymorphism is N, Derived polymorphism is Y
  VARIANT 264: note = Ancestral polymorphism is D, Derived polymorphism is Y
  VARIANT 226: note = Ancestral polymorphism is P, Derived polymorphism is L
  VARIANT 209..529: note = Derived polymorphism lacks residues 209 to 529
  VARIANT 202: note = Ancestral polymorphism is P, Derived polymorphism is L
  VARIANT 190: note = Ancestral polymorphism is G, Derived polymorphism is D
  VARIANT 188..529: note = Derived polymorphism lacks residues 188 to 529
  VARIANT 186: note = Ancestral polymorphism is R, Derived polymorphism is H
  VARIANT 185..529: note = Derived polymorphism lacks residues 185 to 529
  VARIANT 181: note = Ancestral polymorphism is V, Derived polymorphism is M
  VARIANT 180: note = Ancestral polymorphism is R, Derived polymorphism is C
  VARIANT 163..529: note = Derived polymorphism lacks residues 163 to 529
  VARIANT 159: note = Ancestral polymorphism is R, Derived polymorphism is W
  VARIANT 148..529: note = Derived polymorphism lacks residues 148 to 529
MMKSLLPQSQLRRSAAAAARSSAGGAAGADGAMSDGGGAGPRAPASSTFWFLLHALCCLISLFLGFRFSRLLFFLLFSTTALYRSSTSSSSAAVLRATTTTTTTTTTTTTTTNTFTLSFAAANTPPSTPANRTALDVADKGAASGNPQSHVVVGRHGIRIRPWPHPDPVEVMRAHRIMERVQEEQRRWYGVKEPRQVLAVTPTYSRAFQALHLTGLLHSLRNVPYPLTWIVVEAGGTTNATASMLARSGLTFVHIPFPDRMPHDWADRHATENRMRLHALRVIRERKMDGVVVFTDDSNVHSMELFDEVQKVQWMGAVSVGILAHTGTADQLRLSEEDKQNMPLPVQGPACNSSGHLIGWHTFNSLPFSGKTATVVGEAAPVLPRGLEWAGFVLNSRMLWKEADGKPDWVKDLDAVGENGEEIENPLTLLNDPSSVEPLGNCGKKVLLWWLRVEARADSKFPEGWVIEPPLEVVVPAKRTPWPETTTELPAELLDDKQEQEDRRLSRANKSSRPRGTTKRKGDPQGQDN

SEQ ID NO: 13674 - protein, 189 aa, Zea mays
  VARIANT 11: note = Ancestral polymorphism is S, Derived polymorphism is Y
  VARIANT 16: note = Ancestral polymorphism is P, Derived polymorphism is A
  VARIANT 44: note = Ancestral polymorphism is L, Derived polymorphism is F
  VARIANT 49: note = Ancestral polymorphism is S, Derived polymorphism is P
  VARIANT 56: note = Ancestral polymorphism is R, Derived polymorphism is M
  VARIANT 107: note = Ancestral polymorphism is E, Derived polymorphism is D
  VARIANT 126: note = Ancestral polymorphism is V, Derived polymorphism is I
MVRSAPLLPWSYDQCPCVLRARTVHVGSCRLISCLISRQGKVRLTKWYSPYTQKERTKVIRELSGLVLTRGPKLCNFVEWRGYKVVYRRYASLYFCMRIDADDNELEVLEIIHHFVEILDRYFGSVCELDLIFNFHKAYYILDEILIAGELQESSKKNVARLIATQDSLVEAAKEEASSISNIIAQATK

SEQ ID NO: 13675 - protein, 511 aa, Zea mays
  VARIANT 151..511: note = Derived polymorphism lacks residues 151 to 511
  VARIANT 191: note = Ancestral polymorphism is V, Derived polymorphism is M
MDDATYRPEDQCDGPIATHCLTQARSSKSDVDTIGRCAAMAVSPDQQQPPAGVGSPLPSPRLRVRVRDTTLVPPSPSPPETSLPLTFLDIFWLHSPPVERLFIYRLAPDADVDAIISRLRDSLHQAVRAFYPLAGRLRLTPGTSDRYELHYRPGDAVTFTVAECDDDDADAHFDALATDEPREVAKIATLVPPLPERGGLFAVQATLLPARRGLSIGVTVHHAACDGSGSTHFLHTWAVACRAGAEAPPPPPPVIDRSLIADPRRMYDVFIQGAPSTEEYEFVKMSADQLFATFALSKDELKRIKDAVAEEAARRGVAPPRCSSLVATFGFVWSCYQQAKEASSGAGEFPMTCMAFPVDHRSRMEPPLPDKYLGNCVGPAFALAPTGELAQAGAGGFFSACAAVASSIDEAVRDIETSNVEVWFDRIRDLIPMGFLTVAGSPRFRVYDMDFGFGRPAKVDVVSVARTGAVAVAESWDGNGGIEVGVSLQPAAMKRYRKCFADAIAWLHQRT

SEQ ID NO: 13676 - protein, 321 aa, Zea mays
  VARIANT 18..321: note = Derived polymorphism lacks residues 18 to 321
MKGLSGAKLLVVHPSSNKSPGGAGSPGAVLGARRRVCAAVFLACFACVSLATTLLSAARDPAGAGARSAAFAVPVAAAAREGQGLPGHVFDALVQYASAGGNSTASMPGADVRAIAAVLRRRAPCSLLVFGLGAETPLWRALNHGGRTVFLDENQYYVSHLEGRHPGLEAYDVAYTTTVREFPDLLDSARAARGAECRPVQNLLFSDCRLAINDLPNQLYDVSWDVILVDGPRGYTASSPGRMSAIFTAGVLARTRAGEGVKTDVLVHDYEREVERACSREFLCEENRVVETSTRSLAHFVVRGGSSARRDAFCSGTAAAH

SEQ ID NO: 13677 - protein, 387 aa, Zea mays
  VARIANT 281: note = Ancestral polymorphism is L, Derived polymorphism is R
  VARIANT 203: note = Ancestral polymorphism is D, Derived polymorphism is G
  VARIANT 132..387: note = Derived polymorphism lacks residues 132 to 387
  VARIANT 80..387: note = Derived polymorphism lacks residues 80 to 387
  VARIANT 21: note = Ancestral polymorphism is D, Derived polymorphism is E
MDGNARSTAASQKKSIVPDDDLVELLWHNGSVVAQPQGHHRPAPPSDRDCPGTSGLTAEETAAWFPDTLDDSLEKDLYTQLWYSTIADAAPQHEGMFPGPTSQPSPPPPVASSGVESSWAGDICSTFCGSNQVPRTPAGIRGKDAALQPEVPSGAGAHDGTSSSGGSGSNYGGSGLPSDSVHVHKRKGMCRDESDSRSERRRDRIKEKMRALQELIPHCNKTDKASILDETIEYLKSLQMQVQIMWMTSGMVPMVFPGAHQYMPPMALGMNSGCIPAAQGLSQMRRLPYMNHPMPNHIPLNSSPAMNPMNPLNTVNQFQNGHLREASNHFLHLDDGRAAVPRVPRPGPHVYGHQIAQAEEHNRILEVAASTVIPTSKAGQPPTFDGV

SEQ ID NO: 13678 - protein, 52 aa, Zea mays
  VARIANT 2: note = Ancestral polymorphism is G, Derived polymorphism is E
  VARIANT 6: note = Ancestral polymorphism is A, Derived polymorphism is V
  VARIANT 12: note = Ancestral polymorphism is R, Derived polymorphism is H
  VARIANT 13..52: note = Derived polymorphism lacks residues 13 to 52
MGKTRALLLALRQVINFLKSKYRLAKYVPDSHAEGFKDGKKVQGLCTRIANQ

SEQ ID NO: 13679 - protein, 153 aa, Zea mays
  VARIANT 22: note = Ancestral polymorphism is P, Derived polymorphism is R
MVIDVSNDESDEEVPQAIPLFPKADDDKSKESKCDVEKPAATESSKPKVSLEETKDPEKHEVDVGGTDDDESDEDFVDSEEGESDDDESTKSKNRPSSLTLEDTSREKGKDHNTLVMMLRKISTSMSKLVKTARSIIDNYKQSTGHSCKSCSK

SEQ ID NO: 13680 - protein, 271 aa, Zea mays
  VARIANT 143..271: note = Derived polymorphism lacks residues 143 to 271
  VARIANT 80..271: note = Derived polymorphism lacks residues 80 to 271
MYTAPSSPDANILGKKTGFRVERGEFRFSFMQNLKCYITKPLLEMLSFDHRPCPYAGLGGVEIFEKRKTVLGPSLFHYYQESAVTNLYEALDNRDGILSRCNPMKGLQRGHGKTIRQESKETMTSYLRISKEAGIRSCLHNSWDGRGSRSGAAPVVAQISKEAGYLTVGVVTYPFSFEGLLEALEKLEKSVDTLIVIPNDKLLDVADENMPLQDAFLLTDDVLRQGVQGISDIITIPGLVNVDFADVKVVMKNSGTSLLSYPLKDTEVIDH

SEQ ID NO: 13681 - protein, 147 aa, Zea mays
  VARIANT 118..147: note = Derived polymorphism lacks residues 118 to 147
  VARIANT 117: note = Ancestral polymorphism is R, Derived polymorphism is W
  VARIANT 111..147: note = Derived polymorphism lacks residues 111 to 147
  VARIANT 72: note = Ancestral polymorphism is V, Derived polymorphism is G
  VARIANT 69: note = Ancestral polymorphism is R, Derived polymorphism is H
  VARIANT 56: note = Ancestral polymorphism is A, Derived polymorphism is V
  VARIANT 55: note = Ancestral polymorphism is T, Derived polymorphism is A
MASSVASVRPVALGDEPMEIPRLKIDAETSHLLRILLALWRWSRATWRRRAAMVAVVCVLLFMSATLAHRVVDVSAFTTGRLQLHRPRSYTTVYDLQRFATSSDSPSLRLRRGGGRRRRRHGVSTPCLHRFVAFTATPPPEDLDSDT

SEQ ID NO: 13682 - protein, 147 aa, Zea mays
  VARIANT 96..147: note = Derived polymorphism lacks residues 96 to 147
  VARIANT 36: note = Ancestral polymorphism is T, Derived polymorphism is K
  VARIANT 31..147: note = Derived polymorphism lacks residues 31 to 147
MFHSCWSFKIALHDRKGNEEVRVFVKVDGKEFWIGKLSVDKYPQCKTSLVFEKESRIDGIEERECVLDIPNVFLSLGINNMVIDVSNDESDEEVPQAIPLFPKADGIIPISSDGDECERSNEEDEDSKGLLLESEVAFMDYVREVRY

SEQ ID NO: 13683 - protein, 75 aa, Zea mays
  VARIANT 4: note = Ancestral polymorphism is Q, Derived polymorphism is R
MLVRLLYLPQKRDRRKSSSQLLLEGSKREAEDKIVPQEIDADDSDVEPKSDDERFVPLSFSAFYRNAPVIILLLA

SEQ ID NO: 13684 - protein, 372 aa, Zea mays
  VARIANT 27: note = Ancestral polymorphism is D, Derived polymorphism is V
  VARIANT 109..372: note = Derived polymorphism lacks residues 109 to 372
  VARIANT 111: note = Ancestral polymorphism is R, Derived polymorphism is S
  VARIANT 186: note = Ancestral polymorphism is R, Derived polymorphism is W
  VARIANT 204: note = Ancestral polymorphism is G, Derived polymorphism is V
  VARIANT 219: note = Ancestral polymorphism is A, Derived polymorphism is E
MNATLILPVLKQDQIWKDQTKFEDIFDVDHFINYLKEDVRIVRDIPDWFTEKDELFTSIKRTVKNVPKYASAQFYIDNVFPRIKEKKIMSIKPFVDRLGYDNVPMEINRLRCRVNYHALKFLPDIEEMADKLATRMRNRTGSLNPYMALHLRFEKGMVGLSFCDFAGTREEKAMMATYRQQQWPRRYKNGSHLWSLALEKRKEGRCPLEPGEIGIILREMGYTKETQIYVASGQVYGGNNRMAPLRNMFPNLVSKEDLASKEEMEPFKKHVTSLAALDFLVCLKSDVFVMTHGGNFAKLIIGYRRYMGRHRLKSIKPDKGLMSKFFGDPYMPWATFVENVMITHETRTGLPESTFPHYDLWENPLTPCMCRA

SEQ ID NO: 13685 - protein, 402 aa, Zea mays
  VARIANT 131: note = Ancestral polymorphism is I, Derived polymorphism is M
  VARIANT 263: note = Ancestral polymorphism is A, Derived polymorphism is T
  VARIANT 346..402: note = Derived polymorphism lacks residues 346 to 402
MGRKIITQSKKIFQLNLKINRMMKNTLKMQEACSMEKEGEEDQKIDMLPFNLPNLKKGNMSENLWNNPNQLSEEMVLSMKDIFLNLSTSSKMSPEEPFSNSSSSAEHLSGSTLTTLSDSSVIASVQPSPSMYLNHDDGNFDPYNVNGKEAQRDIGSYSSVAEVSWMYIGNEQLEYASGALRKFRFLVEQLSKVDTSCMNCDERLAFWINLYNALIMHAYLAYGVPENDIKLFALMQKACYTICGQPVSAAEIEFVILKSLMLALHKFKTSENLKKYSIDGTEPRVLFALCCGMFSSPAVRIFSAENVRAELQESMRDYIRASVGVNDKGELMVPKLLQSYAKGIVEDSLLADWICRHLTLDQLAAVQDTSSSHTQRLLGVRSFSVIPFDSRFRYLFLFDNSR

SEQ ID NO: 13686 - protein, 102 aa, Zea mays
  VARIANT 64: note = Ancestral polymorphism is K, Derived polymorphism is E
  VARIANT 3: note = Ancestral polymorphism is R, Derived polymorphism is H
MGRSSRSRAVVCPALLLAAFVLLLLTPPCSSAEAPAELKAAAVVRRRMLLPLLAVSRPSTSRQEAEQQQQMRVGGGTTPFKQAAASLGRKIPRSGRNPIQNR

SEQ ID NO: 13687 - protein, 158 aa, Zea mays
  VARIANT 17: note = Ancestral polymorphism is S, Derived polymorphism is R
  VARIANT 50: note = Ancestral polymorphism is G, Derived polymorphism is D
MAAAPERPLAVDFEALSYISSLVEAFQAFDSDNDGLVTAPELRGLLASLGLAKSEAEARDMLARADADRDGRLSVEEFLDVMNAGELGLGALGAVLQSALPTLEAAGGALVGADELARALGALGSASAEDCAAIVECLDGDGDGAITIEEFRLMADLL

SEQ ID NO: 13688 - protein, 85 aa, Zea mays
  VARIANT 41: note = Ancestral polymorphism is P, Derived polymorphism is Q
  VARIANT 40: note = Ancestral polymorphism is V, Derived polymorphism is L
  VARIANT 16: note = Ancestral polymorphism is A, Derived polymorphism is G
  VARIANT 15: note = Ancestral polymorphism is A, Derived polymorphism is G
  VARIANT 14: note = Ancestral polymorphism is M, Derived polymorphism is T
  VARIANT 9: note = Ancestral polymorphism is A, Derived polymorphism is T
MASTSNFLAVALVMAAVLLGGAGTCHAARRLDELPPLPQVPAGIPSLPAPQVPELPVPPVPELPMPQVPPVPQLPGVPLPPATVP

SEQ ID NO: 13689 - protein, 321 aa, Zea mays
  VARIANT 178..321: note = Derived polymorphism lacks residues 178 to 321
MSLVLAAPCREAFQLNSSIPSSSMEAMPRPSVAPSLQLQARPCPRWPRRKHCPPSSVASRRVACSASAADADVVDLFDAAKLTVDKFVTSGMVVGLGSGPASALAIQYLGTRLRRGSLAGITAVTSSVLSASEADKAGIRANSYQEGTQIDFAFTDAEAIEEGTLAAVIGRRKTESGEPSFMAEKAMAKSAHKLAFITGNDKYVTTGVEGSIPVLIKSGNWIDTAEEIDDLFLGDAEVWRRPSFGTAGPLGGDHPLVTKEGHHVLDVIFTTPIQDLGQVAEKLDKVDGVVDHGIICSNQPYAVIASKGEVQVLDEKSSVIQ

SEQ ID NO: 13690 - protein, 249 aa, Zea mays
  VARIANT 22: note = Ancestral polymorphism is G, Derived polymorphism is V
MATMALRAVATALLVVAASVCGASASTLVLYNRCGETVWPGIQPSAGKEVLARGGLQLAPGRSASVRLPAGWSGRVWGRQGCSFDAAGRGRCATGDCGGALYCGGAGGAPPATLAEITLGTASSQDFYDVSLVDGYNIPIAMTPVHGSGARCAAAGCVSDLNRVCPAGLAVRGEGRVVGCRSACAAYGAPQYCCTGQFGSPQQCKPTAYSRLFKSACPKAYSYAYDDPTSILTCSAGASYVVTFCPHRR

SEQ ID NO: 13691 - protein, 257 aa, Zea mays
  VARIANT 78: note = Ancestral polymorphism is A, Derived polymorphism is V
MTSEEHPSSASSDGSTTIGSDEHLDPSPSPSTSFDSPPESDDSAASSLLSDGSSESEPIIFKKPRPPVRSWPASDEIAILETVASHRQKHGRLPLADDLAAAVRGRLSVGDRLSAAQITRRLCALRNRYDNTVIRLKRGTIPAKDSDVTIYRLSKLIWEGTRRGRIEKKTRVPDARNDPRGFDDLAELYPCLSAEVEAIGARCGYGALKRAFGRIGDDTAARLEAKLKRQRMAETRASGKLDRLRSRVANALQGFNK

SEQ ID NO: 13692 - protein, 293 aa, Zea mays
  VARIANT 155: note = Ancestral polymorphism is I, Derived polymorphism is V
  VARIANT 47: note = Ancestral polymorphism is I, Derived polymorphism is V
MREILHIQGGQCGNQIGAKFWEVICDEHGIDATGRYAGDSDLQLERVNVYYNEASGGRFVPRAVLMDLEPGTMDSVRSGPFGQIFRPDNFVFGQSGAGNNWAKGHYTEGAELIDSVLDVVRKEAENCDCLQGFQVCHSLGGGTGSGMGTLLISKIREEYPDRMMLTFSVFPSPKVSDTVVEPYNATLSVHQLVENADECMVLDNEALGLKMAGTFVGNSTSIQEMFRRVSEQFTAMFRRKAFLHWYTGEGMDEMEFTEAESNMNDLVAEYQQYQDATADEEYEDEEEEENVAE

SEQ ID NO: 13693 - protein, 429 aa, Zea mays
  VARIANT 359..429: note = Derived polymorphism lacks residues 359 to 429
  VARIANT 263..429: note = Derived polymorphism lacks residues 263 to 429
  VARIANT 261..429: note = Derived polymorphism lacks residues 261 to 429
MPSTSPPASPAACRSPPPAPCVASPMDTVSEAAMAAAMASLGAAAVVHRNTEPHAQAAIVRAAKSRRLPFVSSVPFFSPSSAPTLNGFAGSDYALVTERGDSLSRLVGVAVAADAVSRDVPVAVSEYMRMRQTPRSASASFDFEEAAAFLGDEGLDYAPLVSDDGEVVDLITVKDVERIRSYPKLGKPSLGVDGKFVVAASIGTREDGKGRLERLVKAGANAIVIDSSQGNSIYQLDMIKFAKKMYPEVDFIGGNAVTIAQAQNLIQAGADGLRVGMGSGSICTTQEVCAVGRGQATSVYKVSSYANDHNVPVIADGGISNSGHIVKALSLGASTVMMGSFLAGSYEAPGTYEYKDGRRVKKYRDMGSLEAMTKGSDVKYLGDTFKLKVAHGVVGAVADKGSVLRFIPYTMQAVGQGLAQILCGQLMIF

SEQ ID NO: 13694 - protein, 193 aa, Zea mays
  VARIANT 19: note = Ancestral polymorphism is Y, Derived polymorphism is H
MRRAKPPPQQPSPSPEIRYRGVRRRPSGRYAAEIRDPAKKTPIWLGTYDCAEAAAHAYDAAARSLRGPTARTNFPSAAVRAPRHRAPSASAAAPTAPAAAATSSHSSTVESWSGGAPRAAALPRSAVPMEEDDDEDCHSYCGSSSSVLCDDACGDDAVASRAPLPFDLNLPPPLDAAAETHQMGARYDTLLRL

SEQ ID NO: 13695 - protein, 157 aa, Zea mays
  VARIANT 4..157: note = Derived polymorphism lacks residues 4 to 157
  VARIANT 10..157: note = Derived polymorphism lacks residues 10 to 157
  VARIANT 22: note = Ancestral polymorphism is D, Derived polymorphism is H
  VARIANT 44: note = Ancestral polymorphism is T, Derived polymorphism is A
  VARIANT 62..157: note = Derived polymorphism lacks residues 62 to 157
  VARIANT 75: note = Ancestral polymorphism is S, Derived polymorphism is L
  VARIANT 77: note = Ancestral polymorphism is I, Derived polymorphism is V
  VARIANT 79: note = Ancestral polymorphism is S, Derived polymorphism is L
  VARIANT 84: note = Ancestral polymorphism is K, Derived polymorphism is N
  VARIANT 120: note = Ancestral polymorphism is R, Derived polymorphism is H
  VARIANT 130: note = Ancestral polymorphism is D, Derived polymorphism is N
  VARIANT 132: note = Ancestral polymorphism is P, Derived polymorphism is H
  VARIANT 139: note = Ancestral polymorphism is R, Derived polymorphism is K
  VARIANT 143: note = Ancestral polymorphism is E, Derived polymorphism is K
MDAEDMEDVQAPTAVQVVKPVDSFSINQKYFKMCPRKQKRHVKATYEMGLTDICRNLKGYELQFWPFFGYGEKILVVFSYVFLKNGPSYNEPPLQAKEQYCSYPYKALNNYSMYATVRPRVAIIMGSQTDLPVMKVVERVSKEFNIPCEDVEILRRV

SEQ ID NO: 13696 - protein, 145 aa, Zea mays
  VARIANT 26: note = Ancestral polymorphism is E, Derived polymorphism is D
  VARIANT 48: note = Ancestral polymorphism is V, Derived polymorphism is I
  VARIANT 118: note = Ancestral polymorphism is H, Derived polymorphism is Y
  VARIANT 129: note = Ancestral polymorphism is A, Derived polymorphism is V
MAFMRSRSNASSGMGVAPNIRETFVELQMKKAFRYVIFKIEEKQKQVVVEKTGATTESYDDFLASLPENDCRYALYDFDFVTGENVQKSKIFFIAWSPSTSRIRAKMLYSTSKDRIKYELDGFHYEIQATDPSEVDIEVLRERAH

SEQ ID NO: 13697 - protein, 98 aa, Zea mays
  VARIANT 55: note = Ancestral polymorphism is D, Derived polymorphism is G
  VARIANT 39: note = Ancestral polymorphism is P, Derived polymorphism is A
  VARIANT 19: note = Ancestral polymorphism is A, Derived polymorphism is S
MGKSASVQRGHVPVLVGEAGKEEEELRRVLVHRKVLQHPYFAGLLELAAAEFGHDQKGVLRIPCDVRRFHGVVQLIRRSRTRRRKKVTVPCLVFLKLL

SEQ ID NO: 13698 - protein, 204 aa, Zea mays
  VARIANT 171: note = Ancestral polymorphism is A, Derived polymorphism is T
  VARIANT 139: note = Ancestral polymorphism is V, Derived polymorphism is I
  VARIANT 107: note = Ancestral polymorphism is M, Derived polymorphism is L
  VARIANT 84: note = Ancestral polymorphism is A, Derived polymorphism is V
  VARIANT 46: note = Ancestral polymorphism is A, Derived polymorphism is E
  VARIANT 40: note = Ancestral polymorphism is L, Derived polymorphism is V
  VARIANT 14: note = Ancestral polymorphism is Q, Derived polymorphism is K
  VARIANT 10: note = Ancestral polymorphism is T, Derived polymorphism is M
MADSGSIVVTEARKQHPLSQIAASGTHRLLLKQWVKEEDLLARRVALREARLDGARKEIAFLYCAFFAFHAASVLLLFLSSSTAGPASACRRSWIPCLVSLLSSLAMLWALRYKSDTEAVLERLLAREREDALLLARCVSELKRKGLHFDLLKEVDALRRAKSLRVEAKGADRPRRWQARDLAVFALFAVACGVLVLTRFLLCN

SEQ ID NO: 13699 - protein, 454 aa, Zea mays
  VARIANT 79..454: note = Derived polymorphism lacks residues 79 to 454
MGSDFKSIPLIDIGPLVEKIDDPSMANDKDLLQVVRLLDDACKEAGFFYVKGHGIDESLMREVRNVTREFFQLPYEEKLKIKMTPQSGYRGYQRIGENITKGKPDMHEAIDCYTPIRPGKYGDLAKPMEGSNLWYVCFQIPTSSLFSRYIFKHCKCLHLLKVCPSIACSRGLKIENRKPKYPSNFEVLLENYIKLCRDISRKIMRGIALALGGAIDAFEGDTAGDPFWVLRLIGYPVDIPEEQRTDTGCGAHTDYGLLTLVNQDDDICALEVAAVKPQHMGTYSLKSSSIGKNVSFASPIATVLGGHNSSVMCWELQNSVAREGSAASPPTMMEVDGSDKRTNTAVPEPSLLPSEVQNRSGEWIYATPIPGTFVCNIGDMLKVWTNGIYQPTLHRVVNNSQHYRVSVAFFYESNFDAAVEPVEFCREKTGGAAKYEKVVYGEHLVQKVLTNFVM

SEQ ID NO: 13700 - protein, 105 aa, Zea mays
  VARIANT 66..105: note = Derived polymorphism lacks residues 66 to 105
  VARIANT 44: note = Ancestral polymorphism is R, Derived polymorphism is I
MAAFSRTTGSDIVGNCAIAKRLTRPSTASTLRSSLRSDQCYSNRIRVQSEECATFVIENIVGDYFQPKKPTDSTFWHTTFTLRKTSFISINFNLIYSNVRRMSMS

SEQ ID NO: 13701 - protein, 660 aa, Zea mays
  VARIANT 47..660: note = Derived polymorphism lacks residues 47 to 660
  VARIANT 28..660: note = Derived polymorphism lacks residues 28 to 660
MGAEQGYEDMQGTFRDSEVFEFVGKVLQSVRMDPFLIDIRDKDYYDYMLGIIDPTKKRSTDDEAMFVTILRALSQAVSKIDTVYHHALLHNIFTMCVWHLHSDTRVVFLDLITRLAAVADQYLRECLQMLVNNFTPPGPLIRYIEEPRWLPKKEKIYSQLQESLKMISDTVPLAPRMLKDIIDRSMPKLFDSKAKMVSFVKCMLGLDAVVWDIIGSSLLEKVVYLLTELDVNITWEDILQDEHNKGIFDMELEDLAEDEDNLGQEGTKVHFGGNMCAEKLDGLMVVVCEHLKSRVEEPERLIKWKLSGPPGQPKPQGNVRGTVLSGSQGLNQEFVTLKAIFKSHVLRVHKSKFAQFIMFYACSLHPEIGDGFANFLTDIFIDKDKNEDAITRVSAVSYVGSYLSRARFISCIYDFCICSVHLRFMLCYVLRLVDWCDYYCGHQLDNGVTANPIKHQLFYASCQAVMYVLCFRLRSIMDYPNLKQQLFRMRIRDILVHPLQPLKVCLPSIVNEFLRQATAASLFHAPAISMHEDAVESDLSKAFGGLNRLDMFFPFDPYLLKESDRYIRPNFEFWSLVKTTYSNDNSDEDDEELGDIDAPGMNVGSLDDHFEIDFNSDDDIEYKMNKMSITPQRTFYHPLATNSESNRMPARIRPSVSPPS

SEQ ID NO: 13702 - protein, 232 aa, Zea mays
  VARIANT 175: note = Ancestral polymorphism is R, Derived polymorphism is S
MAALAASSTAAFAAKPRLPRARLTVACSATGGDGNGSSSSVSLASSVKTFSAALALSSVLLSSAATSPPPAAADIAGLTPCKESKAFAKREKNSIKKLTASLKKYAPDSAPALAINATIEKTKRRFENYGKFGLLCGADGLPHLIVSGDQRHWGEFVTPGLLFLYIAGWIGWVGRSYLIAISGEKKPAMREIIIDVELATRLLPRGFIWPVAAYRELINGDLVVDDKDIGYY

SEQ ID NO: 13703 - protein, 230 aa, Zea mays
  VARIANT 19..230: note = Derived polymorphism lacks residues 19 to 230
  VARIANT 45: note = Ancestral polymorphism is A, Derived polymorphism is V
  VARIANT 74..230: note = Ancestral polymorphism lacks residues 74 to 230
  VARIANT 82..230: note = Derived polymorphism lacks residues 82 to 230
  VARIANT 95: note = Ancestral polymorphism is P, Derived polymorphism is L
  VARIANT 100: note = Ancestral polymorphism is A, Derived polymorphism is V
  VARIANT 139: note = Ancestral polymorphism is A, Derived polymorphism is T
MDPTPTAENTTVLGKQRTQSPALRNLVTIQNITDPMSGQATNYNVAMFFFACTLNRWFSKLPLAMNSYTRSSSQSSHPRASQGSDGRVFLENLSPTAWMALTLITSPKGSFLPSHVTAATAGANNLQQFFLATPPTPYACASSSSCPPTHPSPPPPTSPTSSLALILGQHRRESQDKDADIGNEIPAGTTSASLALGPLPASVTPGSTACGWGLSASGEGRLRLAVARID

SEQ ID NO: 13704 - protein, 179 aa, Zea mays
  VARIANT 25: note = Ancestral polymorphism is K, Derived polymorphism is M
  VARIANT 24: note = Ancestral polymorphism is R, Derived polymorphism is C
  VARIANT 14..179: note = Derived polymorphism lacks residues 14 to 179
MRSGWSVEGATDVWVDSLKKKHKRKRHASEEQFSRFLHYEVDAIRKACASLEEGYLPLVTFIVVQKRHHTLFCPEDHRSHRQPDRRGNILQVTVVDTKICHPSEFDFYLCSHSGIQDELDAKPEELEGEELESKLLEPVAALSVHPVHVPGNKQLACPTSQKVIAKYDELAALQAEMAL

SEQ ID NO: 13705 - protein, 163 aa, Zea mays
  VARIANT 124: note = Ancestral polymorphism is A, Derived polymorphism is T
  VARIANT 10: note = Ancestral polymorphism is V, Derived polymorphism is A
MDGLKSRSHVIVMGATNRPNSIDPALRRFGRFDREIDIGVLDEVGRLEVLRIHTKNMKLVEDVNLELISKDTHGYIVADLATLCTEAALHCIREKMDIIDLEDETIDTEILNSMAITNDHFKTALGTSNPSALRETVVEVPNVSWDKIKNRGWEGYSSKSHWN

SEQ ID NO: 13706 - protein, 339 aa, Zea mays
  VARIANT 247..339: note = Derived polymorphism lacks residues 247 to 339
  VARIANT 159: note = Ancestral polymorphism is R, Derived polymorphism is C
  VARIANT 126..339: note = Derived polymorphism lacks residues 126 to 339
  VARIANT 83: note = Ancestral polymorphism is D, Derived polymorphism is V
  VARIANT 80: note = Ancestral polymorphism is E, Derived polymorphism is K
  VARIANT 71: note = Ancestral polymorphism is R, Derived polymorphism is W
  VARIANT 1: note = Ancestral polymorphism is L, Derived polymorphism is M
MLTHVDSNIRLVVASCISEITRITALDAPYDDDAVKDVFSLIVEAFKHLDDIESPFFGRRTSILDTVAKVRSCVVMLDLECDDLINDMFHHFLRTVNSGHSEAVICCMETIIMRLVIEESEDVQPQIASCLLQNVRKEEKKSWSANSSSRAPERPRQRCGLVGLRHLPLRARLRPHALQGPHQGGHPQEHPLQAGHLPSAGRRGRRIRSQLRDLVGLLLERDPRRRMGVTHGTAEIKWHPFFASVDWALIRCVAPPVVPDRDTVTPAGGGDRKATKLGSWSSMSSNCGSKKRKSSRRSSFGRRCTSTCEERQGFFRMLMSWNQESRFSNKIKTTTSKER

SEQ ID NO: 13707 - protein, 377 aa, Zea mays
  VARIANT 215: note = Ancestral polymorphism is S, Derived polymorphism is I
  VARIANT 135: note = Ancestral polymorphism is T, Derived polymorphism is I
MAAAASYFTGPTILPSQRATAAPDNSAVATPSLAKSRDPRCSGCSPTTVRHIARSFAAADATSGGDPVISIDGVDATNVWLLGRAVSVMNMEAGVSFTLDDGTGQIALMRWITDDIDAKEVSFVQNGLYLKVQVTLVGFQAKQHGFAHSIRIFLSKLIGIEVESFLEKDSLHNFFLWVDLLKPSASCNTISSTLEIGLVNNLLYFVSFRVRNVTSNYSMKDQFPRAVQANVSAHEMQAQVAHTVQTNVPAYMPFSGGVREHHVDFAPEVNQGRFPSSLQTNASTHAPFSGGVGEQQVHFTQPNQFTGGQQHDLQSMVLEVMQQPDILALENGVHVDEVARRLGMPRAQIMAIAQRLVDLACLYSTIDDYHFKSLLNG

SEQ ID NO: 13708 - protein, 88 aa, Zea mays
  VARIANT 32: note = Ancestral polymorphism is R, Derived polymorphism is Q
  VARIANT 51: note = Ancestral polymorphism is P, Derived polymorphism is S
  VARIANT 53: note = Ancestral polymorphism is A, Derived polymorphism is V
MSVSHAEDIEISLCDGNSKDERRRCKIGSLRRKAIHAFKKRGRRHVDFRFSLAAISIEDVRDADEERAIASFRDRLPALGLLPDKHDD

SEQ ID NO: 13709 - protein, 97 aa, Zea mays
  VARIANT 2: note = Ancestral polymorphism is P, Derived polymorphism is L
MPVLETHGLVQVLGSIYQSGLLEVIDSSELPKFLGGSCTCSDKGGCLGSNKGSWNDPYILKLIHNLEAGCTREIKPVSEGEERNSSSFRLEQMKVTL

SEQ ID NO: 13710 - protein, 432 aa, Zea mays
  VARIANT 85..432: note = Derived polymorphism lacks residues 85 to 432
MMGCLFGCFRASGDGGDAKGAGDRNTSLAPATTTTIQQDGTGRRIRPPSRNALSAVFQREDEGSRAAQAASSWAEQTGESKRMDQELEPQTIIQKNCGALLQTTNNIQSVLRDADSVHQKETHSGCLPVMSDDVHFMEAPKVENCETPPRSHQSSTVPDATSSSKTNDELRTSATSLKNNVEESTNENDTEACVQGEEQQQALDLAEDFEECGVSKEDFFPPEKLEDPKCAKNDHVVSMEISISDECSLFQSSEGSVSPSNKIRGSMNTTSTEKSPKTEATIHATRKKLLKSNTSELELPSLAQWLKPPNPKKAFRDEAVTGDRSHSAKSSDEDRPIIGMVAAHWKDKEPANFTSKWWDGNGIPNSTNKYKEDQKVSWHATPFEERLEKALSEEKSLSERNCSSGKTSQFLGVEGEESDTAGSNRLYATAYA

SEQ ID NO: 13711 - protein, 117 aa, Zea mays
  VARIANT 27..117: note = Derived polymorphism lacks residues 27 to 117
MRREMQAIEDDIANTEKGKAALEDKFWEVEAKLVTKLEELERHAHQCNQALKKLKPTVAFQYMIDSKGSSPTEMLGTGYKTVLKPALLAHAEENKRICLSNLENLNDLQKQLQGNAK

SEQ ID NO: 13712 - protein, 336 aa, Zea mays
  VARIANT 100: note = Ancestral polymorphism is P, Derived polymorphism is A
MVAKVKRDGEVLVAAATGDSEEQDDLVLPGFRFHPTDEELVTFYLRRKVARKPLSMEIIKEMDIYKHDPWDLPKASTVGGEKEWYFFCLRGRKYRNSIRPNRVTGSGFWKATGIDRPIYPAAAGESVGLKKSLVYYRGSAGKGAKTDWMMHEFRLPPAASSPSTQEAVEVWTICRIFKRNIAYKKRQPAGSNAPPPPLAESSSNTGSFESGGGGDDGEYMNCLPVPVPATAAVVPRQQHRIGSMLNGGGVTASGSSFFREVGVHGQQFQGHWLNRFAAPEIERKPQLLGSSAMTIAFHQNDQTAATNECYKDGHWDEIARFMEVNDPTVLYDCRYA

SEQ ID NO: 13713 - protein, 405 aa, Zea mays
  VARIANT 181: note = Ancestral polymorphism is W, Derived polymorphism is S
  VARIANT 266: note = Ancestral polymorphism is R, Derived polymorphism is Q
  VARIANT 291: note = Ancestral polymorphism is L, Derived polymorphism is F
  VARIANT 297: note = Ancestral polymorphism is D, Derived polymorphism is Y
MPHAAATAAAALPRASLLVISAPLRDSLAAAPYEPPAGASASVKSLLASLLPSPSPPQPQLQEPAGKESGDLLLFCAAVLAASPEYPALHWVPASLVGAAAAAVNELAAAGGWGSVGDMVVAVAPEVVPPLKAVVKDSCVDADSDEIGAVKPPKEHAAVAAHQFRWLVSQVSYPKLGDLCSLVIPCALTTLDHWSPEVKVQGMVSFVHIAKNVKATELSLYEDAILDACCQNIPADDELWYQVIEVSVMLLTFTQRSNPRSPWYDRMLSEMLGHLERQPLNKERRVAWLTLIGPVFDAMGLFLLAHFRRLFSLFFQWMHTDDNKTVLLTLKQIHAIIKLTWIRKSPYTLRLVDELVLLYKESATRSNREIMRDHILEILVLLQNKGFTDAAARDINLRKLGRNMN

SEQ ID NO: 13714 - protein, 659 aa, Zea mays
  VARIANT 306..659: note = Derived polymorphism lacks residues 306 to 659
MTPPHRRMVHLAPRHGHPPAQLPAPQLPPTDLPLSLLPPPSLASLLLAAVASSPSFPHLRHLHGLLVRLHLPPPFNPFLLSRLLRRLAALPRPPLGAPLRYAVAVFSSLSPPDPFLAAALLRFAHLTQPPLETFRLFSRLRCAHGSDLPFLPFAFSPLAKSAAAARSLHAAASAHAVSLLLGGFDKHRFVENSLISAYVACGDVGAARKVFDEMLVKDVISWTSIVVAYSRIRDMGSAEEVFALCPVKDMVAWTAMVTGYAQNAMPVKALEAFEQMAVAGMPIDEVSLTGAISACAQLGAVKRAAWVQEIAERNGLGRNVVVGSGLVDMYAKCGLIDEARKVFEGMHDKNVYTYSSMIVGLASHGRANDVIALFNDMVRRADVEPNHVTFIGVLTACSHAGMVKEGRYYFAQMKDRYGILPSADHYACMVDLLARSGLVTEALDLVKSMTVEPHGGVWGALLGACRIHGNTEVAKIAAEHLFRLEPEGIGNYVLLSNTLASAGEWDEVSKLRKLMRIRGLKKDPAVSWFEGRDGFVHQFFAGDNTHPSMHEIKKRLLELREKLNLAGYVPILSSVVYNVSEEEKERLLMGHSEKLALSFGLLTLESRSSIRIVKNLRICEDCHLFIRLVSKVEPIEILVRDNMRFHHFRDGECSCGGFW

SEQ ID NO: 13715 - protein, 232 aa, Zea mays
  VARIANT 24: note = Ancestral polymorphism is A, Derived polymorphism is V
MATDLLRIHRILSTLLEIKGIIIVKYIKGRDNIQEITRSLLRAGEQELLCTLEEPMDEHCVRDSKDSVRTTIVEHDKVFRQQVHELHRLYHVQKSLMAACDNHGYQTRTEETHRMVQGSKLNLKSSPSTSGTNQSARLGNAQHSTPQQVTEDSSLHECKPVNCLSLFSEENSTVKERFHRETHKSVEDESWSASVESDLDLKLSIGPSSHSPKTQHWVFSGSEERKPSGQHR

SEQ ID NO: 13716 - protein, 496 aa, Zea mays
  VARIANT 117: note = Ancestral polymorphism is P, Derived polymorphism is S
  VARIANT 218..496: note = Derived polymorphism lacks residues 218 to 496
  VARIANT 340: note = Ancestral polymorphism is L, Derived polymorphism is P
  VARIANT 351..496: note = Derived polymorphism lacks residues 351 to 496
MSACVHYSSTGCTGRAVIAPRTSKTVAAAVQRNIHPRPNFRITDPSPAMSGAGADTAPSSDDKRQHHQRTFRDAARRRLQRDAIERAIRAPLGTVLRDHALVHLPPAAAARLRLVHPSWALALASPLFAVAHAATPRRASGFFSASASAPAGFLPLDAADTVPSPALAFLPASSPPAVLSSSRGLACCFSPADDAYFVCNPATGAWHGVPCPPRRITWPRPAVVVLFDAGVYNFCGDYTLVCAFESAPGSGIYCFAVFASGTGAWRIAGAVAPAEGLVPASGVAAGGTAWWRTDIGTAVGYNPATGRVDLALCPGDSARWEIGSAAGRLHCAVRDGGDVLVFRLDDRRGGWELATVVSVCEILQRPWQPETTFELSDSEDDDDDEAAAGQAELERVGAVIAVANRYSRSRVRVPRDDVRLLPFQGADVEVVLLSGWRVVAFETVTRRRREAVLPVPGQPTTKDWGVVEYIAHTNTLALVGPVVFMEPPDDQEEVSS

SEQ ID NO: 13717 - protein, 322 aa, Zea mays
  VARIANT 21: note = Ancestral polymorphism is P, Derived polymorphism is L
MRRLQFLAAAAAAIFLLALPLMATAQPKLRPDYYAGVCPNLESIVRGAVRQSVALSPLAAPATLRLFFHDCAVRGCDASVMLIDPAGGDEWRSPDGVMLKPEGFSTVMSAKAAVDSDPQCRNMVSCADILALAARDSVFLSGGPDYEVELGRFDGRVSSGGSVVVPHGTFDLDQLNAFFSSLGLSQTDMIALSGGHTIGAASCGSFAYRVGADPAMDPALAQQVLARCPGGGPAGFAFLDATTPLRFDNEYYRNLLGGMGILASDQVLYADPRSRGAVERYAADQAAFFGDFAAAMTRLGRVGVRTAADGEIRRDCRFPNPN

SEQ ID NO: 13718 - protein, 320 aa, Zea mays
  VARIANT 23: note = Ancestral polymorphism is P, Derived polymorphism is L
MASGGLSFVVVATLVIVSAGLMPPPAVAELATDYYASTCPNLEVIVRSSVKQSMAQSPISAPAALRLFFHDCAVRGCDASIMIVNSDGDDEWRNSDNQSLKPEGFQTILDAKAAVDSDPQCRYKVSCADIMAVAARESVYQSGGPYYEVELGRYDGRVSTRDGVVLPHANFDLDQLTAFFSSLGFTQAEMVALSGAHTIGAADCPFFQYRIGSDATMDPGLASQLNGTCSSDPNAFAFLDPSPVAFDNALYRNLQGGKGLLGSDQVLYSDPRSRGTVDYYASNQGAFFADFVAAMAKLGRVGVKTPATGGEIRRDCRFPN

SEQ ID NO: 13719 - protein, 331 aa, Zea mays
  VARIANT 40: note = Ancestral polymorphism is S, Derived polymorphism is L
  VARIANT 55..331: note = Derived polymorphism lacks residues 55 to 331
  VARIANT 73: note = Ancestral polymorphism is H, Derived polymorphism is D
MRSRRWHSVVAVALAAAAWWWCAAAQAQAQAQLSQSYYASTCPDVETLVRGAVTQKLQETFNAAPGTLRLFFHDCFVRGCDASVLLSGPDDEHSAGADTTLSPDALDLVTRAKAAVDADPRCANRVSCADILALAARDVVSQTGGPYYQVELGRLDGKVGTRAAVKHSLPGAGFDLDQLNKLFAANGLTQTDMIALSGGHTIGVTHCDKFVRRLYPFKGAAAGPPMNLYFLRQMRRTCPLNYGPSAFAMLDAVTPRAFDNGYYRTLQQMKGLLASDQVLFADRRSRATVNRFAANQTAFFDAFANAMAKLGRVGVKTAADGEVRRVCTRVN

SEQ ID NO: 13720 - protein, 450 aa, Zea mays
  VARIANT 176..450: note = Derived polymorphism lacks residues 176 to 450
  VARIANT 133..450: note = Derived polymorphism lacks residues 133 to 450
MRECISVHIGQAGIQVGNACWELYCLEHGIQPDGQVPGDKTAGHHDDAFSTFFSQTGAGKHVPRAIFVDLEPTVIDEVRTGTYRQLFHPEQLISGKEDAANNFARGHYTIGKEIVDLCLDRIRKLADNCTGLQGFLVFNAVGGGTGSGLGSLLLERLSVEYGKKSKLGFTVYPSPQVSTSVVEPYNSVLSTHSLLEHTDVSILLDNEAIYDICRRSLDIERPNYSNLNRLVSQVISSLTASLRFDGALNVDVNEFQTNLVPYPRIHFMLSSYAPVISSAKAFHEQLSVAEITSSAFEPASMMVKCDPRHGKYMACCLMYRGDVVPKDVNAAVATIKTKRTIQFVDWCPTGFKCGINYQAPTVVPGADLAKVQRAVCMISNSTSVVEVFSRINSKFDLMYAKRAFVHWYVGEGMEEGEFSEAREDLAALEKDYEEVAAEGGSDDGDEEEEY

SEQ ID NO: 13721 - protein, 377 aa, Zea mays
  VARIANT 182: note = Ancestral polymorphism is A, Derived polymorphism is V
MDGAASSRHPWVARRYDPSTDRSSSLVQSNHISARPEASIRPARAINTAARSPLRRRRRRIARTIVLPIDRSQPVLLRDELKPEVNRSIDRSSERAPMKALILAAVLLLQHGGAASAGGNFYQDVDITWGDGRGKILDNGQLLTLSMDRSSGSGFQSKAQYLYGRFDMQLKLVPGDSAGTVATFYLSSQGSQHDEIDFEFLGNASGEPYTVHTNVYSQGKGGREQQFRMWFDPTAAFHAYSVLWNPAHVVFYVDGVPIREFRRRGDGTVPFPTSQPMRVYASVWDAEEWATQGGRVRTDWSKAPFVASYRGYAAAGCTAPDAAACARSNGAWMSQELDSAGQEQLRRAQASYMIYNYCTDKYRFPQGPPPECSSPAK

SEQ ID NO: 13722 - protein, 377 aa, Zea mays; identical to SEQ ID NO: 13721
  VARIANT 182: note = Ancestral polymorphism is A, Derived polymorphism is V

SEQ ID NO: 13723 - protein, 303 aa, Zea mays
  VARIANT 19..303: note = Derived polymorphism lacks residues 19 to 303
  VARIANT 141..303: note = Derived polymorphism lacks residues 141 to 303
  VARIANT 230: note = Ancestral polymorphism is G, Derived polymorphism is V
  VARIANT 238..303: note = Derived polymorphism lacks residues 238 to 303
MSKNFIRARFTVVVDSFIKTGSRFGEAFLESASFLAIRPLFELVSGSHRLPVIVLHWSVGSEVHSKKGGHLFVYGGDDMGSKEVLTVLSQESTAGLESKRCMSRTDLKLVGSFADMILIPDTRVPDKRRTSALFILTNPGQLNFYDGGSLFSVQNSKEGNPLPEAQKFPVAIPTLDPNITVTGLYSLTESEFPNISVKVADVNLDGANAFVSSLAFCSLSMTLAVGTTSGLVHIYKLREHTEGSSFHFVSVNLSKKALSNGKPTVVEFYANWCGVCRELASDIYKAEQQYKDCGIVGSVHAAC

SEQ ID NO: 13724 - protein, 298 aa, Zea mays
  VARIANT 278..298: note = Derived polymorphism lacks residues 278 to 298
  VARIANT 124: note = Ancestral polymorphism is T, Derived polymorphism is A
  VARIANT 74: note = Ancestral polymorphism is D, Derived polymorphism is V
MATSSRRVPLLLLCLGVLVSCSFAAGSLDQELDITWGDGRGKVLDNGRLLTLSLDRTSGSGFQSRHEYLFGKIDMQLRLVPGNSAGTVTAYYLSSQGGAHDEIDFEFLGNVSGEPYTLHTNVFTRGQGQREQQFRLWFDPTADFHTYSILWNPKHVIFMVDDMPIRDFRNLESKGVAFPKSQPMRLYSSLWNADDWATQGGRVKTDWSHAPFSASYRGFKADACVAVAGGRTRCGATVGTEGTGAPASAAGAGDWYNQELDLTLQQRMRWVQRKYMIYNYCTDPKRYQQGLPAECSMQ

SEQ ID NO: 13725 - protein, 129 aa, Zea mays
  VARIANT 123..129: note = Derived polymorphism lacks residues 123 to 129
  VARIANT 112: note = Ancestral polymorphism is P, Derived polymorphism is H
  VARIANT 83: note = Ancestral polymorphism is I, Derived polymorphism is V
  VARIANT 82: note = Ancestral polymorphism is K, Derived polymorphism is M
  VARIANT 80: note = Ancestral polymorphism is L, Derived polymorphism is F
  VARIANT 79: note = Ancestral polymorphism is K, Derived polymorphism is R
  VARIANT 76: note = Ancestral polymorphism is M, Derived polymorphism is L
  VARIANT 33: note = Ancestral polymorphism is M, Derived polymorphism is V
  VARIANT 30: note = Ancestral polymorphism is E, Derived polymorphism is V
  VARIANT 29: note = Ancestral polymorphism is S, Derived polymorphism is N
MAEHIFKNKFEVSKLDPDGDEVNRIEAHSVNEMYMQLDVATEVYEPIPFLLGAQHDGIPFMLLGRKTLVDDYEYIMLGKLFKVSKDSTKDGNGNSSTKVLFMYGHTKAKGRHNTAVKVVSPSQKQPLCI

SEQ ID NO: 13726 - protein, 510 aa, Zea mays
  VARIANT 271: note = Ancestral polymorphism is G, Derived polymorphism is S
MRTVALSWSSLGSLVATAVVVRTAVRDVLPPEAHGALRALLACAAAAFAQPSDTIVVHETDANGVPNELYDAAQLYLGARCLASAPALHLHKAHGAGDVVASLPDDHTARDTFRGVRVLWASRRAESSGAYSPSGFGGGGGGRGGWSRGFSYPVGGGHQQQRCLVLQFPRRHRDVVRDAYIPHVLDMAARLRLKTRERKLYTNNYGGCGGPDAHEMLWSSHPFAHPSTFDTLAVDPALRDGIRSDLLRFVRRRDHYARAGRAWKRGYLLHGPPGTGKTSLIAAIANFLEFDIYDLELTAVQSNTDLRRLLACTRPMSLIVVEDIDCSLGLLDRTKAADDAERDIAPPRHLSLSRFPPMGGPGMYGDKISLSGVLNFVDGLWSSCVGERLIVFTTNHVDRLDPALLRPGRMDRKIELGYCKGPALRVLAKNYLGDCGTPGGGDHEPANGDQRYEELVGEAEVLLEEVHLTPADVAEVFMGCDGDGALAALQKLVDDLRSKKVVQECAASDV

SEQ ID NO: 13727 - protein, 617 aa, Zea mays
  VARIANT 27..617: note = Derived polymorphism lacks residues 27 to 617
  VARIANT 58..617: note = Derived polymorphism lacks residues 58 to 617
MDTRDHVAVKVLDKAKIHKNKLAEQEWRDKALAQIPLLHSSTCFLRRLLISTERFFLWLELRQGYRNWSSTQAPEDAMEFTGVVDGVEDMDNRDDSRSNITTAGGGLRPLEMPRGRRKQTIESNEEYLSEDHVGQTKSQKTLAHESDSEMEEESFAVGGHQSGEVSEMEPNSKNPTDMDADIEVEDEEKNVEVKRRGKTKLLQVWNIPRGHRIVVNYNELDQPIGEEAGITGKFLGMVARNGNLCSLSYKDWRLLIGKKERLSNEQKNKEDILKQVKRRFLYPARMEKWVLKTIGERWRQHKSNLKSIYYDAHNGLEANYNNVPHGVIADQWIALVNHWVTTKAKNDLKELLAEHPEFADTSQGKIAWNGDALNKILGEEKPGHVHGLGLVPNPNKVLDGTTSRRLNQLHVTSLDPTASEDVVSLKLQMEKLVNHGCLDDLPANQFQTSSKRKRVYVEPQNQEFRMDNEKSYSQTRQFEMERDITFDNTKLANSSKSMTKEATSNSLNEEASKNQVKRKDMQSATTFDKTKCATTSKTGAQVFLKSWRCPTKTVALGTVLGRDPNHKVGGVKLGREFWMVRVRLVILPIEPLIRPYDNMEVIGDVGNNLIAWPSCCV

SEQ ID NO: 13728 - protein, 506 aa, Zea mays
  VARIANT 164: note = Ancestral polymorphism is H, Derived polymorphism is Y
MEMVLDWRSLGSLLATVVVFRTALRNFLPPEAEMLLRRFLAWVAAAFRPPSDTILIDEADGPTGSANDLYESAQLYLSARCLATAPAVRLHKPRQSPRPVASLPDSHTTDDTFRGVRVKWTSTTRTVDRSGSGGGGNPYNIFGRGGDQRGLELQFPRQHRDLVHHHYIPHLIDEATRMRLKSRERRLYTNRATGPCDDHHRLWTSHAFAHPSTFDTLALDPALRDEVRADLLRFAARRDHYARVGRAWKRGYLLHGPPGTGKTSLVAAIANLLDFDVYDLELTTVPTNSHLRRLLVSTTPKSVVVVEDIDCSLDLSDRNKKTKKGAGVGVGIGTAGDEDAAAQLAVMSVSPVAAAVMGRESVSLSGVLNFVDGLWSSCVGERLMVFTTNHPERLDPALLRPGRMDRKIELGYCTPPALRVLAKNYLGVGDEGCDDADADPDTVNALMAEAEGLLAAAEVQITPADIAEVFMGCDGAGAAAALRKLVGELRRRRDAAALATAVAPPE

SEQ ID NO: 13729 - protein, 437 aa, Zea mays
  VARIANT 285: note = Ancestral polymorphism is A, Derived polymorphism is V
  VARIANT 279: note = Ancestral polymorphism is G, Derived polymorphism is D
  VARIANT 267: note = Ancestral polymorphism is P, Derived polymorphism is L
  VARIANT 256: note = Ancestral polymorphism is S, Derived polymorphism is L
  VARIANT 147: note = Ancestral polymorphism is W, Derived polymorphism is L
MDPCPFVRVLVGNLALRMPVAPPASGAGAGVHPSTSACYCKIRLGKMPVQSVPAPLVVTDGGEQTPASGALAAAFHLSKADLEWFDGKPSLFSSRRGAGDASLKVSVYAGRKGSACGVSSGRLLGKATVPLDLKGAEAKPAVLHSGWISIGKRAGKGSPAAAAELCLTVRAEPDPRFVFEFDGEPECSPQVLQVRGSMRQPMFTCKFGCRSNSDLRRPGMRRERDAKERKGWSVTVHDLKGSPVAMASMVTPFVPSPGTDRVSRSNPGAWLILRPAADGAWEPWARLECWRDRRGAGASDSLGYRFDLLVPGVDHAAVALADSSIPSSKGGKFAIDLTAAQPLSRGGTPGCSPRGSGDLSKWPLGNYRGFVMSAAVQGEGRCSKPTVEVGVAHVGCAEDAAAFVALAAAVDLSMDACRLFSHRLRKELSHPQADLLR

SEQ ID NO: 13730 - protein, 221 aa, Zea mays
  VARIANT 93: note = Ancestral polymorphism is K, Derived polymorphism is N
  VARIANT 121: note = Ancestral polymorphism is V, Derived polymorphism is L
MYSTREEEGVGKSWLGLGIGGGSGGCDLMQRNNRPPVQFDLLFPPQGVVEGVAASKKAEKGGGGRKRLKVVTGTADEDGQQPPGARKKLRLTKAQSTLLEDTFRAHSILSNAQKQELARQVDLSARQVEVWFQNRRARTKLKQTEADCEILKRCCESLTGENQRLRLELAQLQGSEAGLYLQSSFPPLAAAMASVCPSCDKVITVASGGETSGRSSTSYSS

SEQ ID NO: 13731 - protein, 234 aa, Zea mays
  VARIANT 1: note = Ancestral polymorphism is M, Derived polymorphism is I
  VARIANT 167: note = Ancestral polymorphism is C, Derived polymorphism is Y
  VARIANT 208: note = Ancestral polymorphism is T, Derived polymorphism is M
MYSCTRAMEEEGVGKSWLGLGIGGGGDLMKRNNRPPVQLDDLLSFPPQSVAAASKKQAEKGGGGRKRHKIVVTADEDGRQSPHGGARKKLRLTKAQSTLLEDTFRAHNILSHAQKQELARQVNLSARQVEVWFQNRRARYVEISVLRVYYGKLKQTEADCEVLKRYCERLTGENQRLRLELAQLQRSPAAEEAGFYVQSSFPFPPLATAMASVCPSCDKVVAVTSGKSSTSYSS

SEQ ID NO: 13732 - protein, 247 aa, Zea mays
  VARIANT 236..247: note = Ancestral polymorphism lacks residues 236 to 247
  VARIANT 103: note = Ancestral polymorphism is S, Derived polymorphism is W
  VARIANT 41: note = Ancestral polymorphism is F, Derived polymorphism is S
MHSTRAMEEEGVGKSWLALGIGGGDLMKRNNRPPVQFDLLFPPQSVKEEGAASKKAEKGGGRKRLKVVTADEDGRQSPHGGPGPSDGSGAGARKKLRLTNEQSTLLEDTFRAHNILSNAQKQELARQVDLSARQVEVWFQNRRARTKLKQTEVDCEILKRCCESLTGENQRLRLELAQLQRSAAAAAEAGLYVQSSFPPLATATATASVCPSCDKVIAVSSGGETSGKSSTSYSSRRAGFPSIMGSR

SEQ ID NO: 13733 - protein, 154 aa, Zea mays
  VARIANT 25: note = Ancestral polymorphism is R, Derived polymorphism is Q
  VARIANT 142: note = Ancestral polymorphism is S, Derived polymorphism is F
MGYAEIAIRPSGSGKKIQRQGGLSRRFSNVSYYGLTTPPYKLDALEPYMSKRTVELHWGKHHQDYMDGLNNQLATSPLYGYTLEDLIKKAYNNDNPLPEYNNTAQHAYYLDYKDDKLTYVTNFMDHLVSWHTVTLRMMRAESFVNLGEPNILEA

SEQ ID NO: 13734 - protein, 350 aa, Zea mays
  VARIANT 31..350: note = Derived polymorphism lacks residues 31 to 350
  VARIANT 235: note = Ancestral polymorphism is P, Derived polymorphism is R
MGRAPCCDKATVKKGPWSPEEDAKLKSYIEQNGTGGNWIALPQKIGLKRCGKSCRLRWLNYLRPNIKHGGFSDEEDMIILSLYISIGSRWSIIAAQLPGRTDNDIKNYWNTRLKKKLFGKQSRNKDQRQQHQFMRQLAGSAASDGMVKQEAAAGGDADAAAAGSSSVAVAATYNWHHHAMAMAMPVQPVPGSTTIMEGHRAEADEVDESIRKLLYKLGGAAGPSTALSSVPQCVRPMYEERSAASLMPPPPPPPSCPAVVDASSSASLDEGGGVLPALELDQSFHFGQVKLDGLESFFGMGGQSGMRWWSEASPLVCPSSTVAAASSSSHGMQMQQYCVVVDEPGKLGMN

SEQ ID NO: 13735 - protein, 249 aa, Zea mays
  VARIANT 159: note = Ancestral polymorphism is E, Derived polymorphism is K
  VARIANT 124..249: note = Derived polymorphism lacks residues 124 to 249
  VARIANT 115..249: note = Derived polymorphism lacks residues 115 to 249
  VARIANT 40: note = Ancestral polymorphism is T, Derived polymorphism is I
  VARIANT 20..249: note = Derived polymorphism lacks residues 20 to 249
MVERSKSYRSLVRVCFTFLKTNECHFGYCPNTFYRSMVVTDHTKADKIYQEIEGHKQKIARAEVVYANSKTESNTEGTRPTHRTGFLGLIGTKVDTIEYCSEQIKELLPKLEAEQKTTLHEKQQRAAIVIFNSRSAVAFASQTLHAQVYDKWTVMEAPEPRQIIWSNLPMKLYDRQIRQSVVYGIVFLIVVFYMVSLTAIFAVTTLENLEKLPFLKPVVEQPAIKTVLEAYLPQIAPIICHMILLLFLF

SEQ ID NO: 13736 - protein, 325 aa, Zea mays
  VARIANT 165: note = Ancestral polymorphism is A, Derived polymorphism is T
  VARIANT 1: note = Ancestral polymorphism is M, Derived polymorphism is I
MCPTKPDRPGQAAAGSGEKSWREEAVAACSLRLVDLDRGTNGWASPPGDLFHLRARGYFSSGGGKRGKAPSAADWLLRPAGVDWLRSHARLDHVLARDDNRVAAAFRRARLRKDPSAHFLLAVNLQVPGRPDAYSAVFYFAAEAPIPPDSLLGRFIHGDDAYRNARFKIANRIVKGPWIVRATVGNYAACLLGRALTCRYHKGDDYLEIDVDIGSSAIASAILHLALGAVTSVTIDMGFLVESQSEEELPERLFGAVRIAQMEMSAAKYVELPPDEAMPETAGRAGAGFRVSSAKVVNHSRQQDHAGGKVGRSMSCPERESGGER

SEQ ID NO: 13737 - protein, 675 aa, Zea mays
  VARIANT 349: note = Ancestral polymorphism is D, Derived polymorphism is Y
MGASHDDEAGPLASLLAARRALRAGLDKSRALSRALAPRLEGIQARLPAMEASVRPIRAPPEALATAGPNIDRAVGPAAAVLKVFDAVHGLEPPLLDRAAAAADLPGYLAVLAQLEAALRLLSDNCGLATQWLADIVAYLGERRLADARFVAGLAAALDRLRDDASAGLDAGLLAAALDMLQAEFRRLLKDHSAPLAMKDPDGSGSDPPPVVPSRIPAAVVHKLSLILDRLAANGRLDHCSSAYGDARGDTVCASLRALGLDYLKETSGDAQALSPSVERWARHLEFAVHHLLEAERKLCVAVFERRPEAAPLCFAEIAARAGILDFLDFGRALADARKDPIKLLRLLDVFHCLNKLRLDFNRLFGGKACVEIQSRTRELVKRVVDGAVEIFEELLVQVELQRTIPPPVDGGVPRLVSFVAKYCNQLLGEQYRSVLTQVITIHRSWRKEVFNDKMLVDAVLNIVKTLELNFDTWSKAYGDTTLSSLFMMNIHWHFFKHLKGTKLGELLGDPWLREHEQYKDYYSAMFLRESWGTLAPLLSREGLIMFSKGRATARDLVKQRLKSFNASFDEMFQKQSKWVISDRDLQQKTCHLVVQAVVPVYRSFMQNYGPLVEQDVSASRYVKYSAEDLDKMLNTLFLSKPGRPMRAGSFQIKNSNDKITSAMTGLYRSASTLK

SEQ ID NO: 13738 - protein, 124 aa, Zea mays
  VARIANT 66: note = Ancestral polymorphism is E, Derived polymorphism is K
  VARIANT 49: note = Ancestral polymorphism is P, Derived polymorphism is S
  VARIANT 27: note = Ancestral polymorphism is K, Derived polymorphism is E
  VARIANT 21: note = Ancestral polymorphism is S, Derived polymorphism is L
  VARIANT 8: note = Ancestral polymorphism is P, Derived polymorphism is L
  VARIANT 5: note = Ancestral polymorphism is T, Derived polymorphism is M
MIRTTLDLSPTLLNLYRSLFLVCLTPKLFYLDHEPKYSLINAIPNGDPPNTNMNLISLELEEVVEKRNSKSDADSKNRGAPTSCLNQEASPGYSTSSLPSTSWNAKKPKDVIRKKRYSRLQKPL

SEQ ID NO: 13739 - protein, 122 aa, Zea mays
  VARIANT 87: note = Ancestral polymorphism is R, Derived polymorphism is W
  VARIANT 72: note = Ancestral polymorphism is G, Derived polymorphism is V
  VARIANT 70..122: note = Derived polymorphism lacks residues 70 to 122
  VARIANT 55..122: note = Derived polymorphism lacks residues 55 to 122
  VARIANT 46: note = Ancestral polymorphism is S, Derived polymorphism is P
  VARIANT 43..122: note = Derived polymorphism lacks residues 43 to 122
  VARIANT 9: note = Ancestral polymorphism is S, Derived polymorphism is G
  VARIANT 5..122: note = Derived polymorphism lacks residues 5 to 122
MVTPEELHSEKVPKNLIPHPTFKGNRPSLSLLLPTLSAYEVGQLLSIYEHRIAVQGFLWGINSFDQWGVELGKSLASQVRKQLHGTRMEVKPVEGFNHITSSSLFCTLWLVSSAFPFHYQLR

SEQ ID NO: 13740 - protein, 944 aa, Zea mays
  VARIANT 850..944: note = Derived polymorphism lacks residues 850 to 944
MADALLVVLRKVALFLGEGALEKIGKEVVEAAPLMTDFEHSMKQIEGELSVLQAFINQVSAQRVSDKAFDAWLNQVRDAAHEVEDIIDEYAYLTAQAVDTSSFFKRKFHQIKNIAAWQKFPSQISQVEARIQRLSEMRNRYGFSLGEIDRNNNFQLSSHFCLSDSEIVGNADEIGKLTQWLLEEKQDRSLIAILGMGGLGKTAVASTVYKNQKIITSFDCHAWVIVSQTYQVEELLREIINQLIIKERASMESGFMTMSRIRLVEVIQSYLQDKKYFVVLDDVWDKDVWLILNYAFVRNRHGSKVLITSRRKDVSSLAADKYVIELKTLKDAESWELFCKKAFHASEDNICPENIRYWANKIVAKCQGLPLAIVTIGSILSYRDLKEQEWAFFFNQLSWQLANNPELNWISRVLKLSLNDLPSYLRSCFLYCSIFPEDYKIRRKMISKLWIAEGLVEERGDGTTMEEVAECYLMELTQRSLFEVTERKTCGRARTFLMHDLVREVTSIIAKKEKFSIALAHGGASTTQVAHEARRLCIQRGAQTINSLRSSRLRSFILFDAEVPCSWIHDTVSCFRLLRVLCLRFVNVEQVPSVVTELYNLRYLDMSYTKVKTVPASFGKLVNLQSLDLRETYVEELPLEITRLTKLRQLQVYALYDILQRSSKFLSATKIPGNICHLKDLQTLHVVSANKVLVSQLGNLKLMRSLAIAEVQQSYIAELCNSLTKMTNLKTLFISTCNVNETLNIEMLKPLPNLTSFLLSGKLERGLPPSIFSMNLKQLKLFGSSLKKDPVSSFSHMLNLVNLFLTGAYDGEQLTFCTRWFPNLKYLQLADMEHLNWIELEDGTMMNLQYLSLAGLRNLKAVPEGIKYIRALHEMLLTDMPNEFMLKLHGSDNHIVQHIPNIKKYDSSDSQAVNNLAYLPWLANKFGPGAAIKYASINCGSSGS

SEQ ID NO: 13741 - protein, 107 aa, Zea mays
  VARIANT 21: note = Ancestral polymorphism is A, Derived polymorphism is P
MAPPSPSTPHVGMPLPYDRLAMVESSTAAVADGAEGVGEDVGASSSMGSAAAESPAASPSSMGSAAVASSSSMVSTSTGLHLAPPPLAMPANLRFRQPSQTTRRAPA

SEQ ID NO: 13742 - protein, 546 aa, Zea mays
  VARIANT 419: note = Ancestral polymorphism is Y, Derived polymorphism is S
MDYVVARMQLQQAAVPPPVHSIADHRPPPVSQRTRGSATMQRQRREALEQEVAELKQQLSNEQTVHQILERALQPSSSMALANIPAFIPTKAKELLAELLLVEEEIARLEDQIKRMKKSAATQQQQQQQTEHCKSMFFISQAMDGEAYLSTVVNNKRHSLASSSDGHAVLEKKIAQHELPITKKSPTVIAKRRARDQQQPPNKLSERILKCLVCIFMRLLRSSRASESAAGNLGGFRMDMGLVNVAAAAAAKEKERGQQDHYGIFGIQDSMVRDIGPYKNLVRFTTSAGSGSGSGSGSLDLHLLSRGFSASPLVSKLREMLEALQQVDVRSLNHHQRLAFWLNIYNTCIMHGILQHGLPSNSDKLLALKNKATINVSGQTFNALVIENFILRQPSSVKQQELWQCDVDVEEEQAVREVYGLKTSEPNILFALCCGIRSSPALRIYKADRVLVDLDKAKLEYLQASLVVTSTRRLMIPSLLHSNMHDFAKDTESLLRWICEQLPTSWSIRKSMVDCLAAITNNNNKLEEVVVDVIPLDYDFQYLLPM

SEQ ID NO: 13743 - protein, 960 aa, Zea mays
  VARIANT 539..960: note = Derived polymorphism lacks residues 539 to 960
MADALLVVLRKVALSLAEGALEKIGKEVVEAAPLMTDFEHSMKQIEGELSVLQAFINQVSAQRVSDKAFDAWLDQVRDVAHEVEDIIDEYAYLTAQAVDTSSFFKRKFHQFKGIAAWKKFPGQISQVEARIQRLSEMRNRYGFSVSQLDRTNNFQLSIQFSLSNSAYLIDNSEIVGNADEIGKLTQWLLEEKQDRSLIAILGMGGLGKTAIASTVYKNQKIITSFDCHAWVIVSQTYQVEELLREIINQLIIKERASMASGFMTMSRMRLVEVIQSYLRDKKYFVVLDDVWDKDAWLFLNYAFVRNERGSKVLITTRRKDVSSLAADNYVIELKTLKDAESWELFCKKAFHASEDNICPENIRCWATKIVAKCQGLPLAIVTIGSILSYRDLKEHEWAFFFKQLSWQLANNPELSWISSVLKLSLNDLPSYLRSCFLYCSIFPEDYKIRRKLISKLWIAEGLVEERGDGTTMEEVAECYLMELTQRSLLQVTERKACGRARTFLMHDLVREITSTIAKKEKFSVALAHGGASTSQVAHEARRLCIQRGAQTLNSLSSSRLRSFILFDTEVPCSWIHDTVSCFRLLRVLCLRFVNVEQVPGVITELYNLRYLDMSYTKVKMIPASFGKLVNLQVLDLRDTYVEELPLEITMLTKLRQLQVYALYDILQRSPNSFSATKFFGNICHLKNLQALQVVSANKDLVSQLGNLNLMRSLAIAEVRQSYIAELWNSLTKMPNLKRLIISTCNVNETLDMEMLKPLPNLTTFVLSGKLERGLLPSIFSVKLKQLKLDWSSLKKDPVSSLSHMLNLVDLFLTGGYAGEQLTFRNRWFPNLKCLQLADMEHLNWIEVEDGTMMNLQCLSLAGLRNLKAVPDGIKYIRALHEMFLTDMSNEFIVRLHGSDNHIVQHIPNIKKFESSDSQAVNNVYIPWLAEKFGSGAVAHLALDGSMGVVCASGNHFKSEE

SEQ ID NO: 13744 - protein, 895 aa, Zea mays
  VARIANT 308..895: note = Derived polymorphism lacks residues 308 to 895
MMAAGSRLVYIYISQVNSDMADALFVVLSKLADSLGEQTLERISTKLIEVAPVLTDFEHSMKQIEAELLILQAFIAQVGTKVGDKAFDAWLDQVRDVAHEVEDIIDEYAYLEVQAVDTGSFFKRKFLQIKKFAAWQKFHSQISHVEARIQRLGEIRNRYGILSGEIDRSKKLRSPNRLFMSDSSYLTDNSEIVGHVDEIGRLTQWLLEYKQERTLIAVFGMGGSGKTTIASSAYKSQKITRTFNCHAWVTVSQTYQVEELLREIINQLIDQRASMSSGFMTMSGLRLVEVIQSYLQDKKYFIVLDDVWDKDAWLFLNYAFVRNNCGSKVLITTRRKDVSSLAVDQYTIELKTLQYAESWELFCKKAFRASKDNQCPENLRFCAEKIVARCQGLPLAIVTIGSVLSYHEFEEQGWESFYSQLSWQLANNPELNWISNVLNMSLNDLPSYLRNCFLYCSLYPEDYKIKRKVISKLWIAEGLVEDREDGTTMEEVANYYLVELTQRCLLRVTESNACGRPRAFVMHDLVRELTSNIAKKEKFEVPGVVTELYNLRYIDFSYTKVKTIPASFRKLVNLQVLDLRFTYVEELPLEITTLTNLRHLHVFAVHDFQQRSLNCLGATKIPVNICHLKNLQAIQIVLANKDLVSQLGNLKLMRSLAIAEVRQSYIAELWKSLTKMPNLNRLAISTCNMEEILDFKMLKPLSNLVFFKLAGKLESGVLPLMLYYFEKLTWLQLDWSGLKKDPMSSLSHMSNLVHLFMCGSYCGEQLTFCSGWFPKLNYLQLSKMENLNWIEIEDGTMMCLNNLYLVDLGNLKAVPYGIKYIRTLHQMHLTDMSKEFLGSLQGSASPVVQHICNIHIFESSDSEAVNKFFFEPYLATKFGPGATKHAPTYLGSSGI

SEQ ID NO: 13745 - protein, 257 aa, Zea mays
  VARIANT 106..257: note = Derived polymorphism lacks residues 106 to 257
MAVEVDARWEPMGAQEYYDYWRAMYSARNNRLLPLYFPLDKQEEDIVIVKLPIVGDENEGEFIISFLFILISLNFIFMFLFVQGYFKLDSYLDPSFMSIIKDPDLWCKEMGKFAHAQKGFNYARAPPLPRSTRVSEPTELTSSRLQFHPTVIVLCCSTFHASHLLSSISSTVLKETAESISVSSTVLKEEENTSLVEGSSGDLEEDRLESAATNLQPGSDTCIAREELLDQKDLVKLQAVIRGHLEAAHASRPKQIR

SEQ ID NO: 13746 - protein, 943 aa, Zea mays
  VARIANT 889..943: note = Derived polymorphism lacks residues 889 to 943
MADALFVVLRKVALSLGEGALVKIGTDVVEAAPILTDFEHGMRQTEGELLVLQAFIGQVRAQKAGDKAFGAWLDQVRDVAHEVEDIVDEYAYLTTQAMDASSFFKRKFHQVKNFAAWQKLPIRISQVEARVRRLSEMRSRYGISVGEQDRGSKLQQSNQFSASDFAYLTDDSEIVGHGEEIERLTQWLLEENQDRTLIAIFGMGGLGKTTVASSVYKNQKIRRTFDCHAWVTVSQTYQAEELLREIMNQLIEQRASLASGFMTMSRMRLVEMIQNYLRDKKYFIVLDDVWDKDAWLFLNYAFARNNCGSKVLITTRRKDVYSLAVHSHVIELKTLNYAESWELFCKKAFFALEGNICPKNLTSLVEKVVDKCQGLPLAIIAIGRILSCHGLDEWEWAFFYNQLNWQLANNSELSWISTVLNLSLDDLPSHLRSCFLYCSLFPEDHFIKRKQIAKLWIAEGLVDERGDGTTMEEVAEHYLAELTHRSLLQVIERNASGRPRTFVMHDLVREVTSITAEKEKFAVIHGHVGTTQVSHDARRLCIQKSADSQNSLANSHLRSFILFDNLVPSSWINDVSSRFRLLRVLGLRFTNIEQMPCGVTELYNLRYLDISYTKVKQIPASFRKLMHLQVLDLRFTCVEELPFEITTLTNLRHLHVAAVHDLQERSLNCFSATKIPGNICGLKNLQSLHTVSANEDLVSQLGNLTLMRSLTIMNVRQSYIAELWNSLTKMPNLSVLIIFASDMDEILDLRMLRPLPNLKLFWLAGKMKGGVLPSIFNKFEKLTQLKMDWSGLNKDPISSFSYMLTLVDVWFFGAYCGEYLSFCAGWFPNLKSLHIADMEHLTRIEIEDGTMMGLHHLELVGLRNMRLVPKGIKYIRTLRQMILTDMPKELVESLRGSDAHIVQHVPNIHIFDSSDPEAVNNFIFWPHLAKKYGSGVTKYDPRK

SEQ ID NO: 13747 - protein, 686 aa, Zea mays
  VARIANT 177..686: note = Derived polymorphism lacks residues 177 to 686
MAPCSGLWGGKAGGDAYRGTPVVVKMENPNWSISEISSPEDDDDDEDILAAAGGRRRKGARTKNAKQIRWVLLLKAHRAAGCLASLASAAVALGAAARRRVAAGRTDADADADAGVLAVAGESPVVRSGFYAFIRAFLVVSLLLLAVEVAAYINGWDLAASALALPALGLESLYASWLRFRAAYVAPGIQFLTDACVVLFLVQSADRLILCLGCFYIRVKRIKPEPKSPALPDAEDPDAGYYPMVLVQIPMCNEKEVYQQSIAAVCNLDWPKSSFLVQVLDDSDDLLTQALIREEVAKWQQQGARIVYRHRVLRDGYKAGNLKSAMSCSYVKDYEFVAIFDADFQPQPDFLKRTVLHFKDNDELGLVQARWSFVNKDENLLTRLQYINLCFHFEVEQQVNGVFLNFFGFNGTAGVWRIKALEDSGGWMERTTVEDMDIAVRAHLHGWKFIFLNDVECQCELPESYEAYRKQQHRWHSGPMQLFRLCLPDIIKCKMAFWKKGNLILLFFLLRKLILPLYSFTLFCIILPTAMFVPEAELPDWVVCYVPALMSLLNVLPSPRSFPFVIPYLLFENTMSVTKFNAMVSGLFQLGSAYEWVVTKKSGSGPRSSEVAGDLVSLAAAAPTAKKKKKKKHNRIYKKELALSMLLLTAAARSLLSKQGIHFYFLLFQGVSFLLVGLDLIGEQVE

SEQ ID NO: 13748 - protein, 512 aa, Zea mays
  VARIANT 5: note = Ancestral polymorphism is R, Derived polymorphism is T
  VARIANT 67: note = Ancestral polymorphism is L, Derived polymorphism is R
  VARIANT 176: note = Ancestral polymorphism is Y, Derived polymorphism is S
  VARIANT 177: note = Ancestral polymorphism is P, Derived polymorphism is Q
  VARIANT 186: note = Ancestral polymorphism is T, Derived polymorphism is M
  VARIANT 187: note = Ancestral polymorphism is T, Derived polymorphism is M
  VARIANT 190: note = Ancestral polymorphism is M, Derived polymorphism is I
  VARIANT 236: note = Ancestral polymorphism is L, Derived polymorphism is P
  VARIANT 393: note = Ancestral polymorphism is T, Derived polymorphism is M
  VARIANT 483: note = Ancestral polymorphism is H, Derived polymorphism is Y
MDFTREVVVPAALSEILGRIFAFLFDSLPRPSRGARELHRRRLERLLGNIASMVEEAEGRHITNQQLLSHLKALTAGMYRGRFTLEVTDLDDVVSRNGDGDDEDAGDGDATTAAASSAGKRSFALCRSFSRAKRSRVTGLIAGGDGGTERLVAVAEELEGLTRDYMREFILLVQGYPRKVHRPVRTTLYMDRCVFGRHVEKERVVDFLLQHAPSGRAPYLSALAVVGAKKVGKTTLVKHACDDERVRGHFVRIEWFETPDVVRAGGLPGQYLWESGGPEYLAGVRHILSEPRFANAAGPSLLVFEDAWPMDESAWAALASSPTPLGDGSKLLLTCRDADLARLGTADPVVLHRLQREEYWYYFKAFAFGGADPRDHPRVAAVAREISEHLERTFLDARVLGTLLRANFDARFWRRVLAAIVSCERRPMHVGVLLELLPVRGRLQSYGYCRSPPKFTVQDVLTARPSGRDGGSGSGSEEGFTVHLCKETLYMDHWYSITFKNDGEATPPVVTT

SEQ ID NO: 13749 - protein, 115 aa, Zea mays
  VARIANT 36: note = Ancestral polymorphism is E, Derived polymorphism is G
  VARIANT 34..115: note = Derived polymorphism lacks residues 34 to 115
MPTLNLSTNVPVDAVVAADILRDCSKAVARIIGKPESYVMVSVNGSVPMSFAASEEPAAYGELVSIGGIGPGVNGKLSAAVAEVLEAKLSVSRSRFYIKFDDVRGHNFGFNGSTF

SEQ ID NO: 13750 - protein, 539 aa, Zea mays
  VARIANT 164: note = Ancestral polymorphism is A, Derived polymorphism is S
MSAMVETHPPTPTAAADVVSILRGADPARLLATSGIAPTPELLQHLRPALPTLPDSAIPALARWAGAATAVSLLASRRLFAAAWRFLLFQPAAASPPPPLAAFAPLLRRYARIGRTDSAVRTFRFLQRHPGRYAVESDVTPSAEALSPLILTIDALCKEGHPRAAALLVAQIRREDDGWAPDVRIYNILLNGWSRARRLDKAEKLWAAMRDEGVRPTVVTYGTFIDAHCVMRRPDHAMALLDQMREEGIEANLLTCNPIVYALAHAGRFGDAHKVLEKFPLYGVAPNISTFNSLVFGYCRHGDLAGASRVLKAMLGRGISPTARTYNYFFTVFARNLSIDLGMNLYVKMVSNGYAPDRLTYHLLIKMLCEANRLELTLQMLQEMRNSGFEPDLATSTMLIHLLCRRHQFEEAFAEFEQMFERGMVPQYITYRMLMRELKRLGLVKLVQKLADLMRSVPHSTKLPGGYRDKEGDDAIEKKKSILLKAQAVSDVLKDCKDPKKLRELRDPEETDVQIADRIVANIRRRVYGDISRIVPSVS

SEQ ID NO: 13751 - protein, 219 aa, Zea mays
  VARIANT 38..219: note = Derived polymorphism lacks residues 38 to 219
MHAQDKPVKFGDVLDVSGELDDQPVAPRDAARLQAAEQSVPGGTQKGGPAAVLQSVATVNARAGHVGRAQTACPVADAGATITETELAGRRVVTESVGGQVVGKMVTPAPVAMTDPPGALEKDAVTIGRALEAVGAMVGDRPVEQSDAAAVQVAELCATGSDSTNAREKLPADKGATWEDAERVVSAEIRNKLDMATTPGGMADAVTTAARLNQERPRP

SEQ ID NO: 13752 - protein, 165 aa, Zea mays
  VARIANT 104: note = Ancestral polymorphism is R, Derived polymorphism is K
  VARIANT 16: note = Ancestral polymorphism is G, Derived polymorphism is S
  VARIANT 9: note = Ancestral polymorphism is E, Derived polymorphism is Q
  VARIANT 7: note = Ancestral polymorphism is A, Derived polymorphism is S
  VARIANT 4: note = Ancestral polymorphism is V, Derived polymorphism is M
MLSVQEALELASSSCGTTMDVTTCGFTPWGPESCPGLEQVMASTPAAAARHPDPEEEERRRRQRRKLSNRLSARRSRARKQQRLEELRAEAARLRGQKRELEARLQALARHGLAVRCQNARLRAEAAALARRLLAIASYAQQPQHKAGVAPAPAAALLGLASLTT

SEQ ID NO: 13753 - protein, 829 aa, Zea mays
  VARIANT 579..829: note = Derived polymorphism lacks residues 579 to 829
MWRIKLACLLLIFVQVQRVVLGTHDVYIVVMEGDPVVSYRGGVDGFPATAVDLDEEMDVTSEAVTSYALHLRGHHDKLLDSHLVEGTYEKLYSYHHLINGFAVHMSSLQAEFLRKAPGVKHVERDMKVQKLTTHTPQFLGLPTGVWPTGGGLDRAGEDVVIGFVDSGIYPQHPSFAAHKTDRYGPVPRYKGKCEKDLVTQRSFCNGKIVGAQHFAKAAMAAGAFNPDVEFASPLDGDGHGSHTAAIAAGNNGIPVRMHGHEFGKASGMAPRARVAVYKVLYRLFGGYVADVVAAIDQAVQDGVDILNLSVGPNSPPTATRTTFLNPFDAALLSAVKAGVFVAQAAGNGGPFPKTLVSFSPWITTVAAGVDDRRYKNHLTLGNGKLISGLGVSPATHGNMSFSLISAADALLGSSASKYSALDCQRPELLNKRKVQGKILLCGYSFNYISGTASIKKVSQTARSLGAAGFVVAVENSYPGTKFDPVPVSIPGILITDVSKTEDLIDYYNSSTVRDWAGRATAFKATAGIADGLAPTLYNSAPQVALFSSRGPDVKDFSFQDADVLKPDILAPGNLIWAAWAPNGTDESNYAGEGFAMVSGTSMAAPHIAGIAALIKQKNPKWSPSAIKSALMTTANTLDKGSHPLRAQQYTASEMMTLSRATPFDCGSGAVNPKGALDPGLVLDAILLYPCLAGHEDYITFLCSIPDVNQSEVSNIAGSACNSNSKGQRPFDLNIPSIAVSQLRGTVVVKRTVTSVSDETETYTIMTRMPPEVALEVTPPAVTVVPGASREITVTLTARSVTGTYSFGEIAMKGDRGHLVRIPVVAMGFK

SEQ ID NO: 13754 - protein, 477 aa, Zea mays
  VARIANT 47: note = Ancestral polymorphism is S, Derived polymorphism is L
MTHKRHAATGLRTGGTILHALSAASAAHLHAHALKVGVLFTCLHLCSGLLKTYASSGRIAAARQLFDEAPRRNVPLWNTLVSAYARCGHPRSALAAASAMARGGGGGAGARPNVVTVAILMSACAKLRRPAPGREVHGYAARNVAALDLHALNALVHMYGRCGRLRDARTAFAGIGAGARNAVSWTAMIDACRENGRPAEALGVFEEMRRLAGAEVDEAALLAAVSACASLDCAAGLGDWVEACAAESGFLRRGTTSARVANALIHMHGKAGQVERSCAIFDSMGAARRTVVSWTAMVQALATNGHAVAALVRFAQMLREGFVPDEVAFLSAIGACACAGLVSEGRRLFESMVEEHRIAPQMEHYGSMVELLCRAGSLADAFEFVLAMPVAPDPVIWRALAGACRDHGDAGLARRVMDHVIAMEPHHAGNYLLASNLCAADEDWGRVVDVRLEMGARKATISRTASGAVSSVQVNGE

SEQ ID NO: 13755 - protein, 205 aa, Zea mays
  VARIANT 79: note = Ancestral polymorphism is P, Derived polymorphism is L
  VARIANT 78: note = Ancestral polymorphism is G, Derived polymorphism is A
MGCIFSSPGSARALRPCAGVRVIHTNGFVEDFEGPGVVTVAHVTRCLGGPGGPASAANAAGKGYVLCSSAHLLQPGRGPFRPDDALQPGTVYFLLPQSVFQAESSAVDLACLMNRLTALARKGGASAAPKPSPLDALFDAAAAAAAASGSHRQHNQQRMPVAAAAREKKGQPWRAAPWKPCLERIDESVGRASMRSASSGCSSEA

SEQ ID NO: 13756 - protein, 372 aa, Zea mays
  VARIANT 198: note = Ancestral polymorphism is D, Derived polymorphism is Y
  VARIANT 178: note = Ancestral polymorphism is P, Derived polymorphism is S
MAPRSRAPSRRPLWFIVLVAFVCVVAIGAYLYTPQHYTACYLVPSEACNSRPPPEPARVYTDDEIAARVIMRDIIRARPVQSKNTKIAFMFLTPSLLPFEKLWEKFFMGHEDRYTIYVHASRDIPSHSSPIFAGRDIRSEKVIWGTISMLDAEKRLLAHALQDPENQHFVLLSESCVPLHNFDYIYSYLMETNVSFVDCFDDPGPHGAGRYSEHMLPEIVKKDWRKGAQWFTVKRQHAILILADTLYYGKFKRYCKPGNEWHNCYSDEHYLPTLFNMVDPTGISNWSVTHVDWSEGKWHPKVYRAADTSFDLLKDIASIDESVHVSSNAKHVAQRRPCVWNGMKRPCYLFARKFYPEALDNLLNIFSNFTII

SEQ ID NO: 13757 - protein, 373 aa, Zea mays
  VARIANT 305: note = Ancestral polymorphism is G, Derived polymorphism is R
  VARIANT 304: note = Ancestral polymorphism is T, Derived polymorphism is I
MDRLVVFSRRRRRWILLAAAGAAAAVGAYKIYHHPAVAERRRRLVRLAAAIAAFADAAASSADAVALVTSDLADFVHSDADEVPRSVKQLAKLAASPEVSATVSTLSEAVTSGILRGSGSSSSGPASGGTVALSDRLVDRLFSDSGERLASAVAGSFARHLVLAFYSAPSPQGEASSSPTMWVNVVATGKCRKAISNWVEVFVGTAVREFIDKTIHINTYEQLFEGLTNPRHDAKVKELLVSVCNAAVETLVKTTHHALYSTNGNLGANGSVSGNANGAGEGWVETVSSTLAVPSNRKFVLDVTGRVTFETVRSFLEFVLWKLQDGARKGGGSVVDSGLRVVRYMSDKSMVIATICITLCLHVLNGTRLLVTA

SEQ ID NO: 13758 - protein, 187 aa, Zea mays
  VARIANT 176: note = Ancestral polymorphism is G, Derived polymorphism is S
  VARIANT 166: note = Ancestral polymorphism is S, Derived polymorphism is I
  VARIANT 152: note = Ancestral polymorphism is N, Derived polymorphism is I
  VARIANT 138: note = Ancestral polymorphism is D, Derived polymorphism is Y
  VARIANT 132: note = Ancestral polymorphism is T, Derived polymorphism is M
  VARIANT 129: note = Ancestral polymorphism is R, Derived polymorphism is L
  VARIANT 100: note = Ancestral polymorphism is E, Derived polymorphism is G
  VARIANT 76: note = Ancestral polymorphism is L, Derived polymorphism is M
  VARIANT 71: note = Ancestral polymorphism is S, Derived polymorphism is R
  VARIANT 61: note = Ancestral polymorphism is I, Derived polymorphism is F
  VARIANT 58..187: note = Derived polymorphism lacks residues 58 to 187
  VARIANT 49: note = Ancestral polymorphism is S, Derived polymorphism is P
  VARIANT 48: note = Ancestral polymorphism is R, Derived polymorphism is S
MMQQAFTHHLRPPLISDILVLFYIFEMVILGFAMTRCDWLHAPHSISRSVNRKGYLFYLVIRWLRHRRQGSEGYDLAALKYWGPATHVNFPVENYRDELEEMKGMTRQEFVAHLRRRSSGFSRGASIYRGVMRFVCTDYYATAFCFLRDRLNRHHQHGRWQSRIGSVAGNKDLYLGTFSKKDRSIWL

SEQ ID NO: 13759 - protein, 636 aa, Zea mays
  VARIANT 356: note = Ancestral polymorphism is V, Derived polymorphism is A
  VARIANT 40: note = Ancestral polymorphism is A, Derived polymorphism is P
MASGADAAALVTSGADEWAAACPPLRRNLQLLAPDEVELAKMLLNEGQIHLFEHWPEPGIDDDKKRGFFDQVRRLNSSYPGGLVSYIKNAKKLLADSKAGKNPYDGFTPSVPSGEILNFGDDNFVSLEAAGIKEAHNAAFVLVAGGLGERLGYKGIKVALPRETTTGKCFIQHYIESILVLQEASCKTVDDGCQKKIPFVIMTSDDTNALTIKLLESNSYFGMEPSQVKLLKQEKVACLADNDARLALDPSDKYKIQTKPHGHGDVHSLLYSSGLLEQWKSEGRKWVLFFQDTNGLLFNVCTLASLLRYNFTAIPSALGVSATKGYNVNSLAVPRKAKEAIGGITKLTHVDGRTMVINVEYNQLDPLLRATGYPDGDTNSETGYSPYPGNINQLILELGPYIEELKKTHGAISEFVNPKYTDSTKTSFKSSTRLECMMQDYPKTLPPSTKVGFTVMDTWLAYAPVKNNPEDAAKVPKGNPYHSATSGEMAIYRANSLILRKAGAQIADPVVDTFNGQEVEVWPRVTWSPRWGLTFQSVKEKVHGSCSVSQRSALVIDGRSVFLDGLSLDGTLIVNAVDGAEVKVTGHVENKGWTIRHVDYKDTSEKEEVRIRGFKFNKSEQLEVNYTEPGKHSLSA

SEQ ID NO: 13760 - protein, 120 aa, Zea mays
  VARIANT 43: note = Ancestral polymorphism is S, Derived polymorphism is A
MGVYTFVCRNNGGEWTAKQHSGEIEASAATPYELQRRLVAAASAADSAYGVQSSFSMVTPSSAVFQVIVGAVGGGAMMVSGGGGGGAAASGGAAAEAPKEEKKEEEKEESDDDMGFSLFD

SEQ ID NO: 13761 - protein, 264 aa, Zea mays
  VARIANT 61..264: note = Derived polymorphism lacks residues 61 to 264
MKKNKSGASNYLCLAPIFNSCVSSGKQQPSNADAAARNRLSFSFPERQQQPAPAEEEQNSESIIDPAASVIARKEKEKDGGKHCAVIVGTIFGRRAGRVTFCVQRDAAVPPPFLFELSVPTQSLATEMGSGLLRIALECHRGAGDDHRSSVWRASCNGRDVGHAVRRRPTEWDRQVLDSMRTMTTGVGALPPAVAMGRPNDGDDGDAQQDGDGGAAGEVLYMRATYERVVGSRDAVSFHLINPGGGGASPPQELSVFLLRTRGD

SEQ ID NO: 13762 - protein, 130 aa, Zea mays
  VARIANT 44: note = Ancestral polymorphism is A, Derived polymorphism is E
  VARIANT 43: note = Ancestral polymorphism is A, Derived polymorphism is E
MMVMGYFRSSTTKSATAAAKQKARTTREELGLREALLDQPAAAEEEGGVPKGYFAVYAGEESRRRFVVPTGYLREPAFRDLMERAADEFGFAQAGGLRVPCAEEDLEDLLRRLQRKNAAGKGKKKATVCR

SEQ ID NO: 13763 - protein, 860 aa, Zea mays
  VARIANT 579..860: note = Derived polymorphism lacks residues 579 to 860
MEREDADGALDSWAQFCTLSNELLAGDGDLAVGPRLAPVVGDLCTRGLATLVRDYFLHSLEETFRNHAVKKFWQHFHPYCSASTVDRIKFCVKEHWPEEILSKALEDICLERGYQEKCVLVLVQVLQSYEDRMPRKKIKEVVCSSSLMPRYQLMVSSVLLTTLPLSFPDILNIYFKKKLEELNSIMAGSYESDQLVDHEPFQRSNTSDWHSGMDIDGSEVSENSSLVKNIGKVVRDLRCIGFTSMTEDAYSSAIIWLLKSKVYELAGDDYRVSVLWCVKKWIQAVPLQFLHALLTYLGDSVDHGSGSSGLKSPLASRPSSFPGIGVPSEALVRWHMRLEYFAYETLQDLRIGKLFEIIVDYPESSPAIEDLKLCLEYTGQHSKLVDSFISSLRYRLLTAGASTNDILHQYVSTIKALRTIDPTGVFLEAVGEPIRDYLRGRKDTIKCIVTMLTDGSGGSGSGTGNAGDNLLEELNRDAENQENADYDDHANIDEKQAWLNSESWEPDPVEADPLKGNRNRRKVDILGLMVSIIGSKDQLVNEYRVMLAEKLLNKSDFEIDSDIRTLELLKIHFGESSMQKCEIMLNDLIDSKRTNSNIKTSLLKSSQTVPGQEEAEVSHDVLDATIISSNFWPPIQIEDLVVPASVDQLLSDYAKRFHQIKTPRKLLWKKNLGTVKLELQFDGRSVQFTVAPVHAAIIMRFQEKSSWTSKALATEIGIPMDSLNRRISFWTSKGVLTESAGPDADDRTFTVVDSMSDVNKDSIVNERMAEYQMTEEEGESSVASVEEQLKKEMTVYEKYIVGMLTNFGSMSLDRIHNTLKMFCIAEPSYDKSLQQLQSFLSGLVADEKLETRDGLYLLKR

SEQ ID NO: 13764 - protein, 1444 aa, Zea mays
  VARIANT 247..1444: note = Derived polymorphism lacks residues 247 to 1444
  VARIANT 855..1444: note = Derived polymorphism lacks residues 855 to 1444
MTMGTVVGEMLASAVLKVVMGKLGAVIGPEVNMLWKFKDDLESIRSTLLTLQAVLNDAEKRSSREERVRLWLKRLKFAAYDIHDILEEMESNNDIGYGSFKKLSAHITIAHKMKKMRQRLEKIKEEAKLDIFNFKADCCSLDENVNSRATFSCISEDIVGRSTEKETIVAMLTTYSEEEILTICIYGFGGLGKTTLARLAFNDENVGGVFDYRVWVYVSMKFDLKKIGESILSEIDEGNCGHHGNLQEVTRHLQRVLDGKKFLVVLDDLWEDNWIQLQNLKAMLSCGAKGSKIVVTTRTGKIASLMDHCMPYKMDVLSDDDCWILFKRRAFVPGRDDPRIEVIGRDIVKKCNGVPLSAQALGFMMRFKEGVAAWEAVRDSEIWEIEDQNIMPSLKLSYCLMPCHLKLCFAYCVVFSKGAAIDKDMLIQQWIALGFIQPTSGSLTHVKRGEEYIRELVSMSFLQASMFSSSADNHHMKAARVFQMHDLVYDLARCVANEEFLFMDAKKSGMTSARNDHYRHIVLMNYVEVPMNSKAALCKAKSLHFRDCKRLQISGRSLSLTLSKFLRVLDISGCSMLGLPSQLNQMKQLRYLDASGMQNELKQESFAGLKCLNALNLSAGYFQKLPVQIVNLEKLHYLNLHGCSRLMLIPESICELRDLVHLDLSGCINLRVLPTSFGKLHKLSFLDMSGCLNLVSLPESFCDLRSLENLNLSSFHELRELPLGNHQELLILDMSNCHKIQILPMSFCNLLHLEDLNLSCCYELQELPEDFGKNRGLRILDLSNCHRLQTLPDSFTDLVNIEKLILSDCWELVQLPELLGFLQKIQVLDLSCCSQLFALPESVTKLTNLEHLNLSCCISLEKMPGDYGSLKKLKLLNISYCFKVRIPNGIANMSNLKCLMAVGLDGYSCGNKDDFNIVSSLLCMPRIDLSKKDSPIGDFHGILKHKRLHLFGLGNVQSIDEFENLGLCRHQQLNSLRLSSSYMNGNEVAKFIPDDIVLEKIIPPRTLEHFELLGYHGSEFPEWMLNLTTILPNLVHLKLSGLATCDHLPPLGQLPNLQSLVIECIPNVKAVGEVFAGGSRAFLKLRDLTISGMPNLERWLTTLSTTNEEAHVYVFPNLHHLKVSWCPKLIFEPSLPQCLLLEIDACGEILQGWTASHSQINLRPTRRLSFQFCDLSFSRGDQLHFFSSLSSLKFLTVRSCEGLDTWGESIGTLTSLEVLELSLCDIPMFLGRIASLQSLSIEMCHLPCDFSHYLLQLPFLRQLQIVCCNAKLELPGEITRAILARIPNISIHNVGCVRHIEQENGICQNVSVDKVGCTSSIDVIVVPPRVRADPAASQNPAVVARRMVLKSPRLRIKRPVVVAQLMKGSHRKRPAARKTRTGDKASSSTRQGTPNDSNITGEVDIGDLIDFLREEYGCRGTSTRSYQARQMTVMSGFSCMNLFC

SEQ ID NO: 13765 - protein, 345 aa, Zea mays
  VARIANT 20: note = Ancestral polymorphism is G, Derived polymorphism is R
  VARIANT 29: note = Ancestral polymorphism is V, Derived polymorphism is L
  VARIANT 35: note = Ancestral polymorphism is R, Derived polymorphism is C
  VARIANT 36: note = Ancestral polymorphism is A, Derived polymorphism is V
  VARIANT 42: note = Ancestral polymorphism is P, Derived polymorphism is L
  VARIANT 50: note = Ancestral polymorphism is A, Derived polymorphism is T
  VARIANT 59: note = Ancestral polymorphism is G, Derived polymorphism is D
  VARIANT 70: note = Ancestral polymorphism is R, Derived polymorphism is C
MGSGMSSARRRRFGLEASRGMLPLLALQVLIEYGRAGASRPPVTAALLAANSLVYLRPGALDGVLPSLARVSFNPQLIIEYGDLTRFFLSPFYHLSESHLFYNMTSLLWKGIHLETSMGSAEFASMVAVLLGLSQGITLLLSRGLLLLGDDTMYYDQHAVGFSGVLFAMKVVLNAWSDDFVYLHGMVIPAKYAAWAELILIQVFIPGTSFLGHLGGILAGLVYLWLKRASNGPDPITLLISSVANVVTWPVRFAQNLLRSARSQGRVTGRGRVGRRISARDSPRGFWRCPTCTYDNSVSTDICEMCSTARDNHAFLRRQHHQAVGNTVELPVDEMRRRRLQRFDR

SEQ ID NO: 13766 - protein, 183 aa, Zea mays
  VARIANT 32: note = Ancestral polymorphism is R, Derived polymorphism is H
  VARIANT 19: note = Ancestral polymorphism is V, Derived polymorphism is M
MAMKPAAAAPPTPAAAHSVFVYGSLMADEVVRTILKRVPPAAPALLPNYHRFNIKGRIYPAILPVESKRVAGRVIMGVTDEELQLLDAFEDVEYTRTRVEISLADSSENMLADTYVWSDAEDLNLYGEWDFEEWKKLHMKDFLAMTNGFMHELEQPESKTRVETYQEFMQQQEQPAPGTQVEG

SEQ ID NO: 13767 - protein, 157 aa, Zea mays
  VARIANT 46: note = Ancestral polymorphism is V, Derived polymorphism is M
  VARIANT 32: note = Ancestral polymorphism is C, Derived polymorphism is Y
  VARIANT 24: note = Ancestral polymorphism is L, Derived polymorphism is M
MSRGSRLRWLWRAPARALGRARDLYVRGLTGCARYVPSDAAFGYPVLVPAPPLSRSHSVDWGRGAADEDLRELVRAASQRRVVEQRRAELRAVARSQSMAASLSMGRIDEDAPCELGAAAGDGPGALCPRSQSCVGDAAGRRALARRGHGKLVPSVV

SEQ ID NO: 13768 - protein, 129 aa, Zea mays
  VARIANT 40: note = Ancestral polymorphism is P, Derived polymorphism is S
  VARIANT 57: note = Ancestral polymorphism is R, Derived polymorphism is W
MTTAPWMPPPPPDQREYLYREGRRHDGGEGDPLLLPAPMPPRWWDSPYHPSPPPHLRDHARPSPRRAPMSASSGGYYRQGGGAYDRSYPDDPQPIYTPSRSDRYWPKDDGGGYKGFVRYGGVATGTAVT

SEQ ID NO: 13769 - protein, 774 aa, Zea mays
  VARIANT 260: note = Ancestral polymorphism is R, Derived polymorphism is W
  VARIANT 423: note = Ancestral polymorphism is V, Derived polymorphism is F
  VARIANT 425: note = Ancestral polymorphism is A, Derived polymorphism is T
  VARIANT 459..774: note = Derived polymorphism lacks residues 459 to 774
  VARIANT 499: note = Ancestral polymorphism is S, Derived polymorphism is Y
  VARIANT 539..774: note = Ancestral polymorphism lacks residues 539 to 774
  VARIANT 577: note = Ancestral polymorphism is P, Derived polymorphism is S
  VARIANT 625..774: note = Derived polymorphism lacks residues 625 to 774
MWRLKVSEGGGPWLRTENGFLGRQVWEFDADAGTPEERAEVERLRQEFTRHRFQRKESQDLLLRMQYAKSSQRLSPSTPSMKLENSEEVTEEIILTSLRRALSQQSILQAHDGHWPGDYSGFLVIMPMFIFSLYVTGSINTIISPEHRHEILRYIYNHQNEDGGWSTHVLTTSTMLGSCLNYAALRLLGEVAHREEDALSKGRAWILSHGSAAALPQWGKIWLSIIGAYDWSGNNPIIPELWMVPYALPIHPGRFYCFFRLVYMPMAYLYGKKFVGPITPTVLALREELYNIPYGNINWKEARRSCSKEDLLYPYSQVKNIIFTCLNKFVEPMLNCWPINKLRERALHNLMEHIHYEDETTKYICLCPVNKALNMICCWVENPNSNAFKQHLPRIYDYFWLAEDGMKAQVYNGCQSWETILTVYAFCSTNLIDEFGSTIERAHEYIKRSQVLKDQPNYQSYYRQRSKGSWTLSTVDSTWNSPDITAEALKVLMLLSKISPNLVGNPIEEQKLYDAVDCILYSMCKDRHITIYIFCFVNWVLKNEGGTFSSYECQRTASWLEIINPCENFMNIVVDYPYVECTSSVLEAFIFFKELYPSYRTKEIDKCINNAAMFIENKQRKDGSWYGTWGICFICGTFFAIKGLVATGRTYDTSSSIRQACNFLLSKQQATGGWGESYLSSEIGNYINGNTHVVNTAWAMLSLIYAGQVERDPIPLYQAARELINMQLDTGDFPQQEHVGCFNSNFYLNYPNYRNLYPIWALGEFRQRLGANKK

SEQ ID NO: 13770 - protein, 358 aa, Zea mays
  VARIANT 93: note = Ancestral polymorphism is P, Derived polymorphism is L
  VARIANT 154: note = Ancestral polymorphism is G, Derived polymorphism is S
MGTSAQESPLWKRIDDAEYYLVSGSFDQAVLTALSVADEIHMASLESASDQDELLEMLESAGMVLVQALKELRRASEMFAQLKMMFGSVPSVPARVFLTGATIQMAEGSISDLRPIFEEYLANWRYTDDEVYVFDGGNDSTSNGFVVKSIMSTGQYFEVAELYTVTFLCIVSQDSETAISWAEKAHLTEQSRQDLLKKLHAVQLAANKKLSTVEGVKQTAERNLSTSTNDSTPSPHEDPPKIVPACDGLKKVLLKSAQQAQHVANHFDPFFWWFHSIRLKFGKIHIVLPSGKLVFLFSLLFSAMYVLRRKTAGLKRAVFQQAASLRRAFFDALQLAFSVQMNPLAAVQQVPQAPRGSW

SEQ ID NO: 13771 - protein, 408 aa, Zea mays
  VARIANT 357..408: note = Derived polymorphism lacks residues 357 to 408
MNSRIPFLQKMHRWIIPSCGDTRQPRPSSRHRDAFPRPASASASASAAPSPQKLRKVGSEGTLVLSVPKDVEEIRTMSAYGRLKLFTYHELRKATGNFNPGQIVGEGGFGVVYRGVIDGSVRKGYPSTAVAVKVLNPQGLQGDREWLTEVSYLGQYSHPNLVELIGYCCEDDHRLLVYEFMAKGSLEHHLFRRSCRLSWTTRVAIALDVARGLAFLHGPDRPIIYRDFKSSNILLDAKFNAKLSDFGLAKEGPMGGETHVSTRVMGTYGYAAPEYIATGRAPDGDERRVRLRRGAAGDAGGTARAGAEPGGRPRRQPGGLGAAHPYPAQKVGADPGPADGRGLLGDGPAARGPPRVRLPQPEPQGPALHGQGRHHARGSPRRRCRCRRRRAAVRPEVDVGSRVGIRIN

SEQ ID NO: 13772 - protein, 186 aa, Zea mays
  VARIANT 41: note = Ancestral polymorphism is Q, Derived polymorphism is K
MGICVSCDAADEGAATAARVVLPSGELREYAPPATAAEALQAAGEGSSWLLCDADGMAFEGPVAVAAVAPGSELQAGQIYFVLPAEMQRRRLARAEVAALAVRASSALARAAALAQPSSPCRRRRRGAAAQLVFPVPEEEFAAADPVASKPAAAVVAHRKRRVAYRGGSGRASRFSPDLTAIPESE

SEQ ID NO: 13773 - protein, 214 aa, Zea mays
  VARIANT 134..214: note = Derived polymorphism lacks residues 134 to 214
  VARIANT 58: note = Ancestral polymorphism is G, Derived polymorphism is D
  VARIANT 39: note = Ancestral polymorphism is V, Derived polymorphism is A
MGKGFPSYLAMKTGPEGGDGAAAAAQQALIDADLRNLGVAARKLANHAFVLGGGLGFGTSFLKWLAFLAAVYLLILDRTNWKTNMLTALLVPYIFFTLPNVLFSLIRGEVGKWIAIIALILRLFFPRHFPDWLELPGSIILLTAVAPSLFAHTFRDDLVGVFICLAIGCYLLQEHIRASDGLRNAFRKGNGVSNSIGILLLFIYPVWTGVLQIL

SEQ ID NO: 13774 - protein, 184 aa, Zea mays
  VARIANT 131..184: note = Derived polymorphism lacks residues 131 to 184
  VARIANT 113: note = Ancestral polymorphism is E, Derived polymorphism is K
  VARIANT 97: note = Ancestral polymorphism is P, Derived polymorphism is L
  VARIANT 63..184: note = Derived polymorphism lacks residues 63 to 184
  VARIANT 41: note = Ancestral polymorphism is R, Derived polymorphism is W
  VARIANT 23: note = Ancestral polymorphism is T, Derived polymorphism is A
  VARIANT 20..184: note = Derived polymorphism lacks residues 20 to 184
MCLFIFSYKNMFVTNYLQVRSLAISLLDLDHLLFYFAGIIRKTRTVMECLHRFCRDCIDKSMRLGNNECPACRTHCASRRSLRDDPNYDALIAALYPDIDKYEEEEFAFSEQERIQNKKIQETIEETFRRQSDAIGKKRSMAKATATAFARKYRRTRGRVRTIPPDITPTGSSEEERGEGNSKE

SEQ ID NO: 13775 - protein, 532 aa, Zea mays
  VARIANT 13: note = Ancestral polymorphism is W, Derived polymorphism is R
  VARIANT 19: note = Ancestral polymorphism is F, Derived polymorphism is S
MGITKLLHVLFLRYLVFTFQTVEFAVSRCSNNRQHRLSCAVVLITLNIDCHVQASDYRASKPFASTELNPQSVVAMDQIATPDETAHASAPSVHKLFDAKLGHHSVMDGTLASTSQSSNIKTQLIRSSSLSRSISVNLEKRSPESDPESPQSHVSHPKFAEPMFSNSSTFCTSLFSSSSTTEPCRQMGTLPFLPHPPKCEQQVSAGHSSSSSLLLSGDTGLDVAEQSDDLNDLLNLSGDASDGSFHGENNALAFDEQMEFQFLSEQLEIAITDNEKNPHLDDIYGTPPQLSSLPVSSCSNQNLGSPVKVQLSSSQSSSSSATANKSRLRWTLELHERFVEAVKKLEGPEKATPKGVLKLMKVEGLTIYHVKSHLQKYRLAKYIPEPKDDKKASSEDKKAQLGKGSIDSSKNKNLQVAEALRMQIEVQKQLHEQLEVQRQLQLRIEEHARYLQKILEEQQKAGNVPLKAPTKAQATKSSPESTSDERTESEVDTISPRPPKNRNPGVDAECKSPGRIKRTKVQADLENEGLCS

SEQ ID NO: 13776 - protein, 163 aa, Zea mays
  VARIANT 125: note = Ancestral polymorphism is V, Derived polymorphism is M
  VARIANT 114..163: note = Derived polymorphism lacks residues 114 to 163
  VARIANT 104: note = Ancestral polymorphism is R, Derived polymorphism is L
MASRCLAAASEAAVVFLIRPILAIVFVFTLILLGWYVAWTTVLVHVPLVQEIAGLRPKKPSKPKPANRGRVAKFYRNQAEAAQRLNAKRRIPEPNLEWSFCSIRCSTVFGTMPKGPGGIINCIFMFFMFTLWVWDAYLKFLSFLVMPTVGAKVKLFDAIQRKA

SEQ ID NO: 13777 - protein, 537 aa, Zea mays
  VARIANT 17..537: note = Ancestral polymorphism lacks residues 17 to 537
MPLPLAKARRGSSPQPSPQPARSSCRSQLEQDVKRLRKALQDETALHAVLEGALGRAAVTLADMAYLPTNAQELLSTICILETAVTKLEEEMVSLHFQLTQERNERRLVEYRLKHLPPPPSACSCHSGKLGPDDPTGEKCSSQTEEVYPRAVLHEQAVKLQRQISVKSFVDPNQLSEDIVRCMRNIFISLSDSCRDSSRNSNMENQQSIPSPTGNYSISAFWTLSEPSSISSWVQSPQVDLNYNNNVLASETVFDPYKAREKLSWADIGSYGAAAEVSWMSVGKKQLEYAAESLRKFSTNDRPLECRLFIEQLAEINPIHLSDDARLAFWINLYNALMMHAYLAYGVPRSDMKLFSLMQKAAYTIGGHSFSAAFIEYVILKMKPPSHRPQMALLLALQKIKVPEEQKKFCIAAPEPLLTFALSCGMYSSPGVKIYTANNVREELQDAQRDFIRASVGVSRKGKLLAPKILHCFARGFVDDNSFPIWISHFLPQQQATFVDHCVSQRRQSLLGTRTFGVVPFDSRFRYLFLPDAGSLN

SEQ ID NO: 13778 - protein, 173 aa, Zea mays
  VARIANT 165: note = Ancestral polymorphism is R, Derived polymorphism is G
  VARIANT 16: note = Ancestral polymorphism is A, Derived polymorphism is V
MSAPAAQAVVALALAAILSTPAPQADTFSNVPPTLSGGDGKQERIKHPRSAKALQCTTKCVGTCIRGGGGAPGEGPLNVRRPLVVFKDGFRSRQYWWVLLLPALQPPLLFTIADATTARGSPKMGRTDPETGQRNNMPKPKVVGATAMAAVQARYGIRFFCQASRSRTSEATR

SEQ ID NO: 13779 - protein, 168 aa, Zea mays
  VARIANT 21: note = Ancestral polymorphism is L, Derived polymorphism is Q
  VARIANT 49: note = Ancestral polymorphism is R, Derived polymorphism is C
  VARIANT 58: note = Ancestral polymorphism is G, Derived polymorphism is D
  VARIANT 65: note = Ancestral polymorphism is R, Derived polymorphism is H
  VARIANT 70: note = Ancestral polymorphism is R, Derived polymorphism is C
  VARIANT 72: note = Ancestral polymorphism is P, Derived polymorphism is L
  VARIANT 74: note = Ancestral polymorphism is R, Derived polymorphism is K
  VARIANT 78: note = Ancestral polymorphism is P, Derived polymorphism is L
  VARIANT 85: note = Ancestral polymorphism is A, Derived polymorphism is T
  VARIANT 108: note = Ancestral polymorphism is P, Derived polymorphism is S
  VARIANT 118..168: note = Derived polymorphism lacks residues 118 to 168
  VARIANT 119..168: note = Derived polymorphism lacks residues 119 to 168
MVLAVMVLLGAMAVLVVVVLLQPRAPFVAVTVWVEARNGNAHSAAYFSRLEYRLAFAGATLAVLRAYPFRVLARGVLPLAYVARAQGAPLGDAGSAAMEVALRDGVVSFRVEGEARTRWKVAGIVGVDQWTRLACQLRFFWPNGTVSPSDAAPSPSSCSSDRRALCIV

SEQ ID NO: 13780 - protein, 155 aa, Zea mays
  VARIANT 68: note = Ancestral polymorphism is R, Derived polymorphism is Q
MDGGSWWYGNVRTPNPVMSQAASISASPGLTISANHALESESDSDSESLYEVEGVPYERGNRSIETKRIRRMVSNRESTRRSRRRKQAQLSDLESQVKMAEDMVARSVVSCDLGDLGLAPYVNSRKMCQALNVLTGLDLLGSDAFTYGARPHDTY

SEQ ID NO: 13781 - protein, 284 aa, Zea mays
  VARIANT 272: note = Ancestral polymorphism is V, Derived polymorphism is D
  VARIANT 101: note = Ancestral polymorphism is A, Derived polymorphism is T
  VARIANT 76: note = Ancestral polymorphism is A, Derived polymorphism is T
MPGHALRTFQEMGMYGCPRTAKSLNATMKVLLRARMFDEALSLFEEGPEKYDVEVDDISCNTVVKMFCDMGDLRAAYRVMQGMERAGLRSDVITYMTLMAAFYKCGRHEVGDGLWNLMRLRGWVPTLATYNVRIQFLVNRGRGWQANEMARKIYVAGIKPDEITYNLIIKGFFMMGEHEMAKTVFGAMHGRGCKPNSKVYQTMVHYLCERRDFDLAFRLCKDSMEKNWFPSVDTINQLLKGLMAISKDRNGKEIMKLVTGRKPSYSYGEMKVFKDILSHRKTGR

SEQ ID NO: 13782 - protein, 163 aa, Zea mays
  VARIANT 148: note = Ancestral polymorphism is V, Derived polymorphism is I
  VARIANT 134: note = Ancestral polymorphism is P, Derived polymorphism is S
  VARIANT 26: note = Ancestral polymorphism is V, Derived polymorphism is I
MSQPFVQRCARLKQQRDLSLYKMRAILPLRLCCGVSRQPPSRLIRLVLPARTHSRLLSLLVLLLDPMLVCTTSLTGGSSCKWYVNPQVPEATSLTASLQHKRSPITSATGSTQCVPRISTAEHKKLSKIKYLHPFKHEKVSWLVTVTVLKIDQLWWYESCRKC

SEQ ID NO: 13783 - protein, 338 aa, Zea mays
  VARIANT 54: note = Ancestral polymorphism is T, Derived polymorphism is M
  VARIANT 61: note = Ancestral polymorphism is T, Derived polymorphism is M
MPRMAKLLLQLKAAADRRHGPGPGRRHPLAPRHAAASATRFVPACLALAAAATTLVALALTLQNRGLGPADPSPSSVSPRGGGFAVVVNTWRRPALLRRSVAHYAACGGVDAVHVVWSEPRPPPEPLRRGVLGLGGARRRVRFEINAGDSLNNRFRPIRALESDAVFSVDDDLIVPCSALRFAFSVWRTAPSAMVGFVPRMHWPTDPRSTEDAYRYGSWWSVWWTGTYSMVLSKAGFFHKKYLEMYTNQMPPSIRRYVDENRNCEDIAMAFLVANATGAPPIWVQGRIFEIGSSGISSLKGHGLQRSRCLNAFAAMYGHMPLVATTVKAVDSRGSWFW

SEQ ID NO: 13784 - protein, 492 aa, Zea mays
  VARIANT 143: note = Ancestral polymorphism is P, Derived polymorphism is L
  VARIANT 264: note = Ancestral polymorphism is H, Derived polymorphism is Y
MKQPRGRQEPRRVGNAAMVVTMVVSLCVLTYIKARYCSNPFRTSPPLRFLLLLLRFLLLPAFSSVHPLTVPTAGYDVAAKAVAEVEVDEDYDSTRYKLTGPVGEEDFDPSRPTCYNTSKRSERCAAVGDIRVDGNHSRIYISPLSREWRTKPYARRHDAVAMDDVREFTLVPFGGPNDTAVPPLCTRTHSVPGFLFSSGGFAGNLYHDYADVLVPLFASTNHLGGEVQFLLADIKDWWADKFRPLFRQLSRYDVIDVNNDREVHCFPRIIIGSTFHRAMGIDPSRSPGGVTVADFKRLLRRAFRLERAVASRSGAPRRRDRPRLLIISRKSSRRFVNERAMARAAAAARFDVRIAEPDNHTDMPNFARLVNSADVMMGVHGAGLTNMVFLPSRAVLVQVVPFGGLEWLTRVTFKDPARDMDVTYMEYNVSLEESSLRDLYPEDHFYLKHPYDVHKKGWDAIKTVYLDKQNVRLNLTRFTRTLEQARDLLPTP

SEQ ID NO: 13785 - protein, 199 aa, Zea mays
  VARIANT 84..199: note = Derived polymorphism lacks residues 84 to 199
  VARIANT 69: note = Ancestral polymorphism is S, Derived polymorphism is L
MAAIYSIAFRYKYLWMFSICTNSCWCLTGGFTRPEDGENMNHVGKGNVDRWLHMLMDNQQEDHVAYHSSDEHDNDEENASDEQRTQSRVDEESCRNGITEYFDEIVEVEDEIVSDQGAERGRNSFGIKDREEKKIWFHRTDSTWGFRSLPSSPSMILGMRKGVERMAVDDDRKYGYEDSVSRSSTKFPRPAACAAAPRR

SEQ ID NO: 13786 - protein, 304 aa, Zea mays
  VARIANT 86: note = Ancestral polymorphism is G, Derived polymorphism is R
MLISPRLAAPAASRTSPSLPTTTPTRPGIRGRRRSGFDAPVDAASLHHGDRTRPALRFTYPAPSASVTTTSSPEPIDCRLDSDELGRLYREHNPEAAVSLLDEMLQRGSAEQLEPEEQAALLQACADTRSLPSLRRAHRLLTSTSGSAIPAPVLHRIATLYLKLGARGDARRVLEERTRRRPAREDDAAVQAKRREAYTKVRELHAQIRAAGYVPDTRYVLHDIDEDAKARALMYHSERLAIAFGLVSTPPGTPLRVMKNLRICGDCHNAVKLIAKVTGREIVVRDNKRFHHFKDGACSCGDYW

SEQ ID NO: 13787 - protein, 703 aa, Zea mays
  VARIANT 515: note = Ancestral polymorphism is S, Derived polymorphism is N
  VARIANT 478: note = Ancestral polymorphism is A, Derived polymorphism is V
  VARIANT 371..703: note = Derived polymorphism lacks residues 371 to 703
  VARIANT 284: note = Ancestral polymorphism is I, Derived polymorphism is V
  VARIANT 282: note = Ancestral polymorphism is E, Derived polymorphism is K
  VARIANT 230..703: note = Derived polymorphism lacks residues 230 to 703
  VARIANT 218..703: note = Derived polymorphism lacks residues 218 to 703
  VARIANT 165..703: note = Derived polymorphism lacks residues 165 to 703
  VARIANT 141: note = Ancestral polymorphism is L, Derived polymorphism is P
  VARIANT 139: note = Ancestral polymorphism is V, Derived polymorphism is M
  VARIANT 120: note = Ancestral polymorphism is P, Derived polymorphism is L
  VARIANT 80..703: note = Derived polymorphism lacks residues 80 to 703
  VARIANT 61: note = Ancestral polymorphism is P, Derived polymorphism is L
MMQGRRKNTREMAREHPQPPPVAAAAASAASSKGQAWFCTTGLPSDVVIEVGDMTFHVQFPLMSRSKKLHDLITNKESREASRRGRGAEQEEDVGEIREEEADLVLEEDEEAGVHRIHLLEFPGGAEAFELAAKFCYGVKLDLTPATAAPLRCAAERLGMSDDHSDDNLVSRADRFISQTVLRNPRDAIRALKSCEGLLPLADDLGLVSRCVDAVAAKAAASTPTALFGWPIADDDRAGERQRRKNAAAAAGATWSDDLAGLSLATFTRVIAAMKERGVGPEVIEGALIAYAKRSIPGLSRTGRHVGGGGGTAAAPPSSDVEEQKALLETVIANLPEETIKSTAHTGTAVGATTARVLFGLLRTASILHASEASRDMLERRIAARLPDAAVDDLLIPSYSYLVETLYDVDGVERIVRYFLEGRDVADEGNEEEGSEAETPGREASRRAMLSVGRLVDAYLGEIATDANLKPDKFCDLAWALPDGARVYDDGLYRAVDIYLKAREQRVLVIFWLASLFWLVSLQAHPGLSEEEKEKVSGVVDGRKLTLEACTHAAQNERLPLRTVVQVLFFEQLQLRRAIAQTIMANEGGAAGSGEEGGESDGGGTWRVAARGNQMLRLDMDSMRNRVQELERECTSMRKAIDKMDRRGGAPVDRGAPSVPPADGRWGAIVTKRFGCKFPAQVCQSQQRTVVARTRRPRIEQSP

SEQ ID NO: 13788 - protein, 159 aa, Zea mays
  VARIANT 13: note = Ancestral polymorphism is M, Derived polymorphism is T
  VARIANT 15: note = Ancestral polymorphism is S, Derived polymorphism is L
  VARIANT 67..159: note = Derived polymorphism lacks residues 67 to 159
  VARIANT 79..159: note = Derived polymorphism lacks residues 79 to 159
  VARIANT 132..159: note = Derived polymorphism lacks residues 132 to 159
  VARIANT 156: note = Ancestral polymorphism is S, Derived polymorphism is G
  VARIANT 158: note = Ancestral polymorphism is T, Derived polymorphism is M
MDRLAYAMRAPSMTSGPTPRSFMAAMTRVNVAKDRPARSSDQVAPAAAAAFLRRWRSPALSSSAMGQPKSAVGVDAAALAATASTQRDTRPRSSARGSRPSQDLRARMASLGFLSTVCDMNRSARETRLSSEWSSDMPRRSAAQRSGAAVAGVRSSFTP

SEQ ID NO: 13789 - protein, 626 aa, Zea mays
  VARIANT 92..626: note = Derived polymorphism lacks residues 92 to 626
MGGGGAIVHGFRRWFHRRSEGSTSNSNQSSLAGEGEADDGSSDLEVIEDPDLLGLRAIRVPKRKMPLPVESHRKNSVEMEFFTEYGEASQYQIQEVIGKGSYGVVAAAVDTRTGERVAIKKINDVFEHVSDATRILREIKLLRLLRHPDIVEIKHIMLPPSRREFQDIYVVFELMESDLHQVIRANDDLTPEHHQFFLYQLLRALKYIHAANVFHRDLKPKNILANSDCKLKICDFGLARASFNDAPSAIFWTDYVATRWYRAPELCGSFFSKYTPAIDIWSIGCIFAELLTGRPLFPGKNVVHQLDIITDLLGTPSSETLSRIRNEKARRYLSCMRKKYPVPFTHKFRHADPLALRLLERLLAFDPKDRPSAEEALADPYFASLANVEREPSRHPISKLEFEFERKKLAKDDVRELIYREILEYHPQMLEEYMKGGEQISFLYPRERVVVSKDGNTEQQINDQERSADSVARTTVSPPRSEDADMDDVKPTSLSSRSYLKSASISASKCVVVRNKHPEPEVMLNCLNSTRGKMMEYLRRWKAPSMDCLKRSPGCTPKAGLSMATAISTQDFCLVHCNADDTLFGSCVHPQLVQLRCSTSSSMEEAEWTMKCGQPVDHEVFSSNGV

SEQ ID NO: 13790 - protein, 504 aa, Zea mays
  VARIANT 152: note = Ancestral polymorphism is E, Derived polymorphism is V
MRGLRVSVPVTESHLPGRHPPDGAPDPPYASVLSLAEASPRAAARFRLGGRRSCCLATRSRRSPSFEPVPIRTTEKPPPRESRVAPMKVELAAQTSQTSTPLPPSPEAASASPPAEDAPLLPDAGVRRRAACGRFAQRSGSFRREVGRAAAETFLLTRLTLILLRYLGIGYRWIRQFLALCCYTLLLMPGFIQVVYYYFFSSQVHRSVVYGDQPRNRLDLYMPTSTTGLKPVVAFVTGGAWIIGYKGWGALLGRRLAERGIIVACIDYRNFPQGTIGDMVEDASQGIAFVCKNITSYGGDPSRIYLVGQSAGAHIAACALLNQAIRESGEGDTSSWSVSQLKAYFGISGGYNLLNLVDHFHRRGLYRSIFLSIMEGEVSLQKFSPQMMIMESSARSAVSLLPRIILFHGTSDYSIPPAESQAFADALQQQGARADLFLYEGKTHTDLFLQDPLRGGRDKMLEEIARVIHSEDPDAAAQHLVVVPVARRLVPEFMLKLAGRVSPF

SEQ ID NO: 13791 - protein, 475 aa, Zea mays
  VARIANT 85: note = Ancestral polymorphism is I, Derived polymorphism is V
  VARIANT 102: note = Ancestral polymorphism is L, Derived polymorphism is F
  VARIANT 117: note = Ancestral polymorphism is T, Derived polymorphism is A
  VARIANT 157: note = Ancestral polymorphism is R, Derived polymorphism is G
  VARIANT 190: note = Ancestral polymorphism is S, Derived polymorphism is F
MASTSSPHRKLLHSLVYWAVQRCRMSELPCRLTVSLKRPAEPASSPPLRVSVSDTGVGSKLEEFLELDALAREIPVERWDGTLLVTTTGINDEAIYRYQINLQEETSSARFSKLATAYKNHARFSGTEVCLCLSNDADVDDFVLWLVCFFKKIQVLRAANLACELFVEQTGNTGSRNVCLPQDSDDVHHSVTASSIDQLVSGLKDYSLSHVNSCDKCGMCLFDRDLLKIGTGAANHVERRKANRLHVEVVIVIAHIASDSDCCMANCSSTQVLYFEDFVPCQILQSSFDVLMSTDWQSYGFKLKGGLMGDDGNAVLEWDNMAFARIDISIHTYHECAMQERQGSPQDRYLLRKALKSALTHLKADHAGDFLSCHGQRVREYVPDLAESIAGLILSSTDEEFQGECFALLGLGSEQDVSGGAVQSSICEKMIRIIEINDTKDNSEDNVPYLFECEKLDEDSELDEGGGDEDMASDF

SEQ ID NO: 13792 - protein, 190 aa, Zea mays
  VARIANT 115..190: note = Derived polymorphism lacks residues 115 to 190
  VARIANT 140..190: note = Derived polymorphism lacks residues 140 to 190
MEPSPVGDGGSAERWRAEASRAFQHYLDRAAPHTAGRWAGTLVAAAVYALRVYYVRGFYVVTYGLGIYLLNLLIGFLSPMVDPELEALEAGPGLPTRGSEEFKPFVRRLPEFKFWYAITKAFCIAFVMTFFSVFDVPVFWPILLCYWIVLFVLTMKRQIMHMVKYKYVPFSFGKQRYGGKKRPGASASKE

SEQ ID NO: 13793 - protein, 885 aa, Zea mays
  VARIANT 770: note = Ancestral polymorphism is V, Derived polymorphism is A
  VARIANT 636..885: note = Derived polymorphism lacks residues 636 to 885
  VARIANT 487..885: note = Derived polymorphism lacks residues 487 to 885
  VARIANT 257..885: note = Derived polymorphism lacks residues 257 to 885
  VARIANT 256..885: note = Derived polymorphism lacks residues 256 to 885
MAIVGEFLFQRITASHLANPLELPPLDGVSIVVLIDFFTPQIGVNRGACKVVLKSEGATKIQFSVSPESGSPLEYAIVPCHIRPLLKTKFVSLRRVFRLEPPPRLPSPALQQVLKSEGATKIQFSVSPESGSPLEYAIVPCHIRPLLKTKFVSLRRVFRLEPPPRLPSPALQQVLKSEGATKIQFSVSPESGSPLESYSSSAEDKIREVRIYGNYFDMDPVNPNSHRKRNYNNACYAPSTLSHAEARRIRKRVLDQRKLALAGSSMPSQHTPTLQCGHFDPDFVKTIKGGKVRIPAYRPRPEPLLSLARFDGDVVSKTFMQNIRQYNCLFAFTSMGAHIDRSLNDGRGPPVFKPQIVNELLQMLDTHNPFAKKFRIAKKRLTEHANEEFIIRIIGAKEGDPVQYDMPTTDDLAMLVIGDFSLETFKRDIIIETRNSELKRISSLHPAYMALQYPLLFPYGERGFQVGVMYSGIQNKQPNSRIHMTMQDYYCYQFHYKPGQPNPFLSYGILSNQAKVDARACIDENRLTYILNNQDKLRIENLQGISDAVSRGCINGEEMGKTIVLPASHIGGRRYMIQNYHDSIAICRVHGPPDFFVTFTCNAKWPEIIESLYHCGQKNSDAPDIAIRIFHMKLQELLHDIKSGNIFGPCKAELDPKSTNAAIRVRIIRKWEFRGATNDGPLRHVNLILADEQSYSVIINIDFIPFPNVLGILTEIGSLHHVGYNNSNIIRDIFLKDINNTSTKVTLWGHQASSFSVDNNCDENDNKPVVVLFVGCLAKRFKGEAYLSATAACTWYFNPDIPEAQVYYSKLVNTKLQMIRPEATEQEFQASQTLNIEDKTIEELLQLDPDMFPQQGFKCTVTISRLVQDGRWWFPSCIKCNKSSS

SEQ ID NO: 13794 - protein, 296 aa, Zea mays
  VARIANT 12: note = Ancestral polymorphism is P, Derived polymorphism is L
MHGYIYVVGPSLLPACMYALLPAAPNHNSISHVHTSTQAGSCWDCLGTPFLKQQVYTLYIYSSQIIIVATKCRRTLLLGTPKALTDTPSMHAMYACVFFLPFFRRELPSTLHRYASLCSCMGHCMCTKNPSSLYIYNTHTYTRTYTHARAGEKGIAKSGKPLWYKGSTFHRIIPGFMIQGGDFTNGNGTGGESIYGSTIFSDENFKHTHAKAGTLSMANYGPDSNGSQFFITTVDENRLPKKLDGRHVVFGKVVKGMDVVRKIEAEGQLTGVPKAKVVIANSGQLPAPAAAGHRDL

SEQ ID NO: 13795 - protein, 511 aa, Zea mays
  VARIANT 484: note = Ancestral polymorphism is R, Derived polymorphism is C
MATAIYLSSPAAPSSCARQRRQTTRATASATDRPREVVSPKRRLPLRKVPGDYGPPVLGAIRDRFEYFYGPGGRDGFFTSRVRAHGSTVVRLNMPPGPFVARDPRVVALLDAASFPVLFDTSLVDKTDLFTGTFMPSTELTGGYRVLSYLDPAEPNHGPLKTLLFYLLSHRRQHVIPKFREVYGDLFGLMENELARVGKADFGHYNDAAAFSFLCQALLGRDPAESALQGDGPKLITKWVLFQLSPLLSLGLPKHVEDSLLHSFRLPPALVKKDYDRLADFFRDAARRVVDEGERLGVAREEAVHNILFAMCFNSFGGMKILFPSLVKWLGRAGGRAHGRLATEVRDAVRAHGGEVTMKALAEMPLVKSAVYEALRIEPPVAMQYGRAKQDMVVESHDYGFEVREGEMLFGYQPMATKDPRVFARAEEYVPDRFLGEDGAQLLRHVVWSNGPETASPTLQDKQCAGKDFVVLIARLLVAELFLRYDSFDVQVGASALGSSVTITSLKKATF

SEQ ID NO: 13796 - protein, 172 aa, Zea mays
  VARIANT 159: note = Ancestral polymorphism is W, Derived polymorphism is S
  VARIANT 154: note = Ancestral polymorphism is I, Derived polymorphism is T
  VARIANT 125: note = Ancestral polymorphism is P, Derived polymorphism is R
  VARIANT 20..172: note = Derived polymorphism lacks residues 20 to 172
  VARIANT 5: note = Ancestral polymorphism is Y, Derived polymorphism is H
MPYDYIWSPNHPAAASDIDWQRGAARRRPSGILDEGEAGGLPQRGGATTPSALTPSGTSHSLTKLSCLLALLPLSVSLFPEHQLFAYESTSHGLSFIQQRSPAITAKGLKVSCVPCYCSEGDNIPEAFQLAEEVSKLLGHCPEKFHGNGSNGWIVPLSWKSVYGPPPDMSIF

SEQ ID NO: 13797 - protein, 220 aa, Zea mays
  VARIANT 13: note = Ancestral polymorphism is R, Derived polymorphism is L
  VARIANT 211: note = Ancestral polymorphism is V, Derived polymorphism is A
MAPSGWRRSAAARVAWRPATVCLWLALAAAALTLAQVLVNLAKKDLTEVTHKVYFDIEIDGKPAGRIVMGLFGKTVPKTAENFRALCTGEKGVGKSGKALHYKGSKFHRIIPSFMLQGGDFTLGDGRGGESIYGLKFADENFKIKHTGPGLLSMANAGRDTNGSQFFITTVTTSWLDGKHVVFGKVLSGMDVVYKVEAEGRQSGEPKSKVVIADSGELPM

SEQ ID NO: 13798 - protein, 546 aa, Zea mays
  VARIANT 64: note = Ancestral polymorphism is R, Derived polymorphism is C
MNLYCSVPGLQSSSVFAMQSLNMQEPPIAQRKKQESARPSTTASTTYMTRNATASTTAAAEPLRRIHAHLVTSGHLSSLGPTLLHRLISLHPPHLQLAYAHRLLLSIPSPPLDLFNLLLPPLASSPDPAAAAGLYIHLRRRGLGPDAHTLPHVLKALARLGPGCLPLVACTHAEAVKTGLARAVVYVPNALMSAYSACGHLHRAMQVFDEMPRWTVVSWNTVLTACADNGRHDRCAGMFVNMLEAGSVPDQTTFVVMLTAAAELGNLALGKWAHGQVLTRRTDMTLQLGTAVVNMYTKCGEVSYASRLFENMAARNVWTWSAMIMGYSQNGMVREALELFDRMKDASVAPNYVTFLGLLCGCSHAGLVNEGRKFFHEMEHVYGIKPMMTHYSAMVDVLGRNGRLQEAFEFVVDMPVEADTVVWRTLLSACQLHSSKDCIGIADKAQKRLLELEPRRSGNHVMVANIYSDIGLWDKAAMARRVMREGGMKKMAGESCVEVGGRIHRFISGDESCPGLGGVYRVLHELNINMRKWEPVDKILLADSDL

SEQ ID NO: 13799 - protein, 403 aa, Zea mays
  VARIANT 217..403: note = Derived polymorphism lacks residues 217 to 403
MASSSCVRLHHLPSTSRRSSAPTNLQFLAASCRWRRRVLVPGAAPPPLRLCATGSPQPPLGSDSNAPLSRGTREEGEEVEEQRQPPPPPRLKIAVVGFGNFGQFLARTLVAQGHTVLAHSRSDHSAAAAAMGARFFPDAHDLCECHPDVVILSTSILSAESVVRSLPLHRLRRDTLFVDVLSVKEFPKRLLLGALPEEMDIICTHPMFGPESAPSGWTGLPFVFDRVRVGDSCPARRARAEAFLGVFAREGCRMVEMSCAEHDAHAAETQFLTHTVGRMLAALELRATPVDTRGYETLLRLVDNTCRDSFDLYNALFMYNDNSTELLHRLDWALGAVKRRLFDGLHGVLRRQLFGVEDGEGPAERTELLAVVPGGGPPDTDDQGGDGRDGDGDGDESGEQKND

SEQ ID NO: 13800 - protein, 192 aa, Zea mays
  VARIANT 1: note = Ancestral polymorphism is T, Derived polymorphism is M
  VARIANT 40: note = Ancestral polymorphism is G, Derived polymorphism is V
  VARIANT 88: note = Ancestral polymorphism is R, Derived polymorphism is C
  VARIANT 121: note = Ancestral polymorphism is G, Derived polymorphism is E
  VARIANT 147: note = Ancestral polymorphism is A, Derived polymorphism is T
  VARIANT 151: note = Ancestral polymorphism is G, Derived polymorphism is D
  VARIANT 152: note = Ancestral polymorphism is L, Derived polymorphism is M
  VARIANT 156: note = Ancestral polymorphism is E, Derived polymorphism is V
  VARIANT 158: note = Ancestral polymorphism is E, Derived polymorphism is K
  VARIANT 162: note = Ancestral polymorphism is R, Derived polymorphism is S
  VARIANT 168: note = Ancestral polymorphism is A, Derived polymorphism is T
  VARIANT 169: note = Ancestral polymorphism is R, Derived polymorphism is C
MTSLPQRPPERPVVLHYLNDASTAKSVPDVAPPTSSSASGRFLPPESPTTTWLKKRLLLSPSWPRSLRIRRRAAAAVAPRPSPPTASRDAGRRGDTGVRPRRRARAGAALDVPLVLRLVRGFLKEGGGGSKAARVARLVDVYLAEAALEAGLRPAEFEELARAVPAHARPADDALYRAVDTYLKVRPRSALS

SEQ ID NO: 13801 - protein, 312 aa, Zea mays
  VARIANT 46: note = Ancestral polymorphism is M, Derived polymorphism is I
  VARIANT 48: note = Ancestral polymorphism is G, Derived polymorphism is R
  VARIANT 61..312: note = Derived polymorphism lacks residues 61 to 312
  VARIANT 110: note = Ancestral polymorphism is P, Derived polymorphism is L
MADAEDIQPLVCDNGTGMVKAGFAGDDAPRAVFPSIVGRPRHIGVMVGMGQKDAYVGDEVQSKRGILTLKYLSLHITLFPTLQQSVQQSEHLFRDSCNDMGSVNEVPAQPIYIDSFPKLRAWFCKPIITKPKVALKPQTLSPQPEAQAPHDPQTPEQQQSGTGVDQVALYMSIRSRGEKQPASQETRTSLVWPVQDFSGSGDDAKSSNGKAARGGSNGGEKQGDESNGGGILSVVASRIGVVVSGANGDRSGSAEDGAKTSAGDPGHGSKGEEKGRGVNGGRIVEQIISNLPSDDQAPDADEASLLIAIIED

SEQ ID NO: 13802 - protein, 236 aa, Zea mays
  VARIANT 182: note = Ancestral polymorphism is R, Derived polymorphism is Q
  VARIANT 179: note = Ancestral polymorphism is G, Derived polymorphism is D
  VARIANT 45: note = Ancestral polymorphism is R, Derived polymorphism is S
  VARIANT 34: note = Ancestral polymorphism is H, Derived polymorphism is Q
MDGSAEPAHGAPHAAASPTGGEVAQHGHGYKRRHGVQRIRQEERSWSSGLVWLLVILCTVLTIGVIVTGATVFAVYLLYKPTTPYLLVSSARLETLAYDQSGTIRDLQLALTVLAENSNSRTDATFSRVNLAVGFRGAEVALLRAGTFAVPRRSSFPLRYQVVSAGRQLSPEGMEYMAGALRAGVVPLDLFGKARTTWKVGIFASLQFWTRISCRFLFFYPGNGTAMPIDCRSRSP

SEQ ID NO: 13803 - protein, 112 aa, Zea mays
  VARIANT 65: note = Ancestral polymorphism is M, Derived polymorphism is I
  VARIANT 57: note = Ancestral polymorphism is K, Derived polymorphism is N
  VARIANT 53: note = Ancestral polymorphism is P, Derived polymorphism is L
  VARIANT 22: note = Ancestral polymorphism is M, Derived polymorphism is I
MVAAKKTKKSTDNINNKLQLVMKSGKYTLGYKTVLRTLRNSKSKLVIIANNCPPLRKSEIEYYAMLAKVTVHHFHGNNVDLGTACGKYFRVCCLSIIDPGDSDIIKTTPGEQ

SEQ ID NO: 13804 - protein, 185 aa, Zea mays
  VARIANT 91..185: note = Derived polymorphism lacks residues 91 to 185
MCRTRAVEESMRRRMTDRLHEDFLRYAAETGHPLPLGSPPPPTPTFPMDLNEWHQQEFGVPFITPEDEAEEFDDPYYTSDPPHPPPPYSGQGPTPGDPRPSGSGHYPPPPYPGQGPIPGDPRPFGSGYHHHPPPPPPPPHHTSSASVFSAGDEPHRDSSLEEDMMHTFFTDYTSYPPSYPPPRGY

SEQ ID NO: 13805 - protein, 532 aa, Zea mays
  VARIANT 136: note = Ancestral polymorphism is L, Derived polymorphism is V
  VARIANT 149: note = Ancestral polymorphism is A, Derived polymorphism is V
  VARIANT 222: note = Ancestral polymorphism is S, Derived polymorphism is G
  VARIANT 243..532: note = Derived polymorphism lacks residues 243 to 532
  VARIANT 390..532: note = Derived polymorphism lacks residues 390 to 532
  VARIANT 406..532: note = Derived polymorphism lacks residues 406 to 532
  VARIANT 486..532: note = Derived polymorphism lacks residues 486 to 532
MFFTSPKLIQALASHGQSTTASSISMDACSLVHCHLPRPLQLPLLAPPTPSRHRPRVASALVCCCCPAAAADHHQERPWEWYDRAIQSHAGSDLARSLGLLADMQASGGRPSGSAYARLIRALSRAGRALEAEALLLEMRRLGPRPEAAHYNALLEGLLAAAHLRLADLLLLQMADDGVARNRRTYTLLLGAYARAGRLEDSWWVLGEMRRWGIRLDTAGYSMLVRLYRDNGMWKKATDLVMEMQEVGVELDVKIYSGLIDTFGKYGQLADARRMFDKMRAEGVRPDISTWNALIQWHCRVGNMKRALRFFTSMQEEGMYPDPKIFVMIISRLGEQGKWDEIKKLFDGMNNRGFKESGAVYAILVDIYGQYGHFRDAQDCIAALRAENTQLLPRVFCVIANAYAQQLMEEEGFEPNLVMLNSLINAFGTAGRHLEALAVFQHIKDSGMSPDVVTYTTLMKTFMRAKKFEKVSIEFGIIAVVIGPLSMHMIMYWFSSRLKHYACEDLDGYGIKPITLSKAPECLYVDQKSEKG

SEQ ID NO: 13806 - protein, 250 aa, Zea mays
  VARIANT 15: note = Ancestral polymorphism is G, Derived polymorphism is V
  VARIANT 40: note = Ancestral polymorphism is A, Derived polymorphism is V
  VARIANT 44: note = Ancestral polymorphism is G, Derived polymorphism is E
  VARIANT 63: note = Ancestral polymorphism is D, Derived polymorphism is Y
  VARIANT 73..250: note = Derived polymorphism lacks residues 73 to 250
  VARIANT 112: note = Ancestral polymorphism is A, Derived polymorphism is V
  VARIANT 135: note = Ancestral polymorphism is A, Derived polymorphism is D
  VARIANT 141: note = Ancestral polymorphism is R, Derived polymorphism is L
MTVFHFLNCAFLTFGPHVVYYSATPLSEYDTIGTSVKAAAVYLGTALVKLVCLATLLKVPENDSFDPCQELLKVVIGFIDAVGLYFALTQLTHRNISQNHKFQAVGLGNYTALIFPLHGFGMDIWKEAHLGWAFAASVLHRLAPLWIGARGLEFTWEYILQGLEANANLVMTLSLAALGSLMWLRKNKPRTLVPIVYACALLLATMPSITGYLRRSLEWQTPKVVGFELISSLVMALISWQLFSACQRPT

SEQ ID NO: 13807 - protein, 243 aa, Zea mays
  VARIANT 15: note = Ancestral polymorphism is G, Derived polymorphism is V
  VARIANT 86: note = Ancestral polymorphism is R, Derived polymorphism is C
  VARIANT 125..243: note = Derived polymorphism lacks residues 125 to 243
  VARIANT 128: note = Ancestral polymorphism is A, Derived polymorphism is D
  VARIANT 143: note = Ancestral polymorphism is R, Derived polymorphism is I
  VARIANT 176..243: note = Derived polymorphism lacks residues 176 to 243
  VARIANT 183: note = Ancestral polymorphism is R, Derived polymorphism is S
MVVGSTLRRASDGSGDGNALGWAACGPPPPPPRSSSPQPGHERSVAAEPSVSEKPSEPVSERWLLCLNHAPYVVPVRPVDIAAMARLLWHDGSLLGASGGGLAVAAIASALLDGLLAREELLLGWAFAASVLHRLAPLWIGARGLEFTWEYIFQGLEANANLVMTLSLAALGSLMWLRKNKPRTLVPIIYACALLLATMPSITGYLRRSLEWQTPKVVGFELISSLVMALISWQLFSACQRPT

SEQ ID NO: 13808 - protein, 117 aa, Zea mays
  VARIANT 71: note = Ancestral polymorphism is R, Derived polymorphism is S
  VARIANT 55: note = Ancestral polymorphism is S, Derived polymorphism is T
  VARIANT 41: note = Ancestral polymorphism is N, Derived polymorphism is S
MASFAVATAPSLAAPAAKRRPAAGVTYVEGMNAYSGLKGLNKVTMLGVRKTADYSFAKVVASLSPAGRKRRGGAFGAQMNAAAEIFRIAATMSGLVLVGVAVGFVLLRVEAAVEEAE

SEQ ID NO: 13809 - protein, 399 aa, Zea mays
  VARIANT 75: note = Ancestral polymorphism is P, Derived polymorphism is R
MAAPAAAKRPYWQAPATAAGAAEPNKRHRTAAAPAHMDAEPEQEEQPLLPGLPDHLAQLCLAPLPPRLLHAVCRPWRRLLYSPSFPPFLALYAVLDDAAAFAGSGVSFAAYDAVAGRWDELPAPPMPSPPPRLWHPAFLSRRLPLQSVAAGAGSCSWPAPRGRSPRRCPAPWSSTRPPARGGSARASRSRRAGVGAGYDASDARSGATWDPAADAAAAAAWEPIPPMRDARFSRDAAEAVCAAGKVCMVSLRGRGAKEGAVFDLRAARWEDMPPGMLAGWKGPAAAAAAGGDEDETTIFVVDEERGALSAYDWAGDRWRTVVESERLKGAAEMAAGGGRVCVAAQGGDKVLVVDVAPSRPRRWGAPAAAELRPRVWEVAAPPGKRVVALHVLPRMARAD

SEQ ID NO: 13810 - protein, 521 aa, Zea mays
  VARIANT 349: note = Ancestral polymorphism is N, Derived polymorphism is K
  VARIANT 323..521: note = Derived polymorphism lacks residues 323 to 521
MAMRKENPVLNACQASNGRITRAQAAANRRSFGTFPSVPLPAKTERKQTAQGKAKRGSSYDNTSASVALSGPQPKRRTVLRDVTNLSNANSNKSFAAAPKLQTKPSLRTGRTVSKSKPCAKKIPKKPPPAGNGSALTNVLNIAEETQAEKILAERVEPVLLLENRGPLSLQNVERNRDSACHEVFFEERNLRDKCEPSVSKNGDSYVLDIVDIDKDNGNPQMCASYVVEIYSNLMASELMRRPSPNYMEGLQRDITKGMREILIDWLVEVSEEYKLVPDTLYLTVYLIDRFLSRNYIERQRLQLVGITSMLVASKYEEICAPRVEEFCFITDNTYTKAEVLVSCEVEGNLGSPWESFGALWLPADRHPTIHVLKMESQLLNDLGFNLSVPTTKTFLRRFLRAAQASRKTPSMTLGFLANYLAELTLTEYEFLKFLPSLVAASAVFLARWTLDQSDLPWNQTLEHYTSYKCSDIQLCVCALRELQHNTSNCPLNAIREKYRHQKFECVANLTSPEFPRSFFS

SEQ ID NO: 13811 - protein, 219 aa, Zea mays
  VARIANT 88..219: note = Derived polymorphism lacks residues 88 to 219
MLSSTTLRPPAPAPAPAHLTICSSPAAWRRAPAVRAVRNYDSIPKREPFSSSRSILHEFLRQDKPLIQRTKDQITDLFICFFLLGTDYCTAIEGDECCSCWDAYFELNKLEQELPKDEIARMVKDSEGDVRYLIESIHHRSDLRKKVAEKSRNSVPSSSQGSRAAKPRPFPVPDGIPKTQEELAEEEEALMPESPYTRLLRRMGRYPDWYTPRPDHETD

SEQ ID NO: 13812 - protein, 579 aa, Zea mays
  VARIANT 105: note = Ancestral polymorphism is R, Derived polymorphism is W
  VARIANT 285..579: note = Derived polymorphism lacks residues 285 to 579
MASTCLAPASLSTPLLSDSIARAPAANGHATNHRHHHHDDSDGAAAVSVCDDGGGDPFAFLSEDRPPRDRGPSPADPFRNGTPAWGGGVYAWSRTLLLLPVALVRLALFGLSIAIGYAATWVALRGWADTHGRPRVGGGPMPAWRRRLMWITRISARCILFSFGYHWIRKKGRPARRELAPIVVSNHISYIEPIFFFYELFPTIVSSESHDALPFVGTIIRAMQVIYVDRFSPASRKAAVNEIKVKTVPLNMCCDHLVAFKNVALMSFQRKAACNSFPRVLLFPEGTTTNGRFLISFQHGAFIPGYPVQPVVVRYPHVHFDQSWGNISLLKLMFKMFTQFHNFMEVEYLPVVYPPEIKQENALHFAEDTSYAMARALNVLPTSYSYGDSMIMARAIEAGKVNGSNYMVEMAWVKDIYGVSTAEAMDLLEHFLAMNPDNDGRVKAQDFWAHFGLDCSPLCKKIFHYFDLGIKESITFRQFLVGCAHLRKQPLFQGACETAFEKCRDPETSEISRAQLADVLRLSMLLPSGDRMLDLFKTFDIDGDEKISKDDFMTCLGRFPFLIAFFAAPINGEVYIEIV

SEQ ID NO: 13813 - protein, 209 aa, Zea mays
  VARIANT 12: note = Ancestral polymorphism is H, Derived polymorphism is Y
  VARIANT 15..209: note = Derived polymorphism lacks residues 15 to 209
  VARIANT 16: note = Ancestral polymorphism is T, Derived polymorphism is I
  VARIANT 73: note = Ancestral polymorphism is W, Derived polymorphism is C
MEAEGQGFTNGHATWTSAMSSFMLSYLSNVVSSGERTSSGFKKVHYNSCAKAINEKFQIALNGEQIKNHLKTWSRRFAKINRIRKVSGIGWDEDSFTITMDEEHYNGYVKIRKKAKKRDSEEEGLIAAFKSVGDTLSSAIEKVATGDTDVPDDLFDSLINLPGFEQTHISLYFNYLVAHPHIARAFNKLPFDHKLIWARNFVSEKFPGV

SEQ ID NO: 13814 - protein, 432 aa, Zea mays
  VARIANT 268: note = Ancestral polymorphism is T, Derived polymorphism is I
MASSSLALPPISLLLALLLLSAPSPSACASLSFLTASSNGSASTSADPELEDLAPEPTFLEEVIDAVSEKYDWDPDAEVRVWPLDAGAVRVGSVQRYEFRARAGGSAALARFSDEAVEWRLPSAPAVEEVDGPDGVDVVPAEGAFGFDTGVRDVELVGPVELKLAGNQDGSLVELQLPSGNATYTRLKRIFVADGIALKVIGAQKVSVTHPHSIGLLSNGSLLASNNDLSQIWPLSYSTCAPLLQVGIVGSVVIVVHQTSVSGGHVKTFLRSHDTIELLSDKYKVHISNRLISEFLFSSISPRLIKLEKILKTWFSKRNQENSSVHFIEAKVTSIPLVKFRLEFERDVTEDDPIWEDVPEWKTRPMVQRVPVDIIARVEDDDRLKAISVKKVRRQFPVVDTTTWGSLTSNISFTKFLSFILPPEPLSLDVKW

SEQ ID NO: 13815 - protein, 339 aa, Zea mays
  VARIANT 63..339: note = Derived polymorphism lacks residues 63 to 339
MAGFSLRGGGGGRGGDRGGDHPIGADSLFLYARGAAAAAADTAASGGGGGGGIGFQLWHPHQQATAAAVPHTSQFFSSGAVATGVVLGFSSHDGAGGIGGAGGAGAGGGRAGTSCQDCGNNAKKDCTHMRCRTCCRSRGFSCPTHVKSTWVPAAKRRERQQQLAALFRGAANSNSAAAAAAAAASKRPRELVRSLGRLPSANSAMVTTTTSSGDGGGGRFPPELSVEAVFRCVRIGPVDEPDAELAYQTAVSIGGHTFKGILRDHGPADDAAVGQLPPSSAEYHHQLTAGQAREGSSPAGSSEAAATVATSAAVLMDPYPTPIGAFAAGTQFFPHNPRT

SEQ ID NO: 13816 - protein, 108 aa, Zea mays
  VARIANT 38: note = Ancestral polymorphism is T, Derived polymorphism is I
  VARIANT 20: note = Ancestral polymorphism is D, Derived polymorphism is N
MAIKMKGIFKGLKIISQMFDTYSFAVHKEHEMEIGYPTDVKHVAHIGLGTSDTSPRWTAEFKGTDDSSAGSVRSTAAQSRQTSWTSAGDSFQLSAHNHTGSTSNRLRL

SEQ ID NO: 13817 - protein, 864 aa, Zea mays
  VARIANT 502..864: note = Derived polymorphism lacks residues 502 to 864
  VARIANT 501..864: note = Derived polymorphism lacks residues 501 to 864
MLPRSRIRGRDPPPSGGRYRRRSPAPPSPRHQRRPRDPPYPQPKRRSSELPPPRRYDENPLPSGFAAAAERRSRGDILLEAGRLAAHYLVAEGLLPEHVLLSREDPNHNHSYRPEPPVPVPAPVPAPAPSSYGRKRDEDDGPRWRRSGSGAGDLDRGSKWDDNREAKRSGWDRRSHSFDERRKYNDGGDVDRGGRRTRDYNELKRPPMSRSYSHNDRRALADGTVDRRRRSRSRSRTRGYYTGSRRDPDLRAGTRDLDRTKVTDSGAVPAAGGDGGMHNVDANEIPRQPKVPGSVVVSETDDSAVEAVAIEDKQMESDTAGLDHAQDMSEGEDSEFAEDISEDEDGEFAGSDLNDEDGDEMDNTQSQLSDVHVHTSESVEELDLRQSQLSNAEEGMETCIAHVYACMVEPLAENNVCSETRYEMEEPQNGSETAVGDLYSDEQEQPLTEYNGCSEVKCEMEAARSEFETGVDNLDRDEQERLLAENNSCSEVRYGMEAPQCEVETGVGGLNRDDKEQPLVVTNDYSELRYETTASQTEVETVVGDLSRDEQELPAWYKIFDLNVIETPVGCEFSEISRSPPADDLCDSVPDLIGLVNQQENNDTSEIHGQDDRAGANQMLEDESNLDNYDLNNEADEHARDDTSVNQVQDENAEDNHLPEDGHGLMKYDMNIEAGEPAHDNHQMNNAEIHLNHSMVAHISDNCHMNNEKMLLKQNVDEQQMENEQMLIDQVTTVHVLDSHHVNHEQLLLGHSVDDHDQMEPNPMALGVHNLDNYYLSSKQVLLNNDADQHAGDIHHLKDGQIILDEAADGQARVNGQTIHVIDLEEDYAQQSESRNTGEYLESTSGTSHKYTDNVLQEHMCSQD

SEQ ID NO: 13818 - protein, 104 aa, Zea mays
  VARIANT 15: note = Ancestral polymorphism is G, Derived polymorphism is D
  VARIANT 31: note = Ancestral polymorphism is G, Derived polymorphism is A
  VARIANT 44: note = Ancestral polymorphism is I, Derived polymorphism is N
  VARIANT 47: note = Ancestral polymorphism is P, Derived polymorphism is L
  VARIANT 57: note = Ancestral polymorphism is P, Derived polymorphism is H
  VARIANT 60..104: note = Derived polymorphism lacks residues 60 to 104
  VARIANT 62: note = Ancestral polymorphism is C, Derived polymorphism is S
  VARIANT 84..104: note = Derived polymorphism lacks residues 84 to 104
  VARIANT 102..104: note = Derived polymorphism lacks residues 102 to 104
MVCLVNAGAYQSSQGNCSENDPNNTIVFVGGLDSNVDEEYLRQIFTPYGEISYVKIPVGKDCGFVQFTSRSCAEEAIQMLNGSQIGGQKTRLSWGRSTQNRQPV

SEQ ID NO: 13819 - protein, 286 aa, Zea mays
  VARIANT 54..286: note = Derived polymorphism lacks residues 54 to 286
  VARIANT 184..286: note = Derived polymorphism lacks residues 184 to 286
  VARIANT 205: note = Ancestral polymorphism is L, Derived polymorphism is P
MLYLQNNYLSGAIPESISNCTRLESLDLSLNNINGTLPASLGKLGELRDLILWQNFLEGEIRASLENLDKLEHLILDYNGLIGIIPSELSKCKELNWISLARNQLSGPIPAWLGQLSNLAILKLSNNSFSGPILAELGNCQSLCWCEIEAISPTTPRSANTADPGSSPSAFDSDTGSSLGHIGCLRSIRRAASPSLFVAFVLGFLFCLPRDASPRHRPPASSRRPHSRQTWQWIGCLVLFAVAIGGEQEDTVEALSRAVQRSGNRGGIKGHRWRQHAVAACGGETV

SEQ ID NO: 13820 - protein, 433 aa, Zea mays
  VARIANT 36: note = Ancestral polymorphism is R, Derived polymorphism is W
  VARIANT 46: note = Ancestral polymorphism is A, Derived polymorphism is V
  VARIANT 249: note = Ancestral polymorphism is A, Derived polymorphism is T
MQAQRSPAMAGGGGAATAVAAGAAVGMPSQATLPVRRRCEGTAMGAITLDLRPGLGVGPFTLGMPISDAFTQIERQPNIYDVVHVKYFDEEPLKLDFVISFPDHGFHLRFDPWSQRLRLVEIYDVKRLQLRYATSLIGGPSTLATFAAVYALFGPTFPGIYDKERGIYTLFYPGLSFAFPIPSQYTNLFTNGEVADLPLEFPDGTTPVTCRVCIYDSSTDSKVGVGSLMDKAMVPALPAGSLYMEEVHAKLGEELWFTIGGQHIPFGASPQDVWTDLGRPCGIHQKQVDQMVIHSASEARPRTTLCGDYFYNYFSRGIDILFNGQTHRIKKFVLHTNFPGHSDFNSYKKCNFVIYDAEAEGTCQPNNASKNCITPSTKWEQVKEILGDCGRAAIQTQGSMNNPFGSTFVYGYQNIAFEVMKNGYIATVTLFQS

SEQ ID NO: 13821 - protein, 114 aa, Zea mays
  VARIANT 24: note = Ancestral polymorphism is R, Derived polymorphism is S
  VARIANT 13: note = Ancestral polymorphism is A, Derived polymorphism is G
MASTAGYLARRAAQKERVRLLYRRALKDTLNWAVHRHLFYQDASDLRDKFEANRHVDNLDVVDRLIDDAEAQYRNFQHPDPYIVPWAPGGTKFTRNPPPPQGIEIIYNYGKEDQ

SEQ ID NO: 13822 - protein, 391 aa, Zea mays
  VARIANT 12..391: note = Derived polymorphism lacks residues 12 to 391
  VARIANT 214..391: note = Derived polymorphism lacks residues 214 to 391
MRSSEASSRLVQELVLYAASAALSCLVLFAGLRHLDPNRAASQKAQQQKKEIAKRLGRPLVSTTPYEDVIACDVINPDSIDVEFDSIGGLDQIKQALYELVILPLRRPELFTFGKLLSPQKGVLLYGPPGTGKTMLAKAIARESGAVFINVRISNLMSKWFGDAQKLVAAVFSLAHKLQPAIIFIDEVDSFLGQRRTTDHEAMTNMKTEFMSLWDGFTTDQNARVMVLAATNRPSELDEAILRRFTQIFEIGIPVESERSKILQVVLKGENVEHNIDYDRIASLCEGFTGSDILELCKQAAFYPIRELLDDEKKGRKLDKPRPLRQSDLERALSVSRKGKKAASSALQSPLWVRPTDSEDDQVQNAIFEISKLMSRIVQNSESEPQEPSSP

SEQ ID NO: 13823 - protein, 187 aa, Zea mays
  VARIANT 161: note = Ancestral polymorphism is M, Derived polymorphism is V
MDAAVSLSLPLHHHAHGPLPLPHPAPHHLHCAVPLRHHATSASAVTAPPPKPDVQAPPAARLSPALAAPSPPRSSPAAARSSSRAATGYAAALADACVRAGTLRRAARHARALLHLLLRLERPLEEGAAAVEAAVTVAGQQLDARVAALVRMLVAKGRAGVLAEALAEFAAICDHLLSTRPRARHAY

SEQ ID NO: 13824 - protein, 101 aa, Zea mays
  VARIANT 50: note = Ancestral polymorphism is V, Derived polymorphism is M
  VARIANT 23..101: note = Derived polymorphism lacks residues 23 to 101
MSRRLSSSFDCEPPSVHFAPLAQLLADPTPFSPNSQRAMQAKKLTLLQTVAAAGVFSAVSFWYGFMFGRESARRELGGIIDDLRSNKPTNTPAGPDAHSKP

SEQ ID NO: 13825 - protein, 521 aa, Zea mays
  VARIANT 412..521: note = Derived polymorphism lacks residues 412 to 521
  VARIANT 255: note = Ancestral polymorphism is T, Derived polymorphism is A
MARRCCGCSVRCCCCLLVLTLLALAVTAAVVFARYKDGGNIFPIPGLPDPKYAEALAVALRFFQVQKSGKLVNNTIPWRGDSALRDGEDAKLDLSRGMYDAGDHVKFGFTMAFTGTMLSWSVLEYGDAMSDAQQRDAAMDALGWIMEFLVNAHPSDDVLYIQVGDPKSDHKCWERPETMSEKRPLTKITAKSPGSDVAAETAAAMAAASLVYKPGNATYASSLLDHAERLFKFADAHRGSYTRTFPELSAYYNSTTYQDELLWAAAWLYHATGNHSYLSYATGRNADEFADLGNPRYFSWDDKRAGTEVLLSRVMFFAGDGSDAGQDEVLGSYKDTADAVMCILLPESDTAAFRTEGGLLYVAEWNSLQHPVASAFLANVYSNYMATSGKSELTCSGKSFTALDLRRFAKSQADYVLGDNPMKLSYLVGFGDSYPQRVHHRGASIPAGVDTGCDGQEWLKSPEPNPNVATGALVGGPFKNDSFVDDRENVQQNEPTTYNSALVVGLLSGLLSTAPVAKSLS

SEQ ID NO: 13826 - protein, 341 aa, Zea mays
  VARIANT 81: note = Ancestral polymorphism is I, Derived polymorphism is M
MEQPAAPDRSDFPAGECEWREELRQQQSQVDALRERLVEAKVGLRCSEGDSRKELEHLCRRVKTIATLLAYLKSKARIMAIPHLAHTSCGIRQQDGVGYVDRHGVPLADWPKGADPAPCGGASVDGTVAEGGARPEHGDAVGGDVDVDDILKSIRVVTDVMESLVKRVIVAESEAANEKEKVRMGLEEIRRKTLQVETMSAKVEEMEKFAVGTNGMLNEMRQRVEDMVLETTRQRQRAAENEVELSRVKHDFESLRTYVSTLVSVRETLLSSEKQFETMEKLFDRLVAKTNQLESEKAQKEAEVHKVMEENVRLRAMLDKKEAQLQAMSEQCKFMALNHDN

SEQ ID NO: 13827 - protein, 301 aa, Zea mays
  VARIANT 121: note = Ancestral polymorphism is C, Derived polymorphism is S
MATRVLLTALLLAFLLVATPFTARVARADSEEDAAAAEVVEGADLGIVGDDTQVSSDGPLSPAPGVETVVVFPKNAGKIVLAGEETELLVGLQNEGMVMQVFIVNATVLLSSLFHCHANSCVCYYAYIVFTGESTLNVVAVHSTLHLPFDHNMYGQNLTVQNFFNASVPVSVQATFPYKFVVSKFLQPGAYDLVGYIVYEIDQHPYQNVFYNGTIEVVEAGGLLSVESVFLITLGTALLGLFGLWAYGQVQQLSKKTKKAPKVELGTGTTDANIDEWLEGTSFVQRSKSKKADLKLALQSS

SEQ ID NO: 13828 - protein, 399 aa, Zea mays
  VARIANT 339: note = Ancestral polymorphism is T, Derived polymorphism is I
  VARIANT 224: note = Ancestral polymorphism is P, Derived polymorphism is S
  VARIANT 214..399: note = Derived polymorphism lacks residues 214 to 399
  VARIANT 154..399: note = Derived polymorphism lacks residues 154 to 399
  VARIANT 139: note = Ancestral polymorphism is C, Derived polymorphism is S
  VARIANT 57: note = Ancestral polymorphism is T, Derived polymorphism is R
MSPSADAPGPASSASAPPLAPLIAAQLNYLLSHSKLPIRVVQIWSGCRNGRPADRFRLAIPFCLDYVHCNAPSLSRSNGTRVRNRSSDSGAAGDFVYNALSPKVAPDVVFGPEDERFQPLVDYAAAGNGDKSCLARWDCRAPEGLHALVQELRELYIEYQKERVHMVDDARLAFELSTVLSKEGIEVCMVPSADRPDEAKFAVPLLESDFDFAKLVPGCPWRLPQKIHLQVIFPISRSSSYSSMPSAPRLKLISTPDLRSLLSVEDVKLPPWSNGMCLAEYLPALEDSLNGLLVDASASIGSRRRFIEALAPIFGRPLEADPVHFAIPLQFPKQQPVVTLQSSQHCNADGMPITSPPINDYPWSPRWDQAEMVERIYDFLTDECQNFKKFCSDAITQQK

SEQ ID NO: 13829 - protein, 376 aa, Zea mays
  VARIANT 6..376: note = Derived polymorphism lacks residues 6 to 376
MEATVQQLINLAQNTSELYHELHALDRFEQDFKRKFRDEESVPAARRESIMILHSELKRQRKLVKNLKKKSLWSRTLEEIVEKLVDIVIFLHKQIRDSFNETGTDFCASEQTQNKRLGSCGLALHYANIINQIENIVSRPLSLPPSARDNLYHGLPITVKSALRSRLQTYNPEEERTVAQIKAEMQKTLRWLLPIAENTIRAHQGFGWVGEWANLGHEQEIRLPAQRHPHPDAPSRRQGENRALHAGAGGAPPPPGDPGEEQRLRDQQIVEARRVVPVPQGGGNGPPTGDGDSAQHVAGEQPHGLEPAVGLRARGAGPPELQEDGLRQEPELRASAWPPTEQGPQELGPVPEPRQLPGDGVRQDPRRAAARPGQGS

SEQ ID NO: 13830 - protein, 130 aa, Zea mays
  VARIANT 15: note = Ancestral polymorphism is G, Derived polymorphism is A
  VARIANT 53: note = Ancestral polymorphism is R, Derived polymorphism is Q
MAPSLASTAGLPSCGARRGGRCVARRASAVATPATATARTHYEVLGVGAGASRCEIKAAYRRLAREVHPDCGGRGDEGFIRLHAAYATLADPDERARYDRAAAVRSRIRAAPSGSGAGFRPRRWETDQCW

SEQ ID NO: 13831 - protein, 269 aa, Zea mays
  VARIANT 85: note = Ancestral polymorphism is A, Derived polymorphism is V
MGAPLLLLPLLCCCCFALLLQVQGADAATLTITNSCGYTVWPGLLSNAGAPAPSTTGFALAPGRSAAVTVAAAWSGRVWARTLCATSPAASGATFACATADCGSGAVECAGRGATPPATLAELTLAGAGDDDDDFYDVSLVDGFNVPMLVAPRAGAANGSGCRPAACAADLNAACPAELRVAAGAGAGAGAPGVVACRSACEAFAAAQYCCSGAYGSPATCAPTPYSRFFKAACPSAYSYAYDDATSTFTCAAAGRGGYDVVFCPRASR

SEQ ID NO: 13832 - protein, 711 aa, Zea mays
  VARIANT 600: note = Ancestral polymorphism is I, Derived polymorphism is T
  VARIANT 549..711: note = Derived polymorphism lacks residues 549 to 711
  VARIANT 522: note = Ancestral polymorphism is V, Derived polymorphism is A
  VARIANT 437..711: note = Derived polymorphism lacks residues 437 to 711
  VARIANT 435..711: note = Derived polymorphism lacks residues 435 to 711
  VARIANT 381: note = Ancestral polymorphism is R, Derived polymorphism is W
  VARIANT 185..711: note = Derived polymorphism lacks residues 185 to 711
  VARIANT 183..711: note = Derived polymorphism lacks residues 183 to 711
  VARIANT 131..711: note = Derived polymorphism lacks residues 131 to 711
MTPLQRFRGLRDPSVTLYADDGGELHTTSSVRALFHLFLPPCRNHGTERKDKGSDEVVLKAMGRAINKIVMVVELIKVLLKTLVLANITGDLIVDCVRMSAPNGWGQNVHDVPHPLLKSLGVKNLPAVIGRTVNGEELLLKDGISVKDLRSGVKELKTLLDSIEKKNKKLLSNLANKKPSGQWEEIKKIPLLTASNFEEIKKTPVCIIGVFGSNKAKGQLEAVLSEISKKTLIRGQNYNSRNVVSYALLDKDKQSAFLSSFDKSGYRSSDKLLIAYKEPIIIMLLLFRTEGRFGCNVSHVNTYSGIAEKSMDKFAVLISSFRYPGPHASGLRSAGDVLEDNPVGRLKVYVHDLPSKYNKKLVKKDPRCLNHMFAAEIFMHRLLLSSAVRTFNPEEADWFYTPVYATCDLTPSGLPLPFKSPRMMLSAIELIATNWPYWNRSEGADHFFVTPHDFGACFHYQDEKAIGRGILPLLQHATLVQTFGQKNHVCLKGGSITIPPFAPPQKMQAHLIPADTPRSIFVYFRGLFYDTSNDPEGGYYARGARASVWENFKNNPLFDISTDHPSTYYEDMERSVFCLCPLGWAPWSPRLVEAVVFGCIPLIIADIVLPFADAIPWEEIGVFVAEEDVPKLDSILTSIPTDVILRKQRLLANPSMKQAMLFPQPAQAGDAFHQILNGLARKLPHGDSVFLKPGERVLNWTAGPPGDLKPW

SEQ ID NO: 13833 - protein, 996 aa, Zea mays
  VARIANT 399..996: note = Derived polymorphism lacks residues 399 to 996
MPPPTFLLGLLLLLLLAAAAPAPASATPERDAYALSRLKASLVPSATNSTSAPLSDWDPAATPPAHCAFTGVTCDAATSRVVAINLTAVPLHGGALPPEVALLDALASLTVANCYLRGRLPPALASMPALRHLNLSNNNLSGPFPPPPPAAYFPALEIVDVYNNNLSGPLPPLGAPHARSLRYLHLGGNYFNGSIPDTFGDLAALEYLGLNGNALSGRVPPSLSRLSRLREMYVGYYNQYSGGVPREFGALQSLVRLDMSSCTLTGPIPPELARLSRLDTLFLALNQLTGEIPPELGALTSLRSLDLSINDLAGEIPASFAALTNLKLLNLFRNHLRGEIPAFLGDFPFLEVLQVWDNNLTGPLPPALGRNGRLKTLDVTSNHLTGTIPPDLCAGRNLQLLVLMDNGFFGSIPESLGDCKTLTRVRLGKNFLTGPVPAGLFDLPQANMLELTDNMLTGELPDVIAGDKIGMLMLGNNRIGGRIPAAIGNLPALQTLSLESNNFSGPLPPEIGRLRNLTRLNASGNALTGGIPRELMGCASLGAVDLSRNGLTGEIPDTVTSLKILCTLNVSRNRLSGELPAAMANMTSLTTLDVSYNQLSGPVPMQGQFLVFNESSFVGNPGLCSACPPSSGGARSPFSLRRWDSKKLLVWLVVLLTLLVLAVLGARKAHEAWREAARRRSGAWKMTAFQKLDFSADDVVECLKEDNIIGKGGAGIVYHGVTRGGAELAIKRLVGRGCGDHDRGFTAEVTTLGRIRHRNIVRLLGFVSNREANLLLYEYMPNGSLGEMLHGGKGGHLGWEARARVAAEAARGLCYLHHDCAPRIIHRDVKSNNILLDSAFEAHVADFGLAKFLGGGGATSECMSAIAGSYGYIAPEYAYTLRVDEKSDVYSFGVVLLELITGRRPVGSFGDGVDIVHWVRKVTADAAAAEEPVLLVADRRLAPEPVPLLADLYRVAMACVEEASTARPTMREVVHMLSTSAAAQPDVPHALCKVVD

SEQ ID NO: 13834 - protein, 369 aa, Zea mays
  VARIANT 68: note = Ancestral polymorphism is K, Derived polymorphism is N
  VARIANT 106..369: note = Derived polymorphism lacks residues 106 to 369
MDQLKRVNDVNPASLPLLLHPVVSNPSPTSSRSSAQQRSTAAATSSPQGQRAEQTPLRCPRCDSSNTKFCYYNNYNLTQPRHFCKTCRRYWTKGGALRNVPIGGGCRRPRPMPTPVATKPAVSCKAVGGAPSLGLGVGLGMGMGTGAGLDGPWASSQQAAAAQAQLMALLNSARGVQGGGSMHRVLGLDAIAHLPLHVLPDAGGSNASGTVPSLWPPRMDSQLGMGPLGQHDVLSSLGRLKLPPPSSAAAASCYSDQLHAVVSSAAGRGHEYEAAAPGVTPLPCTTALASLPPAASSVSAALASATVGLDLPPVSLPASEMQYWAGPAAMSVAWPDLPTPNGVLPRETNPNLMWSCTDDAAVYPRDNTS

SEQ ID NO: 13835 - protein, 394 aa, Zea mays
  VARIANT 367..394: note = Derived polymorphism lacks residues 367 to 394
  VARIANT 22..394: note = Derived polymorphism lacks residues 22 to 394
MLVTLMNLLRACWRPSSNRHARTGSDVTGRQDGLLWYKDAGQHVNGEFSMAVVQANNLLEDQCQIESGPLSFLDSGPYGTFVGVYDGHGGPETACYINDHLFQNLKRFASEQNTMSADVLKKAYEATEDGFFSVVTKQWPVKPQIAAVGSCCLVGVICGGMLYVANVGDSRVVLGRHVKATGEVLAVQLSAEHNVSIESVRKELQSMHPEDRHIVVLKHNVWRVKGLIQVCRSIGDAYLKKQEFNREPLYVKFRLREPFHKPILSSEPSINVQPLQPHDQFLIFASDGLWEHLTNQEAVDIVHSSPRSGCARRLIRAALQVAAKKREMRYSDLKKIDRGVRRHFHDDITVIVVFLDSSLVSKASTHRGPTLSLRGGGASAGLRSNTLAPTSMWL

SEQ ID NO: 13836 - protein, 271 aa, Zea mays
  VARIANT 156..271: note = Derived polymorphism lacks residues 156 to 271
  VARIANT 110..271: note = Derived polymorphism lacks residues 110 to 271
MLRQGAGLQALVVRCLSEGGRCDSEEEASASSSMGVAWDGGGAGVVVADPSFTGAPETTTGSIWGSSASRPPSWSSSCDRSSPILRLDACGGMGRHHGDDTGSTRWMRCEGREDEARPRPRVWRRRDAGQGERMMGRGREMADMLDLKTWRAQRGWRSRGVLGRGEAGELGVDGALGGERRGRHPRAGEDQPESTVAAKLALAVVERSAPWVRGDRHGWNGAVGEAQIVGEGAMGEAIESGVGVVGARPCDEERRERIARQNLAHVCGRLQ

SEQ ID NO: 13837 - protein, 350 aa, Zea mays
  VARIANT 291: note = Ancestral polymorphism is I, Derived polymorphism is M
  VARIANT 293: note = Ancestral polymorphism is I, Derived polymorphism is S
MVLFELDPDIIRWGLHHLLPAPAGYSPHCRTQTTPTTPCTAFARPPHQPIGDMGTSSSVEIKVEHVDGVDNDAIIAQALQEELSNVAFAEASGPTSAADNQQHSAVLTQQWLRPRAVHVEPASQEAGTREEPFSTCSSPGDDNNVQDSQQCLIELMDNFSVIDGEVGKRLNNMVPVPHVPKTNGEIPSVDEAISDHQRLLDRLVVYGLVDLKVKGDGNCQFRALSDQFYRTPEHHRFVRQQVVKQLESHPEIYAGYVPMDYREYLKKMSKSGEWGDHVTLQAAADSYGVKIFILTSFRDTCYIEILPVVEKSRRVICLSFWAEVHYNSIYPEGELPVLEFDNKRKRWWPF

SEQ ID NO: 13838 - protein, 392 aa, Zea mays
  VARIANT 375: note = Ancestral polymorphism is R, Derived polymorphism is W
  VARIANT 364: note = Ancestral polymorphism is C, Derived polymorphism is Y
MERSSSTSSSSRTTPGSSRLQPTRSRLGVDEEYDSAFKSKSFLDLWSHAHRHLRHTFSSSPSFKLATSSSFKSAGVVKDHDHDAASDAALEQSCSYTVLDDFVLEPSPEVLARGRGRRRRRRRVDKLLVEYFDVTQEACEACSSLLAAIAAARRHQLTLRRLLRRLEDDDDDDQAAAWDAVAAHVRLDNPLSSPGRLAAFHAVHGRCGPLAARLASAQRRLRRLARAMRVARGAAAAALVAACAAAIVASVVFAAHAVVGIGAAAAAAGVGAGPATSVRRRWYARAGAAVDAAARGAYIVGRDLDTVSCMVRRAHDELEHGRDVARIAVQGRGERPLLQEVTREEAECEEDLRTQLEELEEHVCLCLITINRSRRMVAHEMTGGSLQPTPQH

SEQ ID NO: 13839 - protein, 189 aa, Zea mays
  VARIANT 22: note = Ancestral polymorphism is G, Derived polymorphism is S
MAMQQLLAFASLLLLWPARRASAAEYVVGDVGYGWDSGSGVNYAAWARAHAFAVGDVLVFQYVSTQHNVYEVTEEVYRSCDTAGGDGDGDGVRAKYTSGYDRVVLAEARGYWFICDVPGHCQGGMRVAVNVSAGAAGGGGGSGGPPMTVNPPPPDGSAASTTTAKGRLGWAWAAACLALGVLALMNTSY

SEQ ID NO: 13840 - protein, 487 aa, Zea mays
  VARIANT 406: note = Ancestral polymorphism is V, Derived polymorphism is L
  VARIANT 285: note = Ancestral polymorphism is S, Derived polymorphism is I
MARRSRGSGSVTDAASKADAAAMRMVSRRGAVRLVLVSATAWAMLGLVALAFHLRPCSSRVAFLSVSITCLGVPCISAALCKKDSKVLSVLDSMGLSSKPLHRCPIPVADDPNVVVIPKRTPNTIVKKLAYITVDKQDKDPSPLFGGRQNWKQREESFKLNSTMKVHCGFMKNSGADMDIIDVKYIQKCKFVVASGIFDGYDIPHQPSNISRRSQKLFCFLMVVDEVSLDFIQKNTTVKIDSAGGKWVGIWRLLTVHRLPFDEPRRNGKIPKILTHRLFPQAWYSIWIDGKMELIVDPLLILERYLWRGKYTFAVAVHKHHRSIYEEGDAIKRRKRYARPLVDLQMKMYYYEGMEPWSPKKKMPGDVPEGAVLIREHTATTNLFSCLWFNEVNLFTPRDQISFGYVARRLGDALELFMFPNCEYNSLFVLHRHTREHSSKVEWAKTVDEIVEKGLRESRGGLGLWTPYPADLSSVELPAVRRTSPAG

SEQ ID NO: 13841 - protein, 208 aa, Zea mays
  VARIANT 32: note = Ancestral polymorphism is P, Derived polymorphism is H
MEAAAIATTSRSLPLPFSSTQLQRRRRATFIPIAASKRHEDDKETAKGSGSEPRREPTSLAPYGISISPLSKDAAMGLVVSAATGSGWTTGSGMEGPPTASKAGGAGRPEVSTLPWSLFTKSPRRRMRVAFTCNVCGQRTTRAINPHAYTDGTVFVQCCGCNVFHKLVDNLNLFHEMKCYVGPDFRYQGDAPFNYLDPNEDNDTTFPL

SEQ ID NO: 13842 - protein, 471 aa, Zea mays
  VARIANT 208..471: note = Derived polymorphism lacks residues 208 to 471
MSSQADSPRRRYSRSPSYSRGHPKGRSRSQSPARSQSRSPVPDPRSQARSRSRSQEREEDAVNRGNTLYVTGLSSRVTERDVKDYFSKHGRVVGCHVVLEPHTRVSRGFAFVSMDTVEEAERCIKYLNGSVMEGRNITVEKKILCKLCPAVKMLSSPIPALAHTARSVDSPKGYHAPQDSQQLNIANFQLNLSIHLQLPHQLINEHCRLVSQACVVPWRVFIDFTPWSPKDTNSWKLSWYGSSIFSSVDAKSFYNILLKPFSIFWSVFLFTFAMTCLIAYCLVTHPEPFLFAFTAIGTSVGSVGGSIEAMVVGVMSITAMAAAGMATAGLRLPCTLPTGRVGIIIPPTRTAGTTLPTGTAGTTLLPTGTLGTTTKAGVAGATRRLLMVVVGQGGTDRFHRIGCQKGATVEAAGWVAADMTGNVEVFSPPVAAAAMAAYGSRSSGDMVRLLPVAVYLVYCLPAYVDLVKTSV

SEQ ID NO: 13843 - protein, 362 aa, Zea mays
  VARIANT 75..362: note = Derived polymorphism lacks residues 75 to 362
MGLDVGEIGMGLDLGLDLRLFAARSAGGMAKGAAPAGIQSCIRSLEVERRKIEVFRRELPLCLRLLADVIDELKEEAAKRGEYDDGAATVDDGDKRKWMSTAQLWVDSDAKSDESDKEQQSEITSPPEPKLLGGGAPTPIRAAVSAVAVPQPLPPPLFRREDSSASSGLSLVSLSPATKAAVPISPPVVAASGTGTASARFCGTTMPPCGSEVNNMHSQAQQQQQASRKARRCWSPELHRRFVAALHELGGPQVATPKQIREVMQVDGLTNDEVKSHLQKYRLHNRRSSPGAAAAPVSQSIMLVDGVWAAQEQSSGSQSGSRQGPLQFSRAGMAVGGGDDSSSSDDDEDDDKSEDGYSLKCV

SEQ ID NO: 13844 - protein, 367 aa, Zea mays
  VARIANT 209..367: note = Derived polymorphism lacks residues 209 to 367
  VARIANT 210: note = Ancestral polymorphism is R, Derived polymorphism is C
  VARIANT 258..367: note = Derived polymorphism lacks residues 258 to 367
  VARIANT 305: note = Ancestral polymorphism is P, Derived polymorphism is L
MALASPSLPLPTTPPPSSQAIAAASFCACPLAIFEYDEKAVMELDEQAFLEEILSLRRDAWDCNAMGDFFAPAAMDCTFQDRHHQAPTVSVLPTFTASYAQPQPQPAAAPGFDCLSEVYGAAAFGGPNAGDYGGEMGFLDVVEPKAASAALVDGAAGLGACKVEPGLAESGGAFGAGAGAAPPPALASKKKRVEGMPSKNLMAERRRRKRLNDRLSMLRSVVPKISKMDRTSILGDTIDYMKELLERIKLLQEEIGQQQEEAPGMLSVFRELNPNEMVARNTPKFDVERKEGGDTRVEIYCAAKPGLLLSTVSTLDTLGLDIQQCVVSCFNDFGMHASCSEMQREMISADAIKQELFKNAGYGGGCL

SEQ ID NO: 13845 - protein, 129 aa, Zea mays
  VARIANT 17..129: note = Derived polymorphism lacks residues 17 to 129
  VARIANT 74..129: note = Derived polymorphism lacks residues 74 to 129
MHEYFNKRKPEGSNRSQISIQHRWGAIQKAVNKFCALKSSVDRRNESGKSEQDRIDDAVFMYEKGEPFVFMHCWKLLRNEAKWNNRFLETISKPPSSQVPPEAANREGAGLISKLITVLGKRLHNKIHD

SEQ ID NO: 13846 - protein, 384 aa, Zea mays
  VARIANT 333: note = Ancestral polymorphism is R, Derived polymorphism is H
  VARIANT 297: note = Ancestral polymorphism is A, Derived polymorphism is S
MVSDLELVERLQEVLRSSDLNTTTTAALRRRLEEDFGADLSHKKAFIREQVDLFLAEVAAKAEPEEPKEEEELEDAPVPKAEEAEEGEGVEEEGEGEEGGEEEEEEEEEEVDSSSARKKQRGNDGKKRGGGFTKLCSLSPALQEFVGASELARTEVVKKLWAYIRENNLQDQNNRRKILPDERLKKIFNVNSIDMFQMNKALTKHIWPLNSEGPVSPDRSTPKEKPQKKDRNEGKKQKGGSSGAGSGLLVPLQLSDDLMKFIGTGESMLSRSDVVKRMWDYIKENNLQVAAAVVCMAWRYLKTSMLGAAAASSNDDDDLVAAAAAVVIQELGRKRRWGGSVPGHRTYRRDRLAAHRQLHMDYFVDRPLYNNEMFRRRYILESIG

SEQ ID NO: 13847 - protein, 191 aa, Zea mays
  VARIANT 11: note = Ancestral polymorphism is L, Derived polymorphism is H
MMATSASGVSLLLLLAHPAPPPHPANGASSLWRGGGAALAPHPARFAAKRRTLRLVNVSVSCSAEALRSDGAGAEPAVPRSVPVRVAYELQQAGHRYLDVRTEGEFSAGHPEGAVNIPYMNKTGSGMTKNAHFLEQVSRAFGKDDEIIVGCQSGKRSLMAATELCSAGFTAVTDIAGGFSTWRENELPTVQ

SEQ ID NO: 13848 - protein, 379 aa, Zea mays
  VARIANT 1: note = Ancestral polymorphism is M, Derived polymorphism is V
MMGWCEVGMMKVLVLSLVAGAVAAVRPSKLLPAAVPAVYVFGDSTLDVGNNNYLPGKDVPRADKPYYGIDLPGSGKPTGRFSNGYNTADFVAQALGFKKSPLAYLELKARKMLIPSAVTRGVSYASAGAGILDSTNAGNNIPLSQQVRLFESTKAEMEAAVGQRAVRKLLSASFFLVSAGSNDFFAFATAMAEQNRTATQADVTAFYGSLLSNYSATITELYKLGARKVGIVNVGPVGCVPRVRVLNATGACADGLNQLAGGFDGALRSAVAALAADQLPGLAYSVADSFGFTQASLADPLGLGFASADSACCGSGRLGAQGDCTPAATLCADRDRYVFWDSVHPSQRAAMLGAQAYYDGPAQYTSPVSFKQLARMRIG

SEQ ID NO: 13849 - protein, 380 aa, Zea mays
  VARIANT 19: note = Ancestral polymorphism is S, Derived polymorphism is R
MGWYDGLLLMKALVVLTGSMLVLSAAAVERRRVPAMYVFGDSTLDVGNNNHLQGKQVPRANKPYYGIDLPGSGKPTGRFSNGYNVADFVAKHLGFEKSPLAYLVLKARNYLIPSAITRGVSYASAGAGILDSTNAGGNLPLSQQVRLFAATRAAMEAKVGARAVAELLSRSFFLVGVGSNDFFAFATAQAKGNSTAVGVGTQSDVVAAFYGSLVSNYAAAITELYKLGARKFGIINVGPVGCVPAVRVLNATGGCADAMNQLAAAFDGFLDSLLAGLAARLPGLAYSVADSFGFAARTDPLALGFVSQDSACCGGGSLGAEKDCLPGAQLCADRDRFLFWDRVHPSQRAAMLSAQAYYDGPKEFTAPISFKQLADKIVIK

SEQ ID NO: 13850 - protein, 379 aa, Zea mays
  VARIANT 33: note = Ancestral polymorphism is R, Derived polymorphism is Q
MAMEGRRRRRLVLWLVISAQTMLVAAAAGAKRQAPVMFVFGDSTLDVGNNNFLSGAAVPRANKPHYGVDFPGGHPTGRFSNGDNTADFVAKSMGLKSSPPPYLSLAPNGSSPLLAQTALTTGVSYASADAGVLDSTNEGKCIPLSTQVGYFNGTKAKMVAKKGAAAVSKLLADSVILMGIANNDLFVFAAAELLRGRSAAEQKSDAAAFLTDLLSNYSAAITDLHSIGARKFAIINVGLVGCVPVVRVLDADGGCAEGLNKLAEAFDVALGPLLAGLADKLPGLTYSLANSFRLTQDAFADPKASGYSDVASACCGSGRLLAEADCLPNSTVCSDHDSHVFWDRYHPAQRACNLTARAFYDGPAKYTTPINFMKLAQAS

SEQ ID NO: 13851 - protein, 424 aa, Zea mays
  VARIANT 287: note = Ancestral polymorphism is R, Derived polymorphism is W
  VARIANT 262: note = Ancestral polymorphism is R, Derived polymorphism is M
  VARIANT 213: note = Ancestral polymorphism is S, Derived polymorphism is A
MPYCCEPYHINKHRQPEINIHICHFRGGLQPTDLQQALAMAEHFVLCPVMAVLLLSMDVLGAAAGVFKPPPAMYVFGDSTLDVGNNNYLPGAGVPRANRPYYGVDFPGGLPTGRFSNGYNTADFIAKCIGFVSSPPPYLSLLGAASCGGGLLVPTALTIGVSYASGGAGILDSTNAGNTIPLSKQVQYFNATRSEMIAAAGSSDAVDALINRSFVLILVGGNDLSAFANAERARNRSGADLESHDAAAFYGGLVSNYSAAIRGLHALGVRRLAVVNVGLAGCLPVARVLDATGACAEDRNRLAAGFNAALRSLLAGLASPSSRSGLPGLSYSLADSLGLMADTFAHPLASGFTDVANACCGGGRLGAEAPCAPNATLCADRGLYYFWDSVHPSERAAALRAQAFCDGPAQYTTPINFKQLVHMA

SEQ ID NO: 13852 - protein, 302 aa, Zea mays
  VARIANT 213: note = Ancestral polymorphism is P, Derived polymorphism is L
  VARIANT 239: note = Ancestral polymorphism is E, Derived polymorphism is G
  VARIANT 243: note = Ancestral polymorphism is A, Derived polymorphism is S
MVRALRLGGHATSAARWFTCRRTAVALCMANLVAALLVARTLYAPDSFAFAPKRGELKYSREQMRWVEESIRIRGAAEPVELIEAVKKLRKAFTREEKTRKGLPLELNQKVSLEILQRLHDLGEGSNTTEQPEAIEAWRVGKLKDMRSTSFRNLSNFGLSSEDSNEEIIPGPPLPPECNTELHTDYGGTTIAPAELEGLLLSHPEILDAVVIPNMCLFLRLPDAEAGEVPIAYVVSSDEKFLAVNRSSGPWEIFGFCIFSNKADNSHVLFITVMQGDIKAIMENSVLEYYLMDENWIKENNS

SEQ ID NO: 13853 - protein, 154 aa, Zea mays
  VARIANT 119: note = Ancestral polymorphism is G, Derived polymorphism is S
  VARIANT 76..154: note = Derived polymorphism lacks residues 76 to 154
MSVMRSEGFVGGLELPVLLSSTTLGKWFPSVLLKAACSSIQLVSPYSSGVPVRCLDGDGNAGADAEHAVEGVPRRQHLPAGPHVQRLEAIVIQLRRPTKVIAFLASNDAEQACDFRITSSYHDGACAVSLGDSDTVIAKTSALSALPPTHSFLD

SEQ ID NO: 13854 - protein, 319 aa, Zea mays
  VARIANT 24: note = Ancestral polymorphism is C, Derived polymorphism is F
  VARIANT 80: note = Ancestral polymorphism is G, Derived polymorphism is E
  VARIANT 89: note = Ancestral polymorphism is G, Derived polymorphism is E
  VARIANT 97: note = Ancestral polymorphism is A, Derived polymorphism is T
  VARIANT 98: note = Ancestral polymorphism is A, Derived polymorphism is V
  VARIANT 99: note = Ancestral polymorphism is G, Derived polymorphism is S
  VARIANT 100: note = Ancestral polymorphism is A, Derived polymorphism is V
  VARIANT 110: note = Ancestral polymorphism is G, Derived polymorphism is D
  VARIANT 130: note = Ancestral polymorphism is V, Derived polymorphism is A
  VARIANT 192: note = Ancestral polymorphism is R, Derived polymorphism is H
  VARIANT 214..319: note = Derived polymorphism lacks residues 214 to 319
  VARIANT 233: note = Ancestral polymorphism is R, Derived polymorphism is W
MAVLTKVLLRLFFTTGGLIVFLLFPASCLARPPHSSSNYNYNYYCDWCPRRSTASPDLDASLLRSCGTSRDGDDGGFDCGYGAAEQLDGGGAPHVAAAGADSFRAGAGCGACYQLRCRDRRVCGAGAVKVVVVAGLANRTGFVLTREAFAAMMARPRVSSDDQLLPGLGGNMVEVDFRRIPCEYKNRNLSVRIDEEGSRHPAHLAITFLYQGGQTDIAAVELSHAHAQPPSWRPMAPLRRRGIVTWRTSSAPAGPLQLRLVVTAGVGGKWLRAGGDVLPADWRPGQVHDTGLRVRDVALSSCARSCRGAATAGASEELR

SEQ ID NO: 13855 - protein, 255 aa, Zea mays
  VARIANT 23: note = Ancestral polymorphism is G, Derived polymorphism is E
  VARIANT 28: note = Ancestral polymorphism is W, Derived polymorphism is S
  VARIANT 56: note = Ancestral polymorphism is A, Derived polymorphism is S
  VARIANT 74: note = Ancestral polymorphism is F, Derived polymorphism is S
  VARIANT 118: note = Ancestral polymorphism is L, Derived polymorphism is Q
  VARIANT 120: note = Ancestral polymorphism is A, Derived polymorphism is D
  VARIANT 148..255: note = Derived polymorphism lacks residues 148 to 255
  VARIANT 166..255: note = Derived polymorphism lacks residues 166 to 255
  VARIANT 185: note = Ancestral polymorphism is Q, Derived polymorphism is P
MQEVTGPRPLQDYELLDQAGSGGPGLAWRIYTARPRDGAPSAPYPVVSVWVLDKRALVEARARAGMSKAAEDASLDLVRADAARLVRLRHPAAQPSGRFPIALVIAEAVEEQYSGMLLSAYKEMRLLLLEFLSIALKEGVELETSLNWGDELYDGESNELQSIGLQSGDAYSPPENWCAERLGSQRPGNLPLHEAEREKAARKQEELQAQLQAQQATLEENQSLLRQAQEEVKGMHTKFEETNALLRAVLKLQKD

SEQ ID NO: 13856 - protein, 85 aa, Zea mays
  VARIANT 1: note = Ancestral polymorphism is M, Derived polymorphism is T
  VARIANT 33: note = Ancestral polymorphism is P, Derived polymorphism is L
  VARIANT 65: note = Ancestral polymorphism is D, Derived polymorphism is E
MATDMDGFDQTVNVKVVMATNRADTLDPTLLRLGRLDRKVEFPLPDWWHKRLVFQMMKFPWIASDGRLLGTPNEQVWPGVGKLLN

SEQ ID NO: 13857 - protein, 171 aa, Zea mays
  VARIANT 149: note = Ancestral polymorphism is V, Derived polymorphism is A
  VARIANT 134: note = Ancestral polymorphism is G, Derived polymorphism is S
  VARIANT 124: note = Ancestral polymorphism is E, Derived polymorphism is K
  VARIANT 117..171: note = Derived polymorphism lacks residues 117 to 171
  VARIANT 88..171: note = Derived polymorphism lacks residues 88 to 171
  VARIANT 86: note = Ancestral polymorphism is F, Derived polymorphism is L
  VARIANT 85: note = Ancestral polymorphism is R, Derived polymorphism is C
  VARIANT 84: note = Ancestral polymorphism is F, Derived polymorphism is L
MQIPHEAFGFDTSWPITDEGFTMAKSKDHMAHNQSYKAHKNNIKKPMRGCQTSTKGSRASLMRLGSCVVGSVHEEHWFSLIYFFRFCQALLHASVALDRKLVVDWVPSCDLEDSAAEENLDAYEKAWELLKLHGANSTEFDPTTKTPCVIFMPEDHFDILSFELIPMYRGW

SEQ ID NO: 13858 - protein, 90 aa, Zea mays
  VARIANT 61: note = Ancestral polymorphism is P, Derived polymorphism is H
  VARIANT 28: note = Ancestral polymorphism is P, Derived polymorphism is L
  VARIANT 1: note = Ancestral polymorphism is T, Derived polymorphism is M
MFALYGDGAANQGQLFEALNISALWKLLAILVCENNHYCMGTAEWRAAKSPAYYKRGDYVHGLKVDGMDVLVVKQACKFAKDHAIANGPI

SEQ ID NO: 13859 - protein, 145 aa, Zea mays
  VARIANT 134: note = Ancestral polymorphism is A, Derived polymorphism is T
MAPSFARSISFPLSPSRSSTSSSGTKPRAGAAAAGSTAAAYHARSVSLPCRSHPILAHLHAHIGAVRAWAQDPPATSAPGAAAGLARVDALHGALADLLGLPEARAALSLSATGDRLLDAFLRLADAHGSFQEAVVELKRDGMRI

SEQ ID NO: 13860 - protein, 440 aa, Zea mays
  VARIANT 1: note = Ancestral polymorphism is M, Derived polymorphism is I
  VARIANT 40: note = Ancestral polymorphism is S, Derived polymorphism is F
  VARIANT 41: note = Ancestral polymorphism is A, Derived polymorphism is S
  VARIANT 51..440: note = Derived polymorphism lacks residues 51 to 440
  VARIANT 65: note = Ancestral polymorphism is D, Derived polymorphism is H
  VARIANT 143..440: note = Derived polymorphism lacks residues 143 to 440
  VARIANT 149..440: note = Derived polymorphism lacks residues 149 to 440
  VARIANT 186: note = Ancestral polymorphism is R, Derived polymorphism is H
  VARIANT 198..440: note = Derived polymorphism lacks residues 198 to 440
  VARIANT 199..440: note = Derived polymorphism lacks residues 199 to 440
  VARIANT 207..440: note = Derived polymorphism lacks residues 207 to 440
  VARIANT 275..440: note = Derived polymorphism lacks residues 275 to 440
  VARIANT 304..440: note = Derived polymorphism lacks residues 304 to 440
MLAEFDPVIQEHVRRITNEETQAHYLDNKIQNELIHLLASAIKSEIIKKIKRAKYFSVILDCTPDASHQEQMSLIIRYVDLSSKHANIEESFLGFLDVNDTTGQCLFDVLQNELKILDLDIDNVRGQGYDNGPNMKGCKNGVQKKLLDLNPRAFYSACSCHSLNLTLCDMANTCRKAKDFFGIIQRIYTIFANSTKKWQILKDNITGLTPKSVSATRWESRIESVKAIRFQCADFREALLQVADADNDAKTSSEAKGLANNELGEYEFIVAIVIWYEVLFVVNIVSKHLQAKDMLIDDAIDKVQGLISFFKNYREIGFLEALQTAKDIAHEMDIDTSFRKRREIKRKRHFDENPDEANIATQSAEESFRITYFLPIVDQAVSSLTRRFEQYQGYQKIFGFLFNSEVLQSLDNESLHSSCDNLKTALNKEGQSDIDAKEFF

SEQ ID NO: 13861 - protein, 147 aa, Zea mays
  VARIANT 8: note = Ancestral polymorphism is P, Derived polymorphism is L
  VARIANT 11..147: note = Derived polymorphism lacks residues 11 to 147
  VARIANT 66: note = Ancestral polymorphism is G, Derived polymorphism is R
  VARIANT 70: note = Ancestral polymorphism is V, Derived polymorphism is A
  VARIANT 73: note = Ancestral polymorphism is G, Derived polymorphism is D
  VARIANT 81: note = Ancestral polymorphism is I, Derived polymorphism is T
  VARIANT 91: note = Ancestral polymorphism is G, Derived polymorphism is R
  VARIANT 108..147: note = Derived polymorphism lacks residues 108 to 147
  VARIANT 111: note = Ancestral polymorphism is N, Derived polymorphism is Y
  VARIANT 132..147: note = Derived polymorphism lacks residues 132 to 147
MAETGQAPCAWCCSFTEVPGIGGHIDPCRSAQKRWVDFEPYVVFDLHQIFEATYNFSEDNKLGEGGFGPVYKDQFPEAAGIGVKRLASHSGQGFVEFKIEVHLMAKFQHTNLVTLDVAHGNRRKFGSMNTCQRKAWTSLSLFVNGLS

SEQ ID NO: 13862 - protein, 268 aa, Zea mays
  VARIANT 132: note = Ancestral polymorphism is P, Derived polymorphism is S
MAAEQQHQLDLPGFRFHPTEEELLEFYLKQAARGRKLKFDIIPTVHLYRHDPWELPSLARVVGEREWYFFVPRDGGGRAAKQQPGSGGRPSRTTERGFWKATGSDRAVRCAADPKRLIGLKKTLVYYEGRAPRGTKTDWVMNEYRLPDAADASSDARVPQVDVVLCKVYRKAVSLKELEQRVAMEELARATATPSASHSTGSPADSMSSSEIVMVPVGGVSLSPSAAMSMKREEAAKNQQQQDPFLTQLRSPRMESWWSAYYASVLNF

SEQ ID NO: 13863 - protein, 823 aa, Zea mays
  VARIANT 337..823: note = Derived polymorphism lacks residues 337 to 823
  VARIANT 176..823: note = Derived polymorphism lacks residues 176 to 823
MLCLVSPSSSPTPLPPPRRSRSHADRAAPPGIAGGGNVRLSVLSVQCKARRSGVRKVKSKFATAATVQEDKTMATAKGDVDHLPIYDLDPKLEIFKDHFRYRMKRFLEQKGSIEENEGSLESFSKGYLKFGINTNEDGTVYREWAPAAQEAELIGDFNDWNGANHKMEKDKFGVWSIKIDHVKGKPAIPHNSKVKFRFLHGGVWVDRIPALIRYATVDASKFGAPYDGVHWDPPASERYTFKHPRPSKPAAPRIYEAHVGMSGEKPAVSTYREFADNVLPRIRANNYNTVQLMAVMEHSYYASFGYHVTNFFAVSSRSGTPEDLKYLVDKAHSLGLRVLMDVVHSHASNNVTDGLNGYDVGQSTQESYFHAGDRGYHKLWDSRLFNYANWEVLRFLLSNLRYWLDEFMFDGFRFDGVTSMLYHHHGINVGFTGNYQEYFSLDTAVDAVVYMMLANHLMHKLLPEATVVAEDVSGMPVLCRPVDEGGVGFDYRLAMAIPDRWIDYLKNKDDSEWSMGEIAHTLTNRRYTEKCIAYAESHDQSIVGDKTIAFLLMDKEMYTGMSDLQPASPTIDRGIALQKMIHFITMALGGDGYLNFMGNEFGHPEWIDFPREGNNWSYDKCRRQWSLVDTDHLRYKYMNAFDQAMNALDERFSFLSSSKQIVSDMNDEEKVIVFERGDLVFVFNFHPKKTYEGYKVGCDLPGKYRVALDSDALVFGGHGRVGHDVDHFTSPEGVPGVPETNFNNRPNSFKVLSPPRTCVAYYRVDEAGAGRRLHAKAETGKTSPAESIDVKASRASSKEDKEATAGGKKGWKFARQPSDQDTK

SEQ ID NO: 13864 - protein, 492 aa, Zea mays
  VARIANT 234: note = Ancestral polymorphism is C, Derived polymorphism is Y
  VARIANT 343: note = Ancestral polymorphism is T, Derived polymorphism is M
MDPYKHRPSSGSNSSFWTTNSGAPVWNNNSALTVGQRGPILLEDYHLIEKLAQFDRERIPERVVHARGASAKGFFEVTHDVSHLTCADFLRAPGVQTPVIVRFSTVVHERGSPETLRDPRGFAVKFYTREGNFDLVGNNMPVFFIRDGMKFPDMVHAFKPNPKTNLQENWRIVDFFSHHPESLHMFTFLFDDVGIPLNYRHMEGFGVNTYTLINRDGKPHLVKFHWKPTCGVKCLLDNEAVTVGGTCHSHATKDLYDSIAAGNYPEWKLYIQTIDLDHEDKFDFDPLDVTKTWPEDIIPLQPVGRMVLNKNVDNFFAENEQIAFCPAIIVPGIHYSDDKLLQTRIFSYADTQRHRLGPNYLMLPVNAPKCAHHNNHHDGFMNFMHRDEEVNYFPSRFDPARHAEKVPIPPRVLTGCREKCIIQKENNFKQAGERYRSFDPARQDRFIQRWVDALTDPRVTHEHRTIWISYWSQCDAALGQKLASRLNLKPSM

SEQ ID NO: 13865 - protein, 266 aa, Zea mays
  VARIANT 210..266: note = Derived polymorphism lacks residues 210 to 266
MCIAAWIWQAHPVHQLLLLLNRDEFHSRPTKAVGWWGEGSKKILGGRDVLGGGTWMGCTKDGRLAFLTNVLEPDAMPGARTRGDLPLKFLQSNKSPLEVATEVAEEADEYNGFNLILADLTTNIMVYVSNRPKGQPATIQLVSPGLHVLSNARLDSPWQKAILLGKNFRELLREHGADEVEVKDIVERLMTDTTKADKDRLPNTGCDPNWEHGLSSIFIEVQTDQGPYGTRSTAVLSVNYDGEASLYEKYLESGIWKDHTVSYQIE

SEQ ID NO: 13866 - protein, 352 aa, Zea mays
  VARIANT 184: note = Ancestral polymorphism is H, Derived polymorphism is Y
MKGGKSNAAGRSLGEETPTEDCGADTMQRKICGVRIPIKVSYVVCHQLMDLPGPRWKKGKDCKGFAALAAANPMSSIVAELQASLRDSEAVAILAAHARDAILEVGPRQAALLNGAAFGRAVEGAGAESQWFQLGPEEVFFLCHALKCLRVESNNKTRIGAPELWGLLASGSEQFPEMYRAYQYLRLKNWVVRSGLQYGADFVAYRHHPALVHSEFTVVVAPEGKAFGTRCARMEVWSEVLCALRASGSVAKTLLVLTISTKSCELGSLDCLEQMIVHERTITRWIPQQCSEQQDKPCREETNRDGQRQKSCIEVSSNEEQEHTSGGVVFSYWPVVLSYTILFSVLVYKLKS

SEQ ID NO: 13867 - protein, 264 aa, Zea mays
  VARIANT 175: note = Ancestral polymorphism is C, Derived polymorphism is R
  VARIANT 178: note = Ancestral polymorphism is C, Derived polymorphism is Y
MELLHAVIHGAATTTTTTTTTTTSSSATVTSGDEGAHLPQGWAKKKRSRRQRSEEENLALCLLMLSRGDRHRVQAPPPPVPSAEFRCSVCGKSFGSYQALGGHKTSHRVKLPTPPAAHVQLPAPPAVALLVEAPAPPPVTATPPPLPLVAVAVAVREPATSSTSDGAAAGRVHRCTICHKEFPTGQALGGHKRKHYDGGAAAAETSEVGSSGNEGSAARAFDLNLPAVPEFAFRCGAKPGKMWDEDQEVQSPLAFKKPRLLMTA

SEQ ID NO: 13868 - protein, 300 aa, Zea mays
  VARIANT 27: note = Ancestral polymorphism is R, Derived polymorphism is G
  VARIANT 32: note = Ancestral polymorphism is F, Derived polymorphism is L
  VARIANT 193: note = Ancestral polymorphism is D, Derived polymorphism is G
  VARIANT 248: note = Ancestral polymorphism is R, Derived polymorphism is G
  VARIANT 252: note = Ancestral polymorphism is G, Derived polymorphism is A
  VARIANT 253..300: note = Derived polymorphism lacks residues 253 to 300
  VARIANT 254..300: note = Derived polymorphism lacks residues 254 to 300
  VARIANT 255: note = Ancestral polymorphism is W, Derived polymorphism is R
  VARIANT 278: note = Ancestral polymorphism is G, Derived polymorphism is R
MATCRKTARVDVTELKQRLVKRLGRERAVKYFAHLARLLNLKLTKVEFDRLCLATIGKENIALHNALIRGIIGNALSGVPPLSRQAVTGQSGTTTAPSGQCVGVALPVVENVGAVVDSGDGELARERGAPVGKLVSVEDGEEVEQVRYAPCVQSRSPITAPLGISVAGGSGMRVRRKLDDSVVSCYDSGQLLDTGSLCEGLQRWLYSNGTGVTVQAVDALNHGLDELLRRLIKPTVDLSRVSGSWIARHAHGQRWRFSKKWNVLLKEVNQERSIHVKREVICWMKNFSPSAFIPTDVYGI

SEQ ID NO: 13869 - protein, 94 aa, Zea mays
  VARIANT 59: note = Ancestral polymorphism is P, Derived polymorphism is L
  VARIANT 15: note = Ancestral polymorphism is G, Derived polymorphism is S
MCMDGAVPVKRVWLGIAARLGLRRKTGLRKLRKEVRTCEYRDVHVMWEMLRATDGPAVPLAEKEAAAAAAVAAAAGARKRRNAWRRFVYYCCAF

SEQ ID NO: 13870 - protein, 925 aa, Zea mays
  VARIANT 678..925: note = Derived polymorphism lacks residues 678 to 925
MPPPSASAIATRFATHWIADALADDESFDFSVLQDLVRASSKPLAGAPEATRERVALRCLQEASSVIAAGGDAAATAGVLRVDGARSCEDVLLRLIREVGSSRELEKDLLPPFSQDIQETICTKKSTLPETSFQLLKGLEPWITSMTPQSQMEHNDTEQCDIDQSLRSSHGCVNIEKPMFPTDNAEVQQETMADVVNGSETGNVQKDPPAPTSVFHQPCMHESRSYIPPQEDTIDVVGLGDRSLERSPIVEGNMSIGSVLASAGCDAPLQGRITEPFSQQDKHDHTATVEPKSCRQKSPNLSHCADGEGADDGGSSNQSSKVSIHEGPSAHAPVTSGFDRISGVLSTDASEPEHLSECIPAQDTSMISQLDSRKAHLSALQQERVEKVNQGPEDISANIGPVEKEHVHGDLTLQSASVLLSISCNGSNQGTKSETNLQPGTATEDRMAFEEQNAEKSHLELSGTNKANQALFDDGSVMKNNTVHGGLTAHTAPVSQSCSVTLHDKTSEANCFSEWKNEKNGQKDNCHTSIPGSSQDGGGESAKKTSNEVNSGDTSSKICVHSKDKDINDTLEGLSQQDLCIKCGKVGQLLECSSCSLAAHNSCFGSSVTFEETNLFYCPVCFYKRATEAYKKAKKTYGEARKNVAAFLGTIQVTKQHNEQLNGVQPGGANREDHSDTSKRTHENEVYNLAHQDEEPHQQMKKQKINAIGIDYRKEVLTEKVPFQNSGPASINKHSVLQNNGKTRVKDPEKKQQAGDEEARKEAGNEKSHETGASSQRRCDPPSNHDVEADQEGSLTTSIQSSGSDELEAKGLQEKKAAVSSKSRKGISKRDQHMPTSPRKRNSVHLQKRYSNPLAPPGRRKKLFWTEEEEAVLREGMAKFTPQNNAQIPWILILEHGRGVFHRTRLPSDLRVKWRSMQRKKWAGY

SEQ ID NO: 13871 - protein, 303 aa, Zea mays
  VARIANT 212: note = Ancestral polymorphism is P, Derived polymorphism is R
  VARIANT 183: note = Ancestral polymorphism is R, Derived polymorphism is S
  VARIANT 133: note = Ancestral polymorphism is A, Derived polymorphism is T
  VARIANT 67: note = Ancestral polymorphism is A, Derived polymorphism is V
  VARIANT 61: note = Ancestral polymorphism is S, Derived polymorphism is L
  VARIANT 56..303: note = Derived polymorphism lacks residues 56 to 303
  VARIANT 36: note = Ancestral polymorphism is S, Derived polymorphism is Y
  VARIANT 5: note = Ancestral polymorphism is D, Derived polymorphism is N
MEEIDAAKPTKDNVDVRLKWLGLFHRYKHQCTPTDSTPPAMVVVAVGRSDPASVTQTKQPSVPGVLAFLVHGFIAQVKMSAFYITYYICMEKHVEVDLCIGIICSLHKDANDRSSTQALLFQTTYLVSRFFMALTLKDQSILVNGDINEGLLRLCHKLHRLRKEYAYTFESTSLSYQCSEVSRILQGYKVVHDIKRFVGHNLYYMKIMGVSPKFTFSAIYRFMFMRLSSFHFNANPAGQHHVTKQRKRTRVIGKKKRIAKKSEAAEYQKLLAQRLKEQRDRESLAKRRSKLSAASKASAATAA

SEQ ID NO: 13872 - protein, 328 aa, Zea mays
  VARIANT 35: note = Ancestral polymorphism is S, Derived polymorphism is G
  VARIANT 1: note = Ancestral polymorphism is M, Derived polymorphism is I
MARPRPSVVVLAVAVAVASLAQPGAADLKQDYYASTCPNVEAIVRGVVQQRLQATIRAVGSTVRLFFHDCFVEGCDGSVLIESTPGNQAEKDASDNKSLASEGFDTVRSAKAAVEAACPDTVSCADVLAIAARDAISMSGGPFFPVELGRLDGLISTASSVPGQLPEANQTMDQLLAVFKAHGLNMSDLVALSAAHSVGLAHCSKFASRLYSYQLPGQPTDPTLNPKYARFLESRCPDGGPDNLVLMDQATPAQFDNQYYRNLQDGGGLLGSDQLLYTDNRTRPMVDSLANSTAAFYRALADAVVRLGRVGVKSGRRGNVRKQCDVFN

SEQ ID NO: 13873 - protein, 137 aa, Zea mays
  VARIANT 2: note = Ancestral polymorphism is A, Derived polymorphism is E
  VARIANT 9: note = Ancestral polymorphism is K, Derived polymorphism is I
  VARIANT 13..137: note = Derived polymorphism lacks residues 13 to 137
  VARIANT 28: note = Ancestral polymorphism is A, Derived polymorphism is T
  VARIANT 47: note = Ancestral polymorphism is T, Derived polymorphism is I
  VARIANT 91: note = Ancestral polymorphism is F, Derived polymorphism is S
MAVLAITSKVRSLKWLPTRTLIANVLAASIMAVLAITSKVVDTKRSTTILSGIQLDFLGCLSTMSTFDAEVYTMRRSGQIARTLIYAASTFMLPFLLAQLSSWCPSRMLQAHRHLGQHTNILPHGFLHIIVIFVVLY

SEQ ID NO: 13874 - protein, 309 aa, Zea mays
  VARIANT 39: note = Ancestral polymorphism is V, Derived polymorphism is A
  VARIANT 60: note = Ancestral polymorphism is G, Derived polymorphism is R
  VARIANT 66: note = Ancestral polymorphism is S, Derived polymorphism is F
  VARIANT 221..309: note = Derived polymorphism lacks residues 221 to 309
  VARIANT 276..309: note = Derived polymorphism lacks residues 276 to 309
MAWLFHNIVPTRIWLRMLLNKKILLCYLNYKESLWYPKVVLGHHLDLRLVRNQWLLLDPGADCLMSEANEDKTSRDFKEMGSRLAGEVIAFLKKKMDKLSRYGGCKELKLSFVGHSIGNIIIRSALAEPALQPYLKNLYTYMSISGPHLGHWYSSNSLFNSGLWLLKKLKNAQCIHQLTFSDDQDPHNTYFYKLCKLKTLENFKNIILLSSPQDGYVPYHSARMELCPAASSDTSKKGQVFTEMLNNCLDQIRAPSSDTRTFMRCDVNFDQSNHGQSLNTMIGRAAHIEFLETDIYAKFIMWSFPDLFR

SEQ ID NO: 13875 - protein, 225 aa, Zea mays
  VARIANT 39: note = Ancestral polymorphism is I, Derived polymorphism is N
  VARIANT 55: note = Ancestral polymorphism is S, Derived polymorphism is I
  VARIANT 63: note = Ancestral polymorphism is S, Derived polymorphism is W
MPMEQASRHCDKDTLKMAMLKHEETFRQQVHELHRLYRIQKLLMRDLTRELKLKSQRSLPTTSPNGSCAEYSRGALGMCAYERLYAALGRGGHVAAAATPTPTPRTALGLDVVAPVVEYVRSAEEEDDDDRAEETDEDAELELTLAVGGGGAKKRYDEYPSGGESLSSSSTESDVLTVSGREWRRARGTPYHKMRPATGLDVVQVEDDVGVPPPLLFHWLSLKMA

SEQ ID NO: 13876 - protein, 383 aa, Zea mays
  VARIANT 18: note = Ancestral polymorphism is A, Derived polymorphism is V
  VARIANT 19: note = Ancestral polymorphism is A, Derived polymorphism is D
  VARIANT 21: note = Ancestral polymorphism is A, Derived polymorphism is V
  VARIANT 22: note = Ancestral polymorphism is A, Derived polymorphism is V
MIGFPPWNCLPTGIAKIAAAAAVVVAALASSGIALPRPRAAPPPSGFGLLMSKAKVYTDVNVLRPKEYWDYEALTVQWGEQDDYEVVRKVGRGKYSEVFEGINVNNNEKCIIKILKPVKKKKIKREIKILQNLCGGPNIVKLLDIVRDQHSKTPSLIFEFVNNTDFKVLYPTLTDYDIRYYIYELLKALDYCHSQGIMHRDVKPHNVMIDHELRKLRLIDWGLAEFYHPGKEYNVRVASRYFKGPELLVDLQDYDYSLDMWSLGCMFAGMIFRKEPFFYGHDNHDQLVKIAKVLGTDGLNSYLNKYHIELDPQLEALVGRHSRKPWLKFMNGDNQHLVSPEAIDFLDKLLRYDHQDRLTAREAMAHPYFLQVRAVENSRTRAQ

SEQ ID NO: 13877 - protein, 538 aa, Zea mays
  VARIANT 15: note = Ancestral polymorphism is R, Derived polymorphism is H
MALRAVELRRFLLRRIGGGEAALPPLAWRGRPASTSAPADDELAGKSAYEVLGVGETSSSAEIKASFHRLAKETHPDVAAAAGSRRFLQILAAYEILSDSQRRAHYDSYLRSQRRVVGKHPRPSQFVYPSGSGSGIVVPRESNVVEWLKWYRLTIDDIVTKKRVATGSGYFERLESELYTAIHAAYYGPDVDSMDVLPDCFEAEERSAYETSELLHLVSGRDLFGIVTVTDSVKELSDVCREKLVPSGCRSSEFTHVVSRNANKNSISMNPVDMNKQEMRYENDVPSSDSFKDIELQICGKLVATATRSPNCDCIDKSDLEEDHIHVYLVPNANISDLTHGKLLLGTITGLATTGEEGSCCVYDGHNIKTHIIMKHRTLMVKHMHWYQVGDTVSPCECRCSRARLPPSRLNNLEDLMQLNNTFMCNRNMDALKTMVRPATYKIGRGYWLFEPRCYMHDTGGWYIETYGRDKKGRTIPSQRQWDGSNEHSEKRLHPAMYLAALAYRSLDLEDAGRRRWNVTSLLQWSLSHLRQLFKKSC

SEQ ID NO: 13878 - protein, 286 aa, Zea mays
  VARIANT 245: note = Ancestral polymorphism is A, Derived polymorphism is V
  VARIANT 229..286: note = Derived polymorphism lacks residues 229 to 286
  VARIANT 24: note = Ancestral polymorphism is S, Derived polymorphism is L
MVQEAETYKAEDEEHKKKVDAKNSLENYAYNMRNTRYACACACACGSRLRKLQSSGYLVNDSLTVECTITVLRDLDAPDREQPLPVPPPSDLHQHLGELLQSSDGADVTFHVSEESFTTHKIFLAARSPVFKVEFFGGMKEALLLWRSETWRLLCSGSCFTSSIPTWPQSSMGAAPSSATTLGPTPAPRRAPAEQRWSGRHVSCLRGVLHHPQDLPHRKVLGLQGRVLQRHEGSSASVEIGDMEAVVFRAMLHFIYTDMAPELDGDQEPEAAAAAIAKHLLVATDW

SEQ ID NO: 13879 - protein, 231 aa, Zea mays
  VARIANT 51: note = Ancestral polymorphism is R, Derived polymorphism is H
MAADHRTEAQSRGPPTLSSPLSLSGEPPQPRASAGIGAATGSKHGEKGKKRGRKSAAVYVGDGKNIVHSWLHFVCACPKEFEPNANTVEIARVAGIGKIEIKTIPEKQLREHTLCTQMFGPAWDKRKKLVIESRSFMDSRCKLTSSMSTGIFFPPKQIKDPETKKPEDWEDKEYIPDPEDKKPEGYDGIPKEITDPDAKKPEDRDNEEDGEWTTHLLVPFPTKIQGTMETK

SEQ ID NO: 13880 - protein, 198 aa, Zea mays
  VARIANT 39: note = Ancestral polymorphism is E, Derived polymorphism is V
MWQRRHGASTRRYCVLMLGVKTVATLRFLSFKKKHRGREVTVIDCTSPTVPWLADDTSGRWQPASCLHSTNATESKVFYLKMKGDYHMKDAAGSTMNPYKAAQVSSDCSPLLEAGQAESLGTELLGMVPSREEEIKLKEYREDVVSTFVVDDYVILQFKGSTFTGSWKSFSSPKISSTFLVVIAIVSNGIVIYVWMMK

SEQ ID NO: 13881 - protein, 448 aa, Zea mays
  VARIANT 274..448: note = Derived polymorphism lacks residues 274 to 448
MEEALFVLGLALARLAGAVRRRSTPRLPAALGDRRRRPPYSELFRTLCWRAPTTPGNADYMNGSYTSSLSLHDVSVDDGQSALDNSSRTSSPFDILTPQDVIPIETARSRFLDLVVESFICEHVTELVECSSSDCSQVDGKSSKRKQQEVRYEGDPRVALPLMYIANLYETLISDVNVRLAALIGFREKTIGLALEASGGLYRKLIQRFPKRGHCSFKRRELATSHATRTKFPELVVQEEKRVRFVVINGLAIVERPENMRMEDAEWFKRLTGRSEVAICSRDYKFYSPRHKIRRSPQAAFDIPDTSALAEDENSSLVCSSGFRSPNEIQNQHQSTSKRPIEHLENQPFLHLFHQAEDDSMQQVQHCAQFPPIHQCTSTPHLSDNPQHQQQAYLSQHISCLQVGQGHLGGRMHIIPTSPAKFCDECGSPYLRATSKFCSECGTKRLGM

SEQ ID NO: 13882 - protein, 269 aa, Zea mays
  VARIANT 71: note = Ancestral polymorphism is P, Derived polymorphism is H
MVGLSEGEKHFIRAALHRTFALMDANGSARVRLGATEIIASVKAELGKPSILHPDKGKVDIFVDCSPTAEPLFEGRGSEELSAELSVSLQRCLLGGKSGAGAAIDLSSLIVVDGKVCWDLYIDGLVVSSDGNLLDALAVAIKVALSDTGIPKVNVSVSAASDEEPEVDVSDEEFLQFDTSGVPIIITLTKVGRHYIVDATSEEESQMSSAVSVSVNRHGQICGLTKRGGAGLDPSVIFDMISVAKHVSQQFISLLDSEIAAAEAEEEAQ

SEQ ID NO: 13883 - protein, 168 aa, Zea mays
  VARIANT 91..168: note = Derived polymorphism lacks residues 91 to 168
  VARIANT 37: note = Ancestral polymorphism is R, Derived polymorphism is C
  VARIANT 26: note = Ancestral polymorphism is A, Derived polymorphism is T
  VARIANT 23: note = Ancestral polymorphism is E, Derived polymorphism is D
MAALPLATAEVCDANPHLIMNGELRALQPIFQIYGRRQVFAGPIVTLKVYEDNVLVREFLEEKGHGRVLVVDGGGSMRCAILGGNPVQQAQNNGWAGILVNGCIRDVDEINGCDIGVRALSSHPMKANKKGMGEKHVPVNIAGTRICDGEWLYADPDGILVSRTELTV

SEQ ID NO: 13884 - protein, 186 aa, Zea mays
  VARIANT 81: note = Ancestral polymorphism is N, Derived polymorphism is I
  VARIANT 3: note = Ancestral polymorphism is R, Derived polymorphism is Q
MNQMIEAWKEIPGAEEDECSSALPPASQSQRRCSLTGSASDGRYLAASLGSNSVPSATRKSILSVSRSSPPDVSTSVTITNSPSSIRNKKLSLPSYHKVCQANNCDYKVDIVVSLDATPMKVVTEEKLLKGRGVRDRLESRRTLFKGSKDRSAKLAAHKAGSQVVPYEGGGNLEEISEVEGGSERF

SEQ ID NO: 13885 - protein, 312 aa, Zea mays
  VARIANT 154: note = Ancestral polymorphism is C, Derived polymorphism is S
MAAPPPTGCFKCGRPGHWSRDCPSSASTNPPAAADAPTNPSHLSGAASRFNAKPRPPAAAVDGEDGKGKKKKERATRPKLTPDLLLSDGGIGFVLRYFPKAFKPRARPGHEVDDLANLIKLYADWHSRLIPYYSFEQFVRKLEKLGAGNRVRRCVSELRDRVARGGDPTLLHEPPVHEDMPLPGGGEHGTEDPVLGTDAPLSDNHGTGPVVQEDADPPMESNDVVDPMEEDLLNEIYENTADIPAGEGASKESPEQSAPKEANSLAQEPQDGDVPKPAKVELTEAQKARMEANRLKALERAAARARASQQPT

SEQ ID NO: 13886 - protein, 330 aa, Zea mays
  VARIANT 46: note = Ancestral polymorphism is A, Derived polymorphism is S
  VARIANT 81: note = Ancestral polymorphism is P, Derived polymorphism is L
  VARIANT 93: note = Ancestral polymorphism is R, Derived polymorphism is C
  VARIANT 104: note = Ancestral polymorphism is R, Derived polymorphism is W
  VARIANT 125: note = Ancestral polymorphism is S, Derived polymorphism is R
  VARIANT 155..330: note = Derived polymorphism lacks residues 155 to 330
  VARIANT 157: note = Ancestral polymorphism is G, Derived polymorphism is D
  VARIANT 163: note = Ancestral polymorphism is V, Derived polymorphism is M
  VARIANT 166: note = Ancestral polymorphism is G, Derived polymorphism is D
  VARIANT 173: note = Ancestral polymorphism is A, Derived polymorphism is T
  VARIANT 180: note = Ancestral polymorphism is E, Derived polymorphism is V
  VARIANT 190: note = Ancestral polymorphism is E, Derived polymorphism is K
  VARIANT 194: note = Ancestral polymorphism is R, Derived polymorphism is Q
  VARIANT 196: note = Ancestral polymorphism is L, Derived polymorphism is I
  VARIANT 202: note = Ancestral polymorphism is E, Derived polymorphism is D
  VARIANT 205: note = Ancestral polymorphism is N, Derived polymorphism is Y
  VARIANT 207: note = Ancestral polymorphism is R, Derived polymorphism is M
  VARIANT 208: note = Ancestral polymorphism is I, Derived polymorphism is T
  VARIANT 211: note = Ancestral polymorphism is G, Derived polymorphism is E
  VARIANT 218: note = Ancestral polymorphism is P, Derived polymorphism is S
  VARIANT 234: note = Ancestral polymorphism is Y, Derived polymorphism is H
  VARIANT 245: note = Ancestral polymorphism is L, Derived polymorphism is R
  VARIANT 253: note = Ancestral polymorphism is G, Derived polymorphism is C
  VARIANT 256..330: note = Derived polymorphism lacks residues 256 to 330
  VARIANT 271: note = Ancestral polymorphism is V, Derived polymorphism is M
  VARIANT 275: note = Ancestral polymorphism is L, Derived polymorphism is I
  VARIANT 281: note = Ancestral polymorphism is A, Derived polymorphism is T
  VARIANT 304: note = Ancestral polymorphism is K, Derived polymorphism is T
  VARIANT 322..330: note = Derived polymorphism lacks residues 322 to 330
MAAAPEELLCAAAKSGEEGEVAKLLASGADATHFDADGLTPLMHASAGGHAAVARLLLDCGAPWNALSPSGLSAGDLASDPDTYDLLLDHAIRSELVLGTVARRQAAPANGPPAESYLESRVSFSEERVMDAESKAVMMAWERPLMEAHARAVCQGGGKVLNVGFGMGLVDEAIQRYGPEEHTIVEAHPEVYERMLKLGWGDKKNVRIVFGRWQDVMPQLGSYDGIFFDTYGEYYEDMREFHQHLPKLLKPGGIYSYFNGLCGDNAFFHAVYCQLVALELANLGYSTQFIPLPVKDCLAEEVWKGVKRKYWQLDTYYLPACQSESESTIK

SEQ ID NO: 13887 - protein, 200 aa, Zea mays
  VARIANT 50: note = Ancestral polymorphism is N, Derived polymorphism is Y
  VARIANT 52..200: note = Derived polymorphism lacks residues 52 to 200
MCMCSAATLPCCHVGRHGHQLHCTAPPHSYIVYCCCAHSLYICITACFWNQERRSPLHSRRHPPLPLLFLEMTMTTMKKQQQLLLLLSLMFLVAVTAAAVAADPHPQQVQVQVQQQQQAQMRINRATRSLLPQPPPKLDCPSTCSVRCGNNWKNQMCNKMCNVCCNKCSCVPPGTGQDTRHLCPCYDTMLNPHTGKLKCP

SEQ ID NO: 13888 - protein, 367 aa, Zea mays
  VARIANT 84: note = Ancestral polymorphism is P, Derived polymorphism is L
  VARIANT 90: note = Ancestral polymorphism is V, Derived polymorphism is L
  VARIANT 99: note = Ancestral polymorphism is E, Derived polymorphism is Q
  VARIANT 112: note = Ancestral polymorphism is F, Derived polymorphism is L
MLRALAARCCGHWPPGAAAADGMLWQAELRPHAAGEFSMAAAQANLAMEDQAQVLASPAATLVGVYDGHGGADASRFLRSRLFLHVQRVVQEQGGMSAEAIRSAFGAAEEEFHRQVRQEWRSRPRLAAVGSCCLLGAISGDTLYVANAGDSRAVLGRRVPGGGAAVAERLSAEHNAACEEVRRELAALNPDDAQIVVHARGAWRVKGIIQVSRSIGDFYLKKPEYSLDPLFRQVGAPIALKRPALSAEPSVQVRKLKPNDLFLIFASDGLWEHLSDDAAVQIVFKNPRTGIASRLVKAALKEATRKREVRYRDLRTIERGVRRHFHDDISVVVVYLDGHRERRHTRVVDSSSNCTSAPVDIHSSNSR

SEQ ID NO: 13889 - protein, 145 aa, Zea mays
  VARIANT 40: note = Ancestral polymorphism is A, Derived polymorphism is T
  VARIANT 129: note = Ancestral polymorphism is R, Derived polymorphism is L
MSPASSMLTAVSLSSPLPAPRLRAAAAASSFAPPRRAAVALVVRAASASSKSPATAEAAPKKKRATGITQPKSVSPALQAIVGDPVIPRTEVLKRLWAYIKEHNLQDPSDKKVVVCDEKLKVLFAGRERVGFLEIAKLLNPHFVK

SEQ ID NO: 13890 - protein, 96 aa, Zea mays
  VARIANT 4: note = Ancestral polymorphism is E, Derived polymorphism is A
MKPAATARVAGLLFFLVLLLALPSLRVSMAGSGFCDGKCAVRCSKASRHDDCLKYCGICCATCNCVPSGTAGNKDECPCYRDMTTGHGNRTRPKCP

SEQ ID NO: 13891 - protein, 1881 aa, Zea mays
  VARIANT 696..1881: note = Derived polymorphism lacks residues 696 to 1881
  VARIANT 798..1881: note = Derived polymorphism lacks residues 798 to 1881
  VARIANT 985..1881: note = Derived polymorphism lacks residues 985 to 1881
  VARIANT 1285..1881: note = Derived polymorphism lacks residues 1285 to 1881
MGKGAPPAVATATSVPEAPVFHPTDEEFADPLAYVARIRPLAEPYGICRIVPPSSWSPPYALDFKALSFPTKRQPIHRLLARPAPADPDTFLLDYRRFLGASSAHRRGRRKGLPKSPSLSDGRPLDLCRLFHAVKRFGGYYGACEGKRWGDVVRLVDDKAPMHISECAKHVLAQLYYEHLYGYEKFANPQHGNKGRKQPRPGSDDRPSVSRSQDEESNISVTGEMVEEVTGRKRRNFSRKELGRGTSHGRYGRVVNITGNNVASAVAQKRTRRNSDAVVTTVDEVSAGVRKRKRRKSDAASTVFNDEVDQVCEQCSSGLHGDVMLLCDRCDKGWHLYCLSPPLERVPPGNWYCSDCLNSDRDCFGFIQRRKSCLLETFRRFDDRVRKRWFGQRNPSRIQIEKQFWEIVEGKAGELEVMYGSDLDTSIYGSGFPRLGDTVPSSMDLETWQKYCSSPWNLNNFPNLPGSVLRTVKDKIPGVMVPWLYIGMLFSSFCWHVEDHCFYSINYLHWGEPKCWYGVPGAKANAFEQVMRQALPDLFDAQPDLLFHLVTMLNPSILQANSVPVYSVMQEPGNFIITFPRSFHGGFNLGLNCAEAVNFAPADWLPHGGIGANLYRLYRKAPVLSHEELLYVVAKNGVDAESLTHLKGEIKRLFINERRRRVELWINGTVKSSLMLPRINPNFIGSEEDPTCIICRQYLYLSAVSCNCRLSSYVCLEHWKHLCECSPKKHCLLYRHTLAELGDLVCEVSLVSPQRDNVMQNPHLLNDVYVPSKKVKDHYILYRQLAEDWVSNSEHILQMPFVERSYATALEEAEQFLWGDHAMDSVRNITVRLTKAMKWALGVRKCLSKIQDFLKDGCSEKVNYVEIEELVATKCAPCCEPSLTKLQAYAEEAKLLINEVNNALSSFLTVDKLETLYSRVSEFPVKLTESSTLFWELSSAKSWLKKASDCLEQNKLGIIDIDVLNKLKSEIIQLRVLLPEIDLISKLWKDVESWQTRCQLYLQDFPDLKELEGFLLAADGANFSIPELNILKQHYSNCCSWVSRAKNILRKLYATSDYHNAVEELTGILKEAELLGVKVDELPIVEKELKRSLCRKQASEALATVMPMEVVEEILKEASILHIEEEQPFDDLSRMLKEATSWEEKARLILERSASLSEFEDHMRCSEGIRVILPSKLHMKAEVDIAKLWIDKCQAYLRPGCNKLAFGDFLKVDDIKDLINQPANLKVILDTSELNSVLNNIEKWEHSSLSLLNNFRALLHLNSIGSTVDTLQRKLEELQGKMNTEIEVGLSLGFEFKVLWELKDSSLMLRWILNALSLCCMIPLLQDVDRLIEEAVHLPASLADCSLVTLLMRALSCLRKSLILLPGSGTSAKSKLEDVENILAEFKEVDVPYPIMTAKLEDAVNNHNISPPFSSWIEQCNTFFMLSDGQSWAMLQNLRDNGQSVAFDCPEMDKVVDEVKNVEEWLNQCHCTLLLDGNNSSLLSILVKIRGLLDDVCTLYAEDCMKLRLCAVCSCDIGDRLASRCVTCQDWYHGSCVENLSATTQTTIEWMCSFCSLLQSEDQLKNQLSVKMSKGNCPALAALDELISSAKGLYTGIEEINLLKEIVDKARNLNAYLMQILDDSDCYHGEDLTVIFKSLLVALKATSASGLYDDNVSCRIESVLSRYLWKKQIHKLLYGGKKSSIQEVLCLDEEGSHLEICDQDFFKLEISKIKETSLQWLAKAEEVACDSGELALDLVYGLIAEGENLSVDFEKELKLLRDRSVLYCICCKPDDNRAMIACDQCDEWYHFDCINLLGPPPESFFCPACHPNNGEESVSLARSEDDEDRSSTGAGAHTPPDRVVERDLIKLLSCHSGSSWSESRRAPHRTARRRSSFVGLL

SEQ ID NO: 13892 - protein, 536 aa, Zea mays
  VARIANT 53..536: note = Derived polymorphism lacks residues 53 to 536
MAAAAVLVVLTVSALAGAAAGGDIVHHDDEAPKIPGCSNDFILVKVQSWVNGKEGGEFVGVGARFGPKIVSKEKHANRTKLTLADPMDCCSPPKHKVPGDVLLVQRGKCKFTKKAKFAEAAGASAIVIINHVHELYKMVCEKNETDLDINIPAVLLPKDAGSALHTLLTNGNTVSVQLYSPDRPVVDTAEVFLWLMAVGTVLGASYWSAWSAREAVIEQEKLLKDGHEDLLNVEARGSSGMVDINVASAIMFVVVASCFLIMLYKLMSYWFVELLVVIFCIGGVEGLQTCLVALLSRWFKPAAESFVKVPFLGAVSHLTLAVCPFCVAFAVVWAVFRQLPFAWIGQDILGIALIVTVIQIVRVPNLKVGSVLLGCAFLYDIFWVFISKRWFHESVMIVVARGDKTDEDGVPMLLKIPRMFDPWGGYSIIGFGDILLPGLLVAFSLRYDFSAKKGLRSGYFLWAMVAYGSGLLITYVALNLMDGHGQPALLYIVPFTLGTLIALGWKRGELQNLWARGEPERVCTHMHMPLLPTTPN

SEQ ID NO: 13893 - protein, 175 aa, Zea mays
  VARIANT 161..175: note = Derived polymorphism lacks residues 161 to 175
  VARIANT 150: note = Ancestral polymorphism is T, Derived polymorphism is M
MASQRCRDCDSAVHTEYWRCAFNTLLSIVSRSTTHCRNKIHLLISERNGALLHHDCTDLRREYYDWLHSRIESSSWSRRSQEVSGEIRHEHVHLGAAQVRCAHWPQLLQRVPSVAPRHHLEDPAASSGSDGGASGGSGLGRGFLELLKATRYKMYRSRTDGVVGKNKSRERLRWE

SEQ ID NO: 13894 - protein, 586 aa, Zea mays
  VARIANT 416: note = Ancestral polymorphism is R, Derived polymorphism is W
MGSYAYKYCMCFTRKFRSPDAQPPPDVRAAHLSFASDAHALRRFVAGVQGESPADVDRILAMLSGGHSHGIARLVTRSPAASTPTLEDFLAFLFSPDLNPPIAHQVHQDMSAPFSHYFVFTGHNSYLTGNQLNSDSSDVPIVKALQGGVRVIELDMWPNPSKDNVDILHGGTLTAPVEMIKCLKSIKEYAFCASNYPLVITLEDHLTPDLQAKVATMLTETFGDLLFVPNPDPMKEFPSPASLMKRIIISTKPPQEYKEFLKAENNRSGSGNIAELPDQGSLRRIDSNADESDGKDELDEQDEEDSDSDDPKFQQDTACEYRKLITIQAGKPKGHLRDALKVDPDKVRRLSLSETQLAKATISHGAEVIRFTQKNILRVYPKGTRVNSSNYDPMNAWTHGAQMVAFNMQGHDKALRLMQGFFRANGGCGYVKKPDFLLRTGPNGEVFDPKASLPVKKTLKVKVYMGDGWRMDFSKTHFDAFSPPDFYTRVGIAGVKADSVMKKTRVIEDQWVPMWDEEFTFLLTVPELALLRVEVQEYDMSEKHDFGGQTVLPVWELKQGIRAVPLHDRKGVRYKSVRLLMRFDFV

SEQ ID NO: 13895 - protein, 506 aa, Zea mays
  VARIANT 294: note = Ancestral polymorphism is P, Derived polymorphism is L
  VARIANT 21..506: note = Derived polymorphism lacks residues 21 to 506
MASFAVSGARLGVVRPGGSARSGGERRSAVDLPSLLFRRKDAFSPCKLVVSWILSVELALEFAGTVLSCAGAPGKAFQRLGRVWRRSYLLYGPLGTGKSTFAAATARFLGYDVDLSHADAAGDDLCALLLHTTSRSLVLVEDLDRYLQGGGGDTEARVARVLSFMDGVASCCSEERVMVFTMRGGKDAVDAVVVRPGRLDVHIQFTLCDFEAFKALFSNYLGLKDHKLYPQWRSGSTVGVMKEMVNAAVDSDIQLWTLRTWRKNYFIFSDRYRGMGMDIDDMSYNFCLSCYVSPISYMICDTGLKELLSLGERIAELFSALRGRLYDNNKNLVMAILSTIGGLASAMGPSVEKSSKGILADVLKCLGDNKKHMRECTLTVIDSWVAAAQLEKMVPYIIVSLGDQKTGSEGRKDLFDWLSRHVSKMGDSSEALPLFKPSASSLMVKSSEVRKAAEYFMNEILRSCGQEVVGRNLKDLPSPTLAIVSERLKLSTVHEAFAMHVDIHDV

SEQ ID NO: 13896 - protein, 416 aa, Zea mays
  VARIANT 6: note = Ancestral polymorphism is Y, Derived polymorphism is N
  VARIANT 1: note = Ancestral polymorphism is M, Derived polymorphism is T
MDLAAYIAILSLVFLFLLRRVHGLARRDGKSRSMRRPPPSPPGAVPFLGHLHLIKKPFHATLSGLAQRHGPVFTLRLGSRDAAVVTSPACARECFTEHDVTFANRSLLPSQRLVTFDGAALGTASYGPRWRDLRRVAVVQLLSAHRVGCMSGVICGEVRAMVRRLHRAAAAAAGGSGAGGARIELKRRLFELSLSVLMEAIAETKAKRRDPDPEPDADGTTDMSPEAQEFKRVIDEVFPYVSSVLWDYLPVLRWFDVAGVRSRILAAVSRRDAFLRRLIDAERRRMADGVCGEKKSLIAVLLALQKLEPEVYTDTVITAFCSEPGRFVPERFEGGKAEGLFVAPFGMGRRKCPGERLALQTVGVALGSLIQCFHWNRVDGVEVDMSEGSGLTMPKAVPLEALCTTREAMYDVLQKI

SEQ ID NO: 13897 - protein, 125 aa, Zea mays
  VARIANT 45: note = Ancestral polymorphism is V, Derived polymorphism is M
  VARIANT 59: note = Ancestral polymorphism is P, Derived polymorphism is Q
  VARIANT 66: note = Ancestral polymorphism is A, Derived polymorphism is T
  VARIANT 78: note = Ancestral polymorphism is A, Derived polymorphism is V
  VARIANT 79: note = Ancestral polymorphism is G, Derived polymorphism is S
MATTACRDPVMNPGLKRMFTKVSVFCLLAPLSSDYSSTVTAPVCVQQQGSSWLQFFFAPMKAGAHARLLHRMLVDVAAGRVLGTAGGGGVARVSSMDTTSEAFIFLRFSLSSSGNGGGHSGCSGQ

SEQ ID NO: 13898 - protein, 586 aa, Zea mays
  VARIANT 58: note = Ancestral polymorphism is R, Derived polymorphism is C
  VARIANT 416: note = Ancestral polymorphism is R, Derived polymorphism is W
MGSYAYKYCMCFTRKFRSPDAQPPPDVRAAHLSFASDAHALRRFVAGVQGESPADVDRILAMLSGGHSHGIARLVTRSPAASTPTLEDFFAFLFSPDLNPPIAHQVHQDMSAPFSHYFVFTGHNSYLTGNQLNSDSSDVPIVKALQRGVRVIELDMWPNPSKDNVDILHGGTLTAPVEMIKCLKSIKEYAFCASNYPLVITLEDHLTSDLQAKVATMLTETFGDLLFVPNPDPMKEFPSPASLMKRIIISTKPPQEYKEFLKAENNRSGSGNIAELPDQGSLRRIDSNADESDGKDELDEQDEEDSDEDDPKFQQDTACEYRKLITIQAGKPKGHLRDALKVDPDKVRRLSLSETQLAKATISHGAEVIRFTQKNILRVYPKGTRVNSSNYDPMNAWTHGAQMVAFNMQGHDKALRLMQGFFRANGGCGYVKKPDFLLRTGPNGEVFDPKASLPVKKTLKVKVYMGDGWRMDFSKTHFDAFSPPDFYTRVGIAGVKADSVMKKTRVIEDQWVPMWDEEFTFLLTVPELALLRVEVQEYDMSEKHDFGGQTVLPVWELKQGIRAVPLHDRKGVRYKSVRLLMRFDFV

SEQ ID NO: 13899 - protein, 445 aa, Zea mays
  VARIANT 271: note = Ancestral polymorphism is L, Derived polymorphism is V
  VARIANT 28..445: note = Derived polymorphism lacks residues 28 to 445
  VARIANT 23: note = Ancestral polymorphism is R, Derived polymorphism is C
MDKAYIAALSAAALFLLHYLLGRRAGGEGKAKAKGSRRRLPPSPPAIPFLGHLHLVKAPFHGALARLAARHGPVFSMRLGTRRAVVVSSPDCARECFTEHDVNFANRPLFPSMRLASFDGAMLSVSSYGPYWRNLRRVAAVQLLSAHRVGCMAPAIEAQVRAMVRRMDRAAAAGGGGVARVQLKRRLFELSLSVLMETIAHTKTSRAEADADSDMSTEAHEFKQIVDELVPYIGTANRWDYLPVLRWFDVFGVRNKILDAVGRRDAFLGRLIDGERRRLDAGDESESKSMIAVLLTLQKSEPEVYTDTVITALCAVSASSSTIRHSLILTKYKKSCPFSQFSRQHSGLYYPPKFVPERFEGAGGKAEGRLLMPFGMGRRKCPGETLALRTVGLVLATLLQCFDWDTVDGAQVDMKASGGLTMPRAVPLEAMCRPRTAMRGVLKRL

SEQ ID NO: 13900 - protein, 1914 aa, Zea mays
  VARIANT 1792..1914: note = Derived polymorphism lacks residues 1792 to 1914
  VARIANT 1831..1914: note = Derived polymorphism lacks residues 1831 to 1914
MDPFKNNDVRPPLRELSNNTLEDECPDVSISDASIIDCTIPCDTTPGGRDDARQRRRERERVRYVTMSVEKKNELKKRRESRKKGNVMHHEYSEVCNIPANKDNNNHQNNEIEDVDDDSYRLHKNNSFEDLIGIEDPKFTPELVWSSTDAEAPHGSLCSSEGMAIPELSPTPFVPNPSQTEDVEKDSKTESPRRQRHKRHVSSGQRQTLVSRQNQKFHLAIGTNFATATRDCVMENDGDNEIDHQTVSEINNNESTGLCPFPHTESNNMTEGADIGMQHQAAPNVTTNDDVEDVLFTEDDDEAVLFEDDEDKGYLFAGQDGESGEDIDIDETQDAFTVIPDVPDPYDKVYSNIPEETYLLNNVADCDYCKAKKFQYEPPGFCCRNGQIDLAPFETPSQLRRLWECADADVRNFCDNIRFFNGHFSFTSLYCCLDNMTTNMDRGIYTFRAHGMMYHNVRSFGREAGAEQKHLELYFYDDDPSLEHRYRKCRQEQLDKDKAVIKQLVEILKGNPYSEHLRSMGHVDNIEDYHIALNLDQTLNQKLYNAPITSEVAAVWIEGSERRGQFNNSVMLHGKDRSSHGIRSYHGCYDALSYPLFFPKGELGWHANILKFNVSMDEVEAYRDQHRTRDANDDDTERPSHLCVSVRDYYCYRFQIRPGIFNPILHGKRLFQQFAVDSYIKVESSRLDFIRRNQDRLRADLYKGLVDSLHEGENRADKIGKRTMLSTSFIGGPRDMRRQYMDAMALVRKFGKPDIFLTMTCNPNWDEITRELHPMQSPQDRPDLVVRIFRAKLEELKKRLTKQHILGKIRAYVYVVEFQKRGLAHAHFLLIMQRKYKLTCPEQYDLLISAEIPDKKKYPQLYKMVIKHMMHGPCGLLNPKCQCTKGRASCKNHYPRAFSNATSQGKDSYPIYRRRDDGRKKTVRGCELDNRWVVPYNPYLLRLFNCHVNVEACGSIKAVKYLFKYIYKGHDRASVAVTDANKADGDVDEIKQYRDARWVTPPEALWRIFSFDRSQNSPPVMQLQLHLENMHMVSFHERAKVNHVVQHPGVDRSMLTAYFEANRLHEEARGILYRDFPEWYTLQQGKVWQRRKRNTGGQVGRIVSAHPAEGERFYLRLLLNHVTGATSYADLRTVDGDTLPSFREAAQRRGLLEADDTIDECLNEAAIYQMSSALRRLFATILLYCKPNDVAELWQRHLDSMSEDYHRSTQSKTHVQQMVLIDIRNILQSMGKDIKTFPLPTIIDRYDDSHVFFVDGPGGTGKTYLYKALLVELRSQDKIAVATATSSVAASILPGGRTAHSRFKIPLTIDEGAVCSFTKQSGTAKLLQKTSLIIWDEASMTKRQAIEALDNSMRDIMGRLGLPFGGKNVVFGGDFRQVLPVVRKGSRAQIVVASLRSSYLWESMCHLKLVQNMRAQSDPWFAEYLLRVGGGTEEANNDGDIRLPDEVCVPYTGNDRDLDRLIDDIYPNLNENMSNTSYITSRAILSTRNDWVDMINMRMIDRFQGEQMMYHSFDTAVDDPNNYYPSEFLNMLTPNGLPPHVLKLKVGCPIMLLRNIDPANGLCNDTRLVVRGFQKNSIDAEIVLGQYAGMRIFLPRIPLCPSDDEMFPFQFKRKQFPIRISFAMTVNKAQGQTIPNVGVYLPEPVFSHGQLNVALSRATARSKVKILVIPVTDEKKKKGVERNSAINGATYTKNIVYKEKNNVQYANLVYKEVLTPARSEDVEGHHDSSVQEPVQQVSEGDSLDDGNDDMDEQARSSQHLSSSTAEISLPPSEDSDRMSGQVENDDGLGLVQSDTPVGAADGDSTQITSTLTAFSAYGHKDPNIHTTNEAQLYGLVEPNVHPQALASSSQSGVDPHAFGNVMMPVMYQQMFQVPPKPNETVQDTSANGKSKRPRGQKLTETSQQANGTPASASG

SEQ ID NO: 13901 - protein, 404 aa, Zea mays
  VARIANT 331: note = Ancestral polymorphism is W, Derived polymorphism is R
  VARIANT 325..404: note = Derived polymorphism lacks residues 325 to 404
  VARIANT 233: note = Ancestral polymorphism is D, Derived polymorphism is H
  VARIANT 195..404: note = Derived polymorphism lacks residues 195 to 404
  VARIANT 160: note = Ancestral polymorphism is R, Derived polymorphism is G
  VARIANT 156: note = Ancestral polymorphism is R, Derived polymorphism is C
  VARIANT 143: note = Ancestral polymorphism is R, Derived polymorphism is C
  VARIANT 76: note = Ancestral polymorphism is C, Derived polymorphism is W
  VARIANT 8: note = Ancestral polymorphism is V, Derived polymorphism is A
MDKAYVAALSVAFLFLVHYLVGRAAAGGGKGRKRLPPSPLAIPFLGHLHLVKTPFHSALGRLAERHGPVFSLRMGCRRAVVVSSPECARACFTEHDMSFANRPRFESMRLVSFDGAMLSVSSYGPYWRTLRRVAAVQLLSAHRVACMSPVICAEVRAMVRRMARLAAGGAARVQLRRRLFELSLGVLMETIARTKTSRSEACAADTDVSPEASELTRISEEIMPYLGTANLWDYLPFLRWFDVFGVRNKLMAAVRWRDAFLRRLIDAERRRMDGDGDGEKKSMIAVLLSLQKSEPELYTDTMIMALCGVLKMRALSLLYVARCRWTPYSTWPSFFCKILAVFVCFCVFLLKVTRPGRELLFTVVSQDEKYKAKLCFLWLVIAFHLGRLQTNLARLQAASAPSYS

SEQ ID NO: 13902 - protein, 395 aa, Zea mays
  VARIANT 121..395: note = Derived polymorphism lacks residues 121 to 395
  VARIANT 189: note = Ancestral polymorphism is T, Derived polymorphism is A
  VARIANT 209: note = Ancestral polymorphism is R, Derived polymorphism is C
  VARIANT 322: note = Ancestral polymorphism is S, Derived polymorphism is F
  VARIANT 345..395: note = Derived polymorphism lacks residues 345 to 395
MESSPLLQLPAARVEALSLSGLSAIPPEYVRPADERAGLGDAFDLARTHANDHTAPRIPVVDISPFLDSSSQQQQRDECVEAVRAAAADWGVMHIAGHGIPAELMDRLRAAGTAFFALPVQDKEAYANDPAAGRLQGYGSRLATNTCGQREWEDYLFHLVHPDGLADHALWPAYPPDYIAATRDFGRRTRDLASTLLAILSMGLLGTDRGDALEKALTTTTTRTAADDDLLLQLKINYYPRCPQPELAVGVEAHTDVSALSFILHNGVPGLQVLHGARWVTARHEPGTIIVHVGDALEILSNGRYTSVLHRGLVNREAVRISWVVFCEPPPDSVLLHPLPELVTEGHPARFTPRTFKQHLDRKLFKKKQQHKAKAEEEDGGNGDHHRHEPPPQTN

SEQ ID NO: 13903 - protein, 128 aa, Zea mays
  VARIANT 32: note = Ancestral polymorphism is G, Derived polymorphism is R
MANAEGSCLVRCPNCLDILPEPHNVIVYKCGGCGTILRAKICASNGQHMAAKQGRQDSDSYSVATAVSNGAPPRNKERGSESSFNVDAPSFEHGNNRTGKGENGDDVLARQNAMVVHHAESKENHTVE

SEQ ID NO: 13904 - protein, 432 aa, Zea mays
  VARIANT 46: note = Ancestral polymorphism is H, Derived polymorphism is N
MAKPVSIQVWNPSGKYRVVSTKSMPGTRWIRLLTDNDCRLEICTEHKTILSVDDILALIGDRCDGVIGQLTEDWGDVLFSALKRAGGTVFSNMAVGYNNVDVEAANRNGIAIGNTPGVLTETTAELAASLSLAAARRIVEADQFMRAGLYDGWLPHLFVGNLLKGQTVGVIGAGRIGSAYARMMIEGFKMNLIYYDLYQATRLENFVTGKQECYHMGSSSKQTVRSLSPGRGPPPWRMSSGRLTWSDSAISLHPVLDKTTYHLINPERLAIMKKEAVLVNASRGPVIDEAALVEHLKANPMFRVGLDVFEDEPYMKPGLADMKNAVVVPHIASASKNLYIVAGGRPTDEMKCCLFFFSGHAREWQPCLLSTFLYGKIKGYPVWGNPNQVEPFLQENLTPPPACPSIVNAKQIGWPAIGKALGANTDRLVSTC

SEQ ID NO: 13905 - protein, 1833 aa, Zea mays
  VARIANT 732..1833: note = Derived polymorphism lacks residues 732 to 1833
  VARIANT 142..1833: note = Derived polymorphism lacks residues 142 to 1833
  VARIANT 140..1833: note = Derived polymorphism lacks residues 140 to 1833
METRSSSRKRAAAAASSSASKRPRRNSSSSSSAPPRQQPPMEPSPSSRRRSRAAAADKGKDPDPASSDHPSPPAPDDDADVTFPQPFTSASTALQGLLRRLGAGLDDLLPSSSSAPSSATSGHLKRILAGLQAHGDESRQLQSLMQLCEMLSIGTEDSLAAFPVDAFVPILVGMLGREDEPATAGASPDVMLLAARALSNLVDVLPSSCSAVVHYGAIQCFCARLLTIEYMDLAEQSLQALKKISLEHPTACLRAGALMAVLSYLDFFSTGVQRVALSTAANICRKLPSDASEFVMEAVPLLTNLLNHHDSKVLEHASVCLTRIAEAFAYYPDKLDELCNHGLVAQAASLIAVGNSSGQTSLSTSTYTGLIRLLSICASGSLLAVKTLLLLGISGTLKDILSGSALISGTSVSPAVTRPADQMFEIVSLADDLLPHIPARIIKLPTYYHTYKGSSTKKSASIKQEGGGSTGNERSGRERLLREQPELLQQFGMDLLPTMTQVYGSSVNAPIRHKCLSIIGKLMYYSSAETIQSLLGTTNISSFLAGILAWKDPQVLIPALQIAEIMMEKLPETFSKLFVREGVVHAVESLICSESSNKMPSQVPPQDKDKDSAMPSRSRRQRRRAGAVAAENSSLDESNSSNLGVMCSTATASEAPNTSLRFTVSDHAKSFKDKYFPADTDSSDIGFTDDLLKLRALCAKLNTVSENVKTKAKGKSKAISTNFLDISIDVEEQLDKIISEMLSELSKVNGVSTFEFIRSGVVIALLDYLSCGTFGKEKVSEGNLSQLRQQALRRYKTFISVALSIDHGRDETPMALLVQKLQSALSSLERFPVVLSQSSRIGIGGSRLTSGLSALAQPFKLRLSRAQGEKSLRDYSSNIVLIDPFASLASVEEFLWPRVQRSEVASKPIIPSGNNSESGVPGTTAGASLTAAMAQSGRRPTTRSKSSAAGGLTSKKDSHDESTSTAKGKGKAIVKPNSDESKGPNTRNAAHQKSASEKDLEMKQAHGHSSSEDEELDTSPVEIDDALMIDDDDISDDDDDDDDDHEVLQEGSLPICSQDGVHDVKLGDADESNIGSATFSHAQPSSGSGARNTSSRGPDSTEFRSMGTFGSRGAMSFVAATMAGLASVGGRSVRGVRDRRGLSLGGSMNDHNKLIFTAGGKQLNKHLTVYQAIQRQLMLDEDDEERFNGSDIPNDGNRFWGDVFTITYQKADNQVEKGCQGTSTSLNIKSDSYRSISEAQGVSLLDSILQGELPCDLERTNSTYNILALLRILEGLNQLSPRLRVQGASDDFAEGKINTLDELYRTGAKVPSEVFVNSKLTPKLARQMQDVLALCSGSLPSWCYQMTKACPFLFPFETRRQYFYSTAFGLSRALNRLQQQQSDNHSSGGEREVRFGRLQRQKVRVSRNRILDSAAKVMEMFSSQRAVLEVEYFGEVGTGLGPTLEFYTLLSHELQCAQLGLWRATSSYDSGLHTDMKDVIRLDPEDGSSGKELNTDLPGDGMYLIQAPLGLFPRPWPPKVDTSEGSRFFKVLEYFRLIGQVIAKVLQDGRLLDLPLSTAFYKLILGQELDLFDIVSFDSEFGKTLQELQVLVERKQFLESTSGKNQLQVADLCFHGASIEDLCLDFTLPGYPDYVLKEGEGGTIVNIYNLEEYITLVVDATVKSGIKRQVEAFRSGFNQVFDMSSLHIFSPQELDYLICGRQEIWESESLVDNIKFDHGYTAKSPAIVNLLEILSEFTPEQQHAFCQFVTGAPRLPHGGLAALSPKLTIVRKHPSSAVNTSNSTGAVESADDDLPSVMTCANYLKLPPYSTKEIMRKKLLYAILEGRGSFDLS

SEQ ID NO: 13906 - protein, 201 aa, Zea mays
  VARIANT 78: note = Ancestral polymorphism is D, Derived polymorphism is Y
  VARIANT 81..201: note = Derived polymorphism lacks residues 81 to 201
  VARIANT 121: note = Ancestral polymorphism is R, Derived polymorphism is C
MALPSPSPTYPRRRPLPRAPPQSPPLRAQERTDPPFPRPSLVPRWNRRSIHGMVLRIHLHRVATVRRGRGCPDGGDLYCGQEHACSSKHSCSSSTTSSPCALGTRQMFGVVGITVTSLVSRAAVAGVCFLAFRNEQSAGYATSAYDFLTSSPGALITVSGPGCVHRLAGLSHATTNAWSLLMISRSCDQADAGRGDFQELD

SEQ ID NO: 13907 - protein, 73 aa, Zea mays
  VARIANT 46: note = Ancestral polymorphism is D, Derived polymorphism is G
  VARIANT 12: note = Ancestral polymorphism is A, Derived polymorphism is V
MQLHRDPNVLFAGYKLPHPLQYKIIVRIHTTSQSSPTQAYTQAINGLDKELEYLKQAFEDEKNRYEDRMKQGF

SEQ ID NO: 13908 - protein, 524 aa, Zea mays
  VARIANT 475..524: note = Derived polymorphism lacks residues 475 to 524
  VARIANT 270: note = Ancestral polymorphism is R, Derived polymorphism is W
  VARIANT 244..524: note = Derived polymorphism lacks residues 244 to 524
  VARIANT 92: note = Ancestral polymorphism is T, Derived polymorphism is M
  VARIANT 74: note = Ancestral polymorphism is R, Derived polymorphism is W
MSHPITPRRATRSSAADPASPSGPRPKPTPRRQPVSTAAANAKQEEGEEHERSPVDALLEALPGRREQATDLLRLLAPAPALPLLLHGGAATGKTRALLLALRHVRPRPLRVAYAALRSLPSPRALFSSVLAQLSPPSSSSSSSRLRVPDKPSDFVAALRDALAGLSARGEAVYLVFDNLEVVRSWDKGGQLLALLLRLYDLLRLPQVVLVYVSSATPDAYYSMTGSVEPNHIYFPDYTVDEVRDILMRGHPNPKLYSSFLSVALKPLFRVTRRVDELVAALEPLFRRYCEPLGDLKAVPDESIKRRLFEHIQPHLAVAMNETFIVPTRVSVDECKDHSSRGKASSKRQFGSRDGLPTELEFHMSVSAKYLLLSAFLASRNPATLDAALFDSTGGSDNNRRKRKSSQASMNMKDTMAEEMLMKGPGTFPLERLLAIFQCITSVSEDDLGDVECSDSMMNGSGMTGLMSDVLLQLSTLCNSNFLSKSRSCPMEGSARYRSNIDEDLALKVARSVSFPLSKYIYRR

SEQ ID NO: 13909 - protein, 533 aa, Zea mays
  VARIANT 331: note = Ancestral polymorphism is P, Derived polymorphism is S
  VARIANT 481: note = Ancestral polymorphism is R, Derived polymorphism is W
MGSCVSSTRHRRRPRKLSVAARKIRRKVCTAIADAPIICGAASCLARHGVVHVEAPDSSVTLHLTKLQWQRSQTDAGNVICEEAWYDSVSILESPDSDDDLDNDFASVSGDPLPDVTGGSNAQQCKDAACFLDTMQLLRSIANAEACDRREQPDKSDDSNGEECCSSSTLKELQAAMSPRPFPASIPSNKVQPMPIAGASPHQQQQKKKTAVVRLSFRTRSYEGDEMTETMPFSGWIITSLTSPAIPGGSANYLYRPRAGFTVPCCSTGEKLSEGCWSVLEPSTFRVRGESFFKDKRKYPAPDCSPYTPIGADMFAYTRKIHHIAQHLSLPSLKTHEAFPTLLIVNIQLPTYPATVFGDNDGDGISLVLYFKLSDSFDKEISPQLQDSIKRLMNDEMEKVKGFAVDSIVPYTERLKILAGLANPEDLQLSTAERKLVQTYNQKPVLSRPQHKFYKGPNYFEIDLDVHRFSFISRKGLETLRERLRHGVLDLGLTIQAQKAEELPEHVLCCMRLNKIDFADNGHIPTLITAADE

SEQ ID NO: 13910 - protein, 132 aa, Zea mays
  VARIANT 106: note = Ancestral polymorphism is A, Derived polymorphism is V
MSRSLGIPVKLLHEAAGHVVTVELKTGEVYRGSMVECEDNWNCQLENITFTAKDGKVSQLEHVFIRGSRVRFMIIPDMLKNAPMFKRLEARIRGKGSAVGVGRGRAVAMRARAAAGRGGGPVGRGGAPPVRR

SEQ ID NO: 13911 - protein, 128 aa, Zea mays
  VARIANT 50: note = Ancestral polymorphism is P, Derived polymorphism is L
  VARIANT 42: note = Ancestral polymorphism is P, Derived polymorphism is L
  VARIANT 16: note = Ancestral polymorphism is R, Derived polymorphism is C
MTKNLCPVLVVSPGSRGEGGILRNSEGPLKDHIYLHQNHLPPEVLKERLPGISETAAIFAGVDVTKEPIPVLPTVHYNMGGIPTNYHKEVVDIKGDNPDAVIPGLMAAGEVACAAPRWWMIDRPVVCD

SEQ ID NO: 13912 - protein, 120 aa, Zea mays
  VARIANT 108..120: note = Derived polymorphism lacks residues 108 to 120
  VARIANT 61: note = Ancestral polymorphism is P, Derived polymorphism is R
  VARIANT 42: note = Ancestral polymorphism is G, Derived polymorphism is R
  VARIANT 30: note = Ancestral polymorphism is S, Derived polymorphism is L
  VARIANT 9: note = Ancestral polymorphism is T, Derived polymorphism is M
  VARIANT 2: note = Ancestral polymorphism is D, Derived polymorphism is H
MDVDSRMATESDSDARGGSGSGSDTTMASLSPSASLSPSTPGTPTIAVASPASVAGPRPAPGFAGATADVHCYDVLSNKWTRLTPLAEPPSRRAAHVATDVGTMVVIQGSFAASASWSPS

SEQ ID NO: 13913 - protein, 355 aa, Zea mays
  VARIANT 188: note = Ancestral polymorphism is S, Derived polymorphism is A
MKKATSLSELGFDAGDASSGFFRPVSGDSSTPTSQHHRRRLTKVSVIGAGNVGMAIAQTILTRDLADEIALVDAVPDKLRGEMLDLQHAAAFLPRTRLVSGTDMSVTRGSDLVIVTAGARQIQGETRLDLLQRNVALFRKIVPPLAEQSHDALLLVVSNPVDVLTYVAWKLSGFPASRVIGSGTNLDSSRFRFLLAEHLDVNAQDVQAYMVGEHGDSSVAVWSSVSVAGMPVLKSLQESHRCFDEEALEGIRRAVVDSAYEVISLKGYTSWAIGYSVASLAASLLRDQRRIHPVSVLARGFHGIPDGNDVFLSLPARLGRAGVQGVAEMELTEEEAKRLRRSAKTIWENCQLLGL

SEQ ID NO: 13914 - protein, 252 aa, Zea mays
  VARIANT 169: note = Ancestral polymorphism is A, Derived polymorphism is E
MDVDEAGGEERRPSEKELFRAAESGDAAAFASLAPADLSLRNEDGRSLLHVAAAAGHPQARKGAFYALESNMMGGNWKCGGDAAASVLNAQDEEGWAPIHSAASSGNSQIVDILLERGADVNLVTDGGRTALHYAASKGRLNIAEKLIAHGANVNKKDKFGCTPLHRAASTGNAELCEFLIEEGAEVDAVDKTGQTPLTHAVICENKGAALLLIRHGADVDVEDKEGYTALGRASNSFRPVLIDAARAMLEG

SEQ ID NO: 13915 - protein, 356 aa, Zea mays
  VARIANT 138: note = Ancestral polymorphism is L, Derived polymorphism is Q
  VARIANT 142: note = Ancestral polymorphism is I, Derived polymorphism is S
  VARIANT 144: note = Ancestral polymorphism is P, Derived polymorphism is S
  VARIANT 157: note = Ancestral polymorphism is V, Derived polymorphism is A
  VARIANT 159: note = Ancestral polymorphism is S, Derived polymorphism is F
  VARIANT 170: note = Ancestral polymorphism is W, Derived polymorphism is S
  VARIANT 172: note = Ancestral polymorphism is L, Derived polymorphism is R
MMKKASSLSELGFDANGASSGFFRPVTDGGVTPTSPHHRRRLTKVSVIGAGNVGMAIAQTILTRDLADEIALVDALPDKLRGEMLDLQHAAAFLPRTRLVSGTDMSVTRGSDLAIVTAGARQIPGETRLDLLQRNVALFRKIVPPLAEQSPDALLLVVSNPVDVLTHVAWKLSGFPATRVIGSGTNLDSSRFRFLLAEHLGANAQDVQAYMVGEHGDSSVAVWSTVSVAGMPVLKTLRDSHSSFGEEALEGIRRAVVDSAYEVIGLKGYTSWAIGYSVANLVSSLLRDQRRIHPVSVLAAGFHGIPDDQEVFLSLPARLGRAGILGVADMELTEEEARRLRRSAKTLWENTQLLGL

SEQ ID NO: 13916 - protein, 502 aa, Zea mays
  VARIANT 121: note = Ancestral polymorphism is Q, Derived polymorphism is K
  VARIANT 139: note = Ancestral polymorphism is E, Derived polymorphism is K
  VARIANT 158: note = Ancestral polymorphism is E, Derived polymorphism is K
  VARIANT 175: note = Ancestral polymorphism is R, Derived polymorphism is M
MSGDGDGDVRGLEATAAAAAEATRELQEAAAALVATRAAEEDALRRSVVALDTDVRRLQGSLHLDPSTLDKMPMKLQQQESAVEQQQGGEEKLPENLLLYFEQILHDDPLIDEVGFLHPTQFCSLDCARDGDSASQSTEFHCARYFWCRDHKLAISAEILPELYHAARDAYYNARDAPLSRTNLMRHTKALLILCPDLLTAWNSRKMVLSALYDFTKLKDELQLCALILSYSPKNESTWSHRRWVIKQVAEQHQDMLELIGNESILVKEIAEKSKMNYRAWRHRCWLIPYMTRKQVLDELNESTRWSELHVADNCCFHYRRSLLLALLDNFFGNEEDSLSWESDICLLWKEELRWDEMLIKRYQGRESLWNHRRFLSHLWIQHLLTVEGNWPATTSQMDMFVIQEIQLLSECLHDPVDEFEESRVQAELSALYIMWITKAISSWFYPASCLSQVPDVKGKLEERLHFASMGRLKDVLAGACRPEKRFWMNLLNLADQSSDVQ

SEQ ID NO: 13917 - protein, 413 aa, Zea mays
  VARIANT 201: note = Ancestral polymorphism is S, Derived polymorphism is I
  VARIANT 288: note = Ancestral polymorphism is A, Derived polymorphism is T
  VARIANT 362: note = Ancestral polymorphism is S, Derived polymorphism is F
MDMISSCPICNIQVLTVELEWHANSHFDDDQLQRDIELAHQIAVAESSTDTMNDPKHYSGSFTSDSNTIGASSSHSGYSHHYSELLDEQISCMVRAQIRSKVQEVEGGIMSLLRSCLESEAGSSKSMISGYIDHHQSLSSEDKGWGCGWRNIQMLSSHLLKQRQEAREVLFGGSGFVPDIPSLQRWLEIAWDKKFDTIGSSHFHNKVYGAKKWIGTTECATLFRSFGLRAKIVDFDSTESSDLQSKNSSHAASQVRGLMDKFLIKSNSPKSSSEFCQEDAESMRGQHALVDWVWNYFACERSDRLTTQRATVSNKTPLYFQHQGHSRTIVGIQKEMVHRGSQEQYTLLILDPGHRTADLERSLRSKNGWQRLVKRGVHTLRKPQYQLCYVDPGIASSEEMEQLKTIDSMLVRF

SEQ ID NO: 13918 - protein, 360 aa, Zea mays
  VARIANT 307..360: note = Derived polymorphism lacks residues 307 to 360
MSGDGDARGLEAAAATAAEAARELREAAAALVATRAAEEDALRRRAVALEADVRRLQASLHALDPSTLDKVEEELERARVAITDSDVASFLPSKRNGKFLKTFLGPVNVRVARKEDKLKIKDEYNNYRDRTAYKFLLFPSILLLLRWWIWDGCLPALAVQIYQAWLLYLYTSFALRENVLIANGSDIRPWWIYHHYLAMLMALISLTWEIKGQPDCSSKQRGVQLFLRWAIMQGIAMHLQNRYQRQRLRTRIALGKVNLTSLPINKAKRMDVVAGETAGVEGQLLLLYPVLFILQGFEAYVGVLLLQTALHGLASEWQARMIQQLSLLTVECLSLRDLAGGYGSRQLCPHYGDTGTETEV

SEQ ID NO: 13919 - protein, 547 aa, Zea mays
  VARIANT 362: note = Ancestral polymorphism is F, Derived polymorphism is S
MEAEEVAWICHLALPRLTLDLLPRLVVATCYTGGRRTSSAFLLLSRSRGGRSTVHLARRPKQPMSSSGPSPATGIHASPPLGLLPATGTHHTRSWGKTTSTSFTGSTTKHEQSLHGNVKPLQLAANESSRLAYRSPALKNQWNLPASSSSTNVVTTFDDNEHVSSSVIEEKVGVLLLNLGGPETLDDVQPFLFNLFADPDIIRLPRLFRFLQRPLAKLISTFRAPKSKEGYASIGGGSPLRKITDEQANALKIALEKKKLNANIYVGMRYWYPFTEEAIDQIKKDKITKLVVLPLYPQYSISTSGSSIRVLQDIVKEDSYFSGLPISIIESWYQRDGYVKSMSDLIEKELSAFSNPEEVMIFFSAHGVPLTYVEDAGDPYRDQMEDCIALIMGELRSRGILNSHTLAYQSRVGPVQWLKPYTDEVLVELGQKGVKSLLAVPVSFVSEHIETLEEIDMEYKELALESGIKNWGRVPALGCTSTFISDLADAVVEALPSASALATRKPDDIDSSMDLTHYLTKMLFGSILAFVLLLSPRLVSAFRSTML

SEQ ID NO: 13920 - protein, 180 aa, Zea mays
  VARIANT 164: note = Ancestral polymorphism is T, Derived polymorphism is A
  VARIANT 163: note = Ancestral polymorphism is A, Derived polymorphism is S
  VARIANT 29..180: note = Derived polymorphism lacks residues 29 to 180
MLVYQDLLSGDELLSDSFTYKELENGVLWEVEGKARTSMLVHECNLEWVTQGPVDVDIGANPSAEGGEDESVDDTAVKVVDIVDTFRLQEQPPFDKKSFVSYIKKYIKNLTAVLEPEKADEFKKGVEGATKFLLSKLKDLQFFVGESMKDEASVVFAYYKDGATNPTFLYFSHGLKEIKC

SEQ ID NO: 13921 - protein, 649 aa, Zea mays
  VARIANT 314..649: note = Derived polymorphism lacks residues 314 to 649
MGSGGIRNARPSSWLAAVAAAAAPPIAHAVLLTSGHLSSRASANSLLRVAPCSSACALILRLLLLHRLRPDHISLSFSLHACARVVPTTSRYPLTVTGLLHSLALRLGHARDVYVANAAVSSYFAASDVASADRLFAEVSTDVADVVTWTTMVTGHASAGGLGRARHFFDAMSERNVVSWNAMLSAYARAGMLTEARDLFDAMPTRNAATWSCMISGLVLSGRCWEALGLFGDMVHSSGIVPNEPALVSVVSACAQMRSLEHGAWVHAYAEQELQGAMSVVLASAIIDMYGKCGGIHSAIRVFAAMPMRNIYSWNAMITGLAMNGGERQALSLLWKMQMVGVQPNDITFIGLLSACTHSGLVNEGRRLFDSMIEDFGIQPFPQHYGLMVDLIGRSGRVMEALYFVKSMPVEPHPGLWGALASACKMHGKVELGEEVAKKLIELEPRHGSRYILLSNLYGSVNRWDDMASVRKILKRRKVPKGTGNAVVGMTSASCIGSKPSYLGVQKSPPSLALCPATNNCVSTSEEISDSNHYAPPWNYNPKDGRSGKPITKEEAMKELIEVVTKTKPDNFTPRIVEKKDDYIRVEYESPIFGFVDDVEFWFPPGNKTMVQYRSASRSGFIDFNANKKRVKELRLALEKKGWASESNF

SEQ ID NO: 13922 - protein, 167 aa, Zea mays
  VARIANT 104: note = Ancestral polymorphism is E, Derived polymorphism is K
  VARIANT 29..167: note = Derived polymorphism lacks residues 29 to 167
MLVYQDLLSGDELLSDSFTYKELENGVLWEVEGKWVTQGPVDVDIGANPSAEGGEDESVDDTAVKVVDIVDTFRLQEQPPFDKKSFVSYIKKYIKNLTAVLEPEKADEFKKGVEGATKFLLSKLKDLQFFVGESMKDDASVVFAYYKDGATNPTFLYFSHGLKEIKC

SEQ ID NO: 13923 - protein, 507 aa, Zea mays
  VARIANT 212: note = Ancestral polymorphism is T, Derived polymorphism is I
METRLFLLCATTVAIALVSVLLVLVARGRKPSAGRLPPGPPALLFLAKFLALRRSIFDLAPLLRDLHARYGPVISVRLARTLVFVADRRLAHRLLVQGGATFADRPPPVDPNSLFSAGGQALQPARVALFAPARRWACDGLVDNLLRRSRRSDAGAGAGAAGDDATTVTLRPFLRRAMFELLVYMCFGVRLGQDTLDEIEGLQHRALLTLTTFPIFAFFPAVTKRLFRSRWEANVAVRRRQDDLFVPLIHAKATRGNDDGDTSASPPSYADTLRALRVPEEGDRPLTDAEMVSLCSEFLNGGTDTTVTLVEWIMAELVNHPDVQAKVHEEVIRSPSSSKLADHGGDDIQVGQAMPYLKAVVLEGLRLHPPGHFVLPHGVQTDGADVGGYTVPRGAELNFLVAEIGRDETVWTKAREFRPDRFLDGGEGCGVDITGSREIKMMPFGAGRRMCPGYSLGVHHAEYFVARMVRDLEWRPPVDGVAVEIAEALDFTVVMKQPLRARIIARY

SEQ ID NO: 13924 - protein, 427 aa, Zea mays
  VARIANT 318..427: note = Derived polymorphism lacks residues 318 to 427
MAAAEPPPPSGMGFFGMLSFRRSATAVASFDPAQDDELLALDALQSHVAARLQALSAHATPGPGSPSLLTLPFLSELLDAVVSSDDAFRGVLALAPVAAAIARPPADRLAGDLLDRAVKTLDVLNAASLTLTTVRAAHRAALAAASCLLLAPSLHTAHLARARRAISRLFPADDASAKACGGSAASPSSRTMRALSFSVSKNWSAGRHMTAMAAHLAPLPHPLSPAAAAPGAGCGLGLALYTMSSVLVFAMWALVGAVPCQDRASGATGPPVAPPKQAQWAAPMSALQERIAEEWRRKEKKGSCSGSAPTSGLLAEMQAVERAARELNSVLEEIAEEEEEEEDDERRQGIVGEERARDVTERAEELAAACRTLEDGLAPLERQVRAVFHRVVACRAEVVRCMELSARAGTANAASASGVPPPHQHSF

SEQ ID NO: 13925 - protein, 642 aa, Zea mays
  VARIANT 490..642: note = Derived polymorphism lacks residues 490 to 642
MPSPSLLLRAPPLCPSPSHPPRRFAPPSLITSSPPARLLPLRLPSAASRHTPRAGDTRVPDDLIPIARCYEGRLARLELAGAARREQAVAAAAAAGGGASAEDHLAAGSDAMVVEAFLPGPHGGGTTASSTRVILQAKEVKDKASKIEKQFGSDFFFANQPDSESMLAMAFKQVVIQRLSNFRLEVFPPGSERDFQDFGKPRKGSLDCSISSSDGKLLSSLAEAIFSCVIEDVRKNHFGSIGSFFQKRQLNCSMDSSVCIHKTSEAEVVKNAKRCLEIVSLMKSSHEVRETKNGWWPPPHHESLVKIGGPELVLWANEYIPTYKLQINANALENSNLEVEGLYELESNRREVLLTHSQLVELGNVLDMYFEDQFTLPGKTFHPYWNPDLSKIKKNNGYLNNLFTFLAGTCIFLFVTIFAQLCWPQSFRDKRLFKESSNASLSQNYCSDIKSLYNSEVQAYCMSLVKKMKDSYGCPGDVMVDSHIGAWVGELPNCFKAISSEDAAASGSFQYPDTLSQENQSQPVPVNTKMSHLEQNDRTQEFPLQNIASFQVVMSEEGKVVGFQPTNLPAVNHWATNPLATLLYQGRSLSPGIIEPRLKISRPAKAAPIELLMSVNQDSFFALARPVEDPSELPQIDSTARL

SEQ ID NO: 13926 - protein, 261 aa, Zea mays
  VARIANT 154..261: note = Derived polymorphism lacks residues 154 to 261
  VARIANT 38: note = Ancestral polymorphism is S, Derived polymorphism is T
MDPPTTTLAPLILPDVATATTTNDLALPNYPPDSLWSSWSLDYDDIWPLKPSSSYSLETVTRSSTDHAVESLGADNAALRLNNSVTSTAAANTSTRATPYLDLLAPPVRQLRQECNYYNSGLPVWSPEKFPSEHLLLTPSALGGNQDQDTPPQQEAATAMAVMLKQVSRASPDVKARQTKLQKRQEAKQRYMEKRKNRRYGKTIMYASRKARANTRNRVKGRFAKASSGSGGSHGDGDQSTQHCYGHGGDEDDHSTVYTRS

SEQ ID NO: 13927 - protein, 128 aa, Zea mays
  VARIANT 49: note = Ancestral polymorphism is A, Derived polymorphism is T
  VARIANT 1: note = Ancestral polymorphism is M, Derived polymorphism is T
MLPDDDGGGVPCDNCAAQRALLHCAQLGTRLCLPCDVPVHAAAAFHERAPLCERCHAAAAAARCAVHRASFCAPCARAAGCDAESHARCPTRFYTGFPDPADLARILYVDVPPVDVPPLPPPPQPNLA

SEQ ID NO: 13928 - protein, 474 aa, Zea mays
  VARIANT 303: note = Ancestral polymorphism is G, Derived polymorphism is D
MALESWLTKVRSAMSSASGGSGAPSRPRKQSTVGILAFEVASLMSKLLQLWRAVGDAAVARLRHETMNLHGVRKMVSDDDDFLVGLARAELVDTLRAASDSVTALAARCADPSLRDFRDAFLELADTGRDRHRWTAPSWKEMDARASRMGKQVATTAALRRAMEELAEAEHGLRKLVVLQCAANSLSASKISAASEQQQVVFSKRQEVKHLKQTSLWGSTFDAVVASLARAAFTTLARIKAVFGAGREQRHPPLYRSLTLSSAVHPSGDARSPPSRKSMSMEEVLLFDVDNQPSFAPKRQVRGGGFLEDSSAALTPPAGTLGAAALSPRYAGLVISIERMARSPLLVGPEERDELYGMLTASVRAQLRARLRGAVPAADPGLAGQWCAALAGILEWLAPMAHATVRWQAERSLEQRGGSGNGSVLLLQTLQFAERDKVDAAVVELLVGLNYVWRFEKEMSCRAMLASPARPPVR

SEQ ID NO: 13929 - protein, 94 aa, Zea mays
  VARIANT 27: note = Ancestral polymorphism is F, Derived polymorphism is I
MGKGTGSFGKRRNKTHTLCIRCGRRSFHLQKSTCSSCGYPAARIRKYNWSVKAIRRKTTGTGRMRYMRHVPRRFKSNFREGTEAAPKKSAAAAN

SEQ ID NO: 13930 - protein, 135 aa, Zea mays
  VARIANT 3..135: note = Derived polymorphism lacks residues 3 to 135
MSEYKNVVGGRLKLKGKALDVKEGGVKKKKKKHQLEESSQIEHDELHKGGNSGLPADHNNELIEAGKVGDEERNLHPDYDHLTPAERRYIDQKQKIDMQKLAKVANKSHRDRIQDFNQYLANLSEHYDIPKVGPG

SEQ ID NO: 13931 - protein, 489 aa, Zea mays
  VARIANT 28: note = Ancestral polymorphism is S, Derived polymorphism is P
  VARIANT 406..489: note = Derived polymorphism lacks residues 406 to 489
MGTPTAAPHVMVLPFPAQGHVTPLMELSHRLVDRGFQVTFVSTEPVHALVLDAMRSSSPGPAGDGSAQLNGIRLASVPDGLADGADRRDLSRFLDALSLCVPGHVERLIRETKVEWLVGDVNMGVCFQAARKLGVRVAAVFPASAACLGTLFKVPQLIEEGYFCDKGLRSKCIDLAATLKLTHLSVQQINAGFPKRHGLFELAPGMPPMCPSQMPWSIDGDVAGQEVAYQLVTRNTQAARVHAEVIVCNSFRDAEAAALELFPSILPIGPLFADEELMRPVAQMLPEDTGCLPWLDARADGSVVYIAFGSFAIVNPRQFEELALGLERTGRPFLWVVRPGFTAGNELSKQAWFDEFQCRVAGRGMVVSWCPQQKVLAHRAVACFVSHCGWNSTMEGVRNGARFLCWPYFVDQFANRSYVCDIWRTGLAVSPGEDGVVTKEEVSSKVDRVAGDEGIADRARVLKDAACRCVAEGGSSHENFNRFVHLLRG

SEQ ID NO: 13932 - protein, 565 aa, Zea mays
  VARIANT 7: note = Ancestral polymorphism is R, Derived polymorphism is H
  VARIANT 29: note = Ancestral polymorphism is S, Derived polymorphism is P
  VARIANT 34: note = Ancestral polymorphism is P, Derived polymorphism is T
  VARIANT 534: note = Ancestral polymorphism is S, Derived polymorphism is F
MMSHRRRSRAAGSPPSDASTGTAPTPEKSGWIRPWAATGSDLKVLELALAFRAANALLVRTYFNPDEHWQCLEVAHRVAFGYGHLTWEWKRGLRSYLHPLIFAALYKTLALLHLDTPWVMVMAPRLVQSLFAAFGDLYLYKLSKLIFNGQVAKWTVSLNSFMYLYNFLRELFSQLVNWFMFFCITRTLSNSLETVLTVAGLYYWFAAIESSKATSIVSKQHAACEQSIPSRKVALLIAALSCAIRPTSAVTWLYVSLLDFIQMKSKCCFILLDVIPVGAIVLAVTTLLDWWMYGSWVIVPLNFLKFNLLSSGGDYYGTHVFHWYFTQGFPSMIWTFLPFALCGIVKSQEWRLSGLIAWVLGVYSILGHKEFRFVLPVLPLALMFSGYCLASMSRSKGKNQHRKDSLSRMQPFVILLVITNVPMALYMSLFHQRGTEDAMYYLSKEAHDGRVRSVLFLMPCHSTPYYSTLHYNLPMRFLDCTPSDSKGTLDESDRFLTSPSEFVGEVFGNLSAFSHIVIFESEERHVLQLLLHNSFLEMRRFFHSHFKVDRDLQSAVVVYSRRNVL

SEQ ID NO: 13933 - protein, 188 aa, Zea mays
  VARIANT 136..188: note = Ancestral polymorphism lacks residues 136 to 188
  VARIANT 102: note = Ancestral polymorphism is P, Derived polymorphism is S
  VARIANT 97: note = Ancestral polymorphism is E, Derived polymorphism is K
  VARIANT 10..188: note = Derived polymorphism lacks residues 10 to 188
MPSVVEDCSQTSSTRELEDSSIHHAAASVVLESKTTSVHGSLSITHNNSSKVVDSLPDISFKPSNRPGSTTKNLATSLKKMVRQQTAPKVVRHYLSKLSLFPYELFVKLYSKVELHPFGLHNLGNSCYANAVFSVLCLLDHSQHIFWKGFTQTTVLKMDGASCVNLKNSLWRANCARLPCHRLEYSFE

SEQ ID NO: 13934 - protein, 150 aa, Zea mays
  VARIANT 6: note = Ancestral polymorphism is R, Derived polymorphism is W
  VARIANT 13: note = Ancestral polymorphism is P, Derived polymorphism is T
  VARIANT 20: note = Ancestral polymorphism is A, Derived polymorphism is V
  VARIANT 27: note = Ancestral polymorphism is E, Derived polymorphism is D
  VARIANT 44: note = Ancestral polymorphism is N, Derived polymorphism is I
  VARIANT 63: note = Ancestral polymorphism is R, Derived polymorphism is M
  VARIANT 125: note = Ancestral polymorphism is D, Derived polymorphism is Y
  VARIANT 137..150: note = Derived polymorphism lacks residues 137 to 150
MYVATRGLFRLCPPTIFVPACLRDFVERLFEVHRAMDQSELNHNLVPLEVGEEYELRRDLKVRAFRTYHAIPSQGYVIYSVKQKLKQEFIGLPGSEIKRLKLSGVEITNTVSTPEIAFIGDTTADFILDPDNADVLQAKILVVEVFCHHL

SEQ ID NO: 13935 - protein, 516 aa, Zea mays
  VARIANT 339: note = Ancestral polymorphism is G, Derived polymorphism is W
MAKMAMASSRLPALLCLAAVAVAVAAEAAAAAGEGGLRLPRDATFPAAQAERLIRALNLLPKEKEAGPAAGGGDGPSVAPGELLERRVRLPGAPAGVGDLGHHAGYFRLPHTHDARMFYFFFESRGKKKEDDPVVIWLTGGPGCSSELAVFYENGPFTIANNMSLVWNKFGWDTISNIIFVDQPTGTGFSYSSDDRDTRHDEIGVSNDLYDFLQVFFKKHPEFAKNDFFITGESYAGHYIPAFASRVHQGNKANEGIHINLKGFAIGNGLTDPEIQYKAYTDYALEMNLITKSDYERINRFIPPCEFAIKMCGTDGKASCMAAYMVCNNIFNSIMKLVGTKNYYDVRKECEGKLCYDFSNLERFFGDKAVKEALGVGDIDFVSCSTTVYEAMLTDWMRNLEVGIPALLEDGINVLIYAGEYDLICNWLGNSRWVHSMEWSGQKDFVSSCDSPFVVDGAEAGVLKSHGPLSFLKVHNAGHMVPMDQPKAALEMLRRFTQGKLKQEPLPETMALKAAM

SEQ ID NO: 13936 - protein, 303 aa, Zea mays
  VARIANT 46: note = Ancestral polymorphism is A, Derived polymorphism is S
MRALLADGGMALAVSPEANESSGGAAVSLGPLSWASECHGVLYNLALMLPSLAFVGFLAWQARRSFRRLSYGRSHVVVVAYYALLWAVAVLNLLWCFLQAWQCMPDRAFSWNILSLFTKSGMLFLEVSLIAFLLQGNDASGFESLARTFVISGAVVAADVLLKTIYVFGFGVPLFIDTDQGTSGKWGLWILHKLVLTGVYGLIVFMHHSRWRDRLPAKPAYYNYVCVMLLLNGISLFGCFLIASGAGFGLWLYNLTTVCYHSLYLPLLYVTFLADFFQEEDMLLENVYYSEMKDAGFFDADWD

SEQ ID NO: 13937 - protein, 515 aa, Zea mays
  VARIANT 189: note = Ancestral polymorphism is P, Derived polymorphism is T
MAARFPPVSSYDASARVRRTAAADLDGTLLASSSAFPYYFLVALEAGSCARALLLLLAAPLLLALYTLVSEAAAIALLAFVTFAGLRVRDVEAVARGVLPRHYAAGVRADTWAVFRDCGAARRVVVTASPAVMVADFVREFLGAELAATELETCRALGDAWFTGRIKAVLVGERKAEVVRRLFAAGDLPDVGLGDRESDHDFMAICKEAYMVPPDRRAPRAAADALLSRAVFHDGRLVRRPDPAHALFALAYLPLGFLLALFRVLFNLAMPARLVRHTYRLTGIRLRVRGTPPPAPAPGAPGSLLVCNHRTALDPIIVSVALGRPVACVTYSVSRLSTAVSPVRAVALSRDRAADAARIAALLAEGDVVVCPEGTTCREPCLLRFSALFAELTDRIVPVALDARQGTYYGSTARGWKWLDPYFFYMNPRPGYDVTFLPPLRPEETCGAGGRSAVDVANHVQTLIAKELGFRCTKLTRKDKYMKLAGNDGTVGGRPENEKGAADDSAATATTKKLV

SEQ ID NO: 13938 - protein, 363 aa, Zea mays
  VARIANT 93..363: note = Derived polymorphism lacks residues 93 to 363
  VARIANT 89: note = Ancestral polymorphism is G, Derived polymorphism is D
  VARIANT 79: note = Ancestral polymorphism is S, Derived polymorphism is P
  VARIANT 78: note = Ancestral polymorphism is E, Derived polymorphism is G
  VARIANT 70: note = Ancestral polymorphism is C, Derived polymorphism is W
  VARIANT 52: note = Ancestral polymorphism is R, Derived polymorphism is K
  VARIANT 34: note = Ancestral polymorphism is E, Derived polymorphism is V
  VARIANT 29: note = Ancestral polymorphism is H, Derived polymorphism is L
  VARIANT 26: note = Ancestral polymorphism is P, Derived polymorphism is A
  VARIANT 23: note = Ancestral polymorphism is A, Derived polymorphism is T
MINHHEIVQFGKLYNRDMESAPAHTPLIHGLPDEVALICLARVPRRYHNILRRVSRRWRALLCSEEWHLCRKRNNLDEPWIYVICREAGIKCYVLAPDPPSRCFRIMHVIEPPCSGRKGVTIEALDKKLFLLGGCSSVYDATDEVYCYDASSNRWSSAAPMPTARCYFVSASLKEKLYITDGYGLTDKSPNSWDIYDPATDSWCTHKNPLLTPDIVKFVALGEELVTIHRAAWHRMYFAGVYDPLERTWRGRGNEIALCYSSPTVVVDGTLYMLEQSMGTKLMVWREDAKEWAMLGRLSDKVTRPPCALVAIGRKIHVVGRGLSMVTVDVDTAARVDGFLVTTSVGPLVEEDLTPERCVVITI

SEQ ID NO: 13939 - protein, 224 aa, Zea mays
  VARIANT 2: note = Ancestral polymorphism is A, Derived polymorphism is V
  VARIANT 6: note = Ancestral polymorphism is H, Derived polymorphism is N
MADAAHVFLLVAVAAALAGRSDGAWCVCRPELADSALQKALDYACGAGADCKPILQSGACFAPDTVKAHCSYAVNSFYQRNSQNPQACVFSGTATLSNSDPSGNGCTYPATPREARGQVPPKPVPFETLHGGSAIRFLVSVYATAQNIYDMTKEVGQGSGSERMGGAAATTSNSSPGVYSPPTMGPTALNDNSAAASVLPVAGLTTVRLLILASCSLVALCIGA

SEQ ID NO: 13940 - protein, 259 aa, Zea mays
  VARIANT 218..259: note = Derived polymorphism lacks residues 218 to 259
  VARIANT 200: note = Ancestral polymorphism is S, Derived polymorphism is L
  VARIANT 192: note = Ancestral polymorphism is E, Derived polymorphism is D
  VARIANT 178: note = Ancestral polymorphism is V, Derived polymorphism is A
  VARIANT 159..259: note = Derived polymorphism lacks residues 159 to 259
  VARIANT 138..259: note = Derived polymorphism lacks residues 138 to 259
  VARIANT 137: note = Ancestral polymorphism is S, Derived polymorphism is F
  VARIANT 40: note = Ancestral polymorphism is D, Derived polymorphism is Y
  VARIANT 30..259: note = Derived polymorphism lacks residues 30 to 259
  VARIANT 7: note = Ancestral polymorphism is P, Derived polymorphism is L
MCFMMDPALGRKTCYVQFPRRFDGIDLHDRYANRNIVFFDINMKGLDGIQGPVYVGTGCCFNRQALYGYDPILTEADLEPNIVIKSCCGRRKKKNKSYMDSQSRIMKRTESSAPIFNMEDIEEGIEGYEDERSVLMSQRKLEKRFGQSPIFIASTFMTQGGIPPSTNPASLLKEAIHVIGCGYEDKTEWGKEVLRWALGSVEILLSRHCPIWYGYNGRLKLLERLAYINTIVYPITSIPLIAYCVLPAICLLTNKFIIP

SEQ ID NO: 13941 - protein, 570 aa, Zea mays
  VARIANT 345..570: note = Derived polymorphism lacks residues 345 to 570
MEAWPPLAPAAATPACALAWGAAATAQRKAVEQESAAQAVSRIVASCANSSGVAVAVVDANAVISGGSALSTSAGRLVTVPEVLEEVRDATARRRLGLLPVPVETVEPAPEFVKKVTKFARETGDIQTLSDVDIKIIALAYMLEAEIHGTSHLREHPPPLHEVNVRKLSEAQMPGWGSNVPNLKEWEELDQMSEAGGDINSRILPLKDIESQDILMCDTNSLCGAQEDTELQPSKKDAPVAWEDDENNVGWMPAVSRSMHRRYLQRKARRDALKESGQSFETSSVVPSIDDDKVLSENSGLEHGLTSTDGLSSVTEIISARSDDFEHQAENDTEIAGEHLHSDQRAYGDDADACTKELENLDIEGEDEGGGDAHFIVDESSEQSWTLRSLSESTVACVTSDYAMQNVILLIGLRLIAPGGMQIRQMHRWVLRCHACYKVTQEVGKIFCPKCGNGGTLRKVSVTVGENGITMASRRPRVTLRGTKFSLPMPQGGRDAITKNPILREDQLPQKVLHPKLKKSNKDDDFLGVVDIFSHGGDKKAPLKPPVRKALAMFSGKRNPNDNHFSRKKY

SEQ ID NO: 13942 - protein, 206 aa, Zea mays
  VARIANT 44: note = Ancestral polymorphism is E, Derived polymorphism is G
  VARIANT 26: note = Ancestral polymorphism is S, Derived polymorphism is A
MVSGSGVCAKRIVVDARHHMLGRLSSIIAKELLNGQKVVVVRCEEICMSGGLVRQKMKYLRFLRKRMNTKPSHGPIHFRAPSKILWRTIRGMIPHKTKRGEAALARLKTYEGVPPPYDKTKRLVIPDALKVLRLQPGHKYCLLGELSKEVGWNYHDTIRELEEKRKEKAKVAYERRKQLAKLRLKAEATAEEKLGSQLDILTPIKY

SEQ ID NO: 13943 - protein, 367 aa, Zea mays
  VARIANT 61..367: note = Derived polymorphism lacks residues 61 to 367
MAFDFTPRATPPHRVGTLPVFVSSRWCSSLPRGLLPPHGVDLDRRRLKPPRLATATPPAVWIRSWGGRPATARSNGGADLAVFEQFERTIQSVARYVSIHNGLSIVYAWSQGVNHAIIRHANKTSYNCFPAIIRHNQPEVWAFCLGNGYAGLKDALGSNDSRLQSTLSVPNYISHACRQPGCYFSETLKPISEEHQTRVGELGVFGCRYGLRIAPVFFNGQSLTRSHKHNKRRTLTTVPSPRATMADLLLLLNNGNPLWVVKLFLVSERYDRDLNSLKLSGIPPHELVPCKIQCPQLGAHTDARSYSATQIVGSNIKSIKLRQQAGVDSNLTRERVVPQADYPQQWTTLQGSGQLTVQPIGGQVYGL

SEQ ID NO: 13944 - protein, 449 aa, Zea mays
  VARIANT 38: note = Ancestral polymorphism is G, Derived polymorphism is D
  VARIANT 52: note = Ancestral polymorphism is D, Derived polymorphism is G
  VARIANT 53..449: note = Derived polymorphism lacks residues 53 to 449
  VARIANT 210..449: note = Derived polymorphism lacks residues 210 to 449
  VARIANT 242: note = Ancestral polymorphism is C, Derived polymorphism is Y
  VARIANT 250..449: note = Derived polymorphism lacks residues 250 to 449
  VARIANT 289: note = Ancestral polymorphism is P, Derived polymorphism is L
  VARIANT 293: note = Ancestral polymorphism is H, Derived polymorphism is N
  VARIANT 298: note = Ancestral polymorphism is L, Derived polymorphism is F
  VARIANT 304..449: note = Derived polymorphism lacks residues 304 to 449
  VARIANT 309: note = Ancestral polymorphism is T, Derived polymorphism is I
MAAGGRSIACFAAVLLAAALLLSAPTTTEAYDSLDPNGNITIKWDIMQWTPDGYVAVVTMFNYQQFRHIGAPGWQLGWTWAKKEVIWSMVGAQTTEQGDCSKFKGNTPHCCKKDPTIVDLLPGTPYNMQIANCCKAGVINTFNQDPANAASSFQISVGLAGTTNKTVKVPKNFTLKTPGPGYTCGRAIVGRPTKFFSADGRRVTQALMTWNVTCTYSQFLAQKTPSCCVSLSSFYNDTIVNCPTCSCGCQNPSGSNCVNEDSPNLQAAIDGPGKWTGQPLVQCTSHMCPIRIHWHVKLNYKEYWRVKITITNFNFRMNYTQWNLVAQHPNFDNITQLFSFNYKPLTPYGGGINDTAMFWGVKFYNDLLMQAGKLGNVQSELLLRKDSRTFTFEKGWAFPRRVYFNGDNCVMPSPENYPWLPNASPLTKQALTLPLLIFWVALAVLLAYA

SEQ ID NO: 13945 - protein, 150 aa, Zea mays
  VARIANT 132: note = Ancestral polymorphism is P, Derived polymorphism is L
MPTLTKLYSMKEAALHNTPDDCWVVVDGKIYDVTKYLEDHPGGADVLLEATGAASLVHFSCTYYPCGKDATEEFDDAGHSKSAKELMQDYFVGELDSDPTPEIPEMEVFRKEQDTGFARKLMDDVVQYWSIPAAVIGISAVVAILYARRK

SEQ ID NO: 13946 - protein, 134 aa, Zea mays
  VARIANT 54: note = Ancestral polymorphism is Q, Derived polymorphism is K
  VARIANT 33: note = Ancestral polymorphism is P, Derived polymorphism is S
MLYTDFDLLTDFPEPTLDFLADIPEEKLLLPFPAGSPEECPFDTEVALPTRWQKVDDFFQDITELFQIDPLPVVQPAIETRDVSLCNRTQRRSTPFRLHARGVRDREQQPRYGKQVATASIAVAATTTNCFCER

SEQ ID NO: 13947 - protein, 439 aa, Zea mays
  VARIANT 13: note = Ancestral polymorphism is A, Derived polymorphism is D
  VARIANT 360: note = Ancestral polymorphism is L, Derived polymorphism is S
  VARIANT 384: note = Ancestral polymorphism is L, Derived polymorphism is P
  VARIANT 397: note = Ancestral polymorphism is T, Derived polymorphism is M
  VARIANT 408: note = Ancestral polymorphism is L, Derived polymorphism is F
MAMAAPPPTALCARRFRPHHFAYSSPATLRLPTASSSSQLRRRRRLAVSPRADAATGTGDVEALRAGVSVYKPRSYDVLVTDAARSLACAIDDGKTRLEIEFPPLPSSISSYKKQTTLNLKDTIDKTDRSKLLKGSSDEFIDANIQLALVVARKLKELKGTRSCIVFPDQPEKRRASELFKTAIDTIEGVTISSLDDVPTDPVNSFFKSIRNTLDFDFSDDNEGRWKSDEPPSLYIFINSSTRDLASIEKYVEKFATSVPALLFNLELDTLRSDLGLLGFPPKDLHYRFLSQFTPVFYIRQRDYSKTIAVAPYIVNYSGAVFRQYPAPWQVMLKQADGSYACVAESEARFTLGQAKEELLRVIGLQEEEGSSLEFLRRGYKVHPILAKQMLPGGKRTLIRRRRLPGELEMLYLLDGCFSNLELGMDNLANECPCLVVWN

SEQ ID NO: 13948 - protein, 130 aa, Zea mays
  VARIANT 105: note = Ancestral polymorphism is G, Derived polymorphism is C
MQNNYQEYVKLKARVEVLQHSQRNLLGEELAPLSPSELDQLESQVDKTLKQIRSRKTQVLLDELCDLKRKEQMLQDANRVLKRKLHEFEAEAASPPQLAWQGGGGMLSHDPPQPEHFFVALESNAPLQPT

SEQ ID NO: 13949 - protein, 361 aa, Zea mays
  VARIANT 250: note = Ancestral polymorphism is S, Derived polymorphism is G
  VARIANT 200..361: note = Derived polymorphism lacks residues 200 to 361
  VARIANT 189..361: note = Derived polymorphism lacks residues 189 to 361
  VARIANT 33: note = Ancestral polymorphism is P, Derived polymorphism is H
  VARIANT 29: note = Ancestral polymorphism is N, Derived polymorphism is S
  VARIANT 21: note = Ancestral polymorphism is P, Derived polymorphism is H
MAATRGETLGPRIGYLPLLIPVIRAHFSNALPPGVDTVWFEYKGLPLKWYVPIGVLFDLLCADPERPWNLIVHFRGYPSEILSPCEGEDSVKWSYMNSLKEATFIITGNSKSVMNMSHADQVALWESVMKGNLDGYKNISTRLKLGPFEDDVLVRTASVERQRQQNSDEPESPGSSKPCMLFCSGTFILSSMLKVHVLTRVQYGRVPVRLYVRNVQEDLEYIEHAVPVSDWENVSYINRPFETRKAEGRSYITLEHALQTLLPEFFSSKPPGSADGSQHAGAMDAAADSSDATNSSSRSQEAEQALASPAEAGSAKRAKVKLVRVQGVELDMDIPFLWVADHLKNPEYYVHICVYVGTRKQ

SEQ ID NO: 13950 - protein, 422 aa, Zea mays
  VARIANT 295..422: note = Derived polymorphism lacks residues 295 to 422
MRRKRATSVSPTASASATRRLRLLRLPLLAFALLAIAAVLRRHVSAPARRSVSEPDPLPCGAAPSDLTAGRWVATPRPVPAPLYSATCPFHSGSYNCLRNGRPPLAALSWAPARCGVVPRIDPSAFLAAAAGRRVGLVGDSLSENLAIALLCALRSADPNARRWKRRGAWRGGYFPRHDVTVAFHRAVLLAKYTWQPVEDPEQVHKDGIKGIYRVDVDIPADDWISVTKFYDVLIFNTGHWWGTYKFPRETPLVFYEGGRPIEPPLSIPDGLKRVIKSMAAYIDAEAPSTTLKLWRTQSPRHFHGGEWDRNGSCVTDKLLKEDELDAWFDPQFGGVNKDARTVNAVTEEALAGSSGIRLVNLTYMSEFRADAHPAAWLGKKGVVAAYGQDCMHWCLPGVPDTWVDVMAVQILHHFKRLEKGK

SEQ ID NO: 13951 - protein, 288 aa, Zea mays
  VARIANT 66: note = Ancestral polymorphism is R, Derived polymorphism is K
MHIWFQICASIVSSCQLGRRHVYFHSCAPILASPIVSFWCTADLVCVKCIRLSQVGDFQLCSLRPRRRRRRRSVHDDRLLHGRIDATTRYGYLELAIEQMAETADASNALDHGLHYLRSTGNACAARALLWWGWDNSDAHAALTIPNDRYKLSFIVTDGTCEAEFFCFDSIARKILPSICQPTLSQTVFSILSILTNHVRHAFMPSNMSNHPEELYTQDEVPSLPVTQNSPTTSLAKLSTCSNERNEGDDQRTSELNKQDLSSPPKRYLLFVHLSGSPSLLDHECFSF

SEQ ID NO: 13952 - protein, 448 aa, Zea mays
  VARIANT 218..448: note = Derived polymorphism lacks residues 218 to 448
MPPRAAPALRVLPLALAAAIFSGLTAILFYLSGVSSSHSGSRLSEADLAALAALRGGFSKCVDANGLGLKAVTGEDYCRVVIQYPSDTVSKWRDPITHKAESLSFEFNLCEAVASWEHVRNSTTVLTKEYIDALPNGWEEYAWRRINKGILLNKCQNRSLCMEKLSLVLPETSPYVPRHFGRCAVVGNSGDLLKTKFGDEIDSYDAVFRENGAPTQNYTEYVGRKSTFRLLNRGSAKALDKVVELDETKKEALIVKTTIHDIMNQMIRELPITNPVYLMLGTSFGSSAKGTGLKALEFALSICDSVDMYGFTVDPGYKEWTRYFSEVRKGHTPLHGRAYYQMMECLGLVKIHSPMRGDPGRTVRWLPTKATIEAARVASEKLLKRPGAGSDDPLGTCTMIKKRRKGKAPNRSGLRDAAMKHLEDMKGAARYPLERNAGGGYLCMINDR

SEQ ID NO: 13953 - protein, 180 aa, Zea mays
  VARIANT 62: note = Ancestral polymorphism is C, Derived polymorphism is Y
  VARIANT 57: note = Ancestral polymorphism is R, Derived polymorphism is C
  VARIANT 33: note = Ancestral polymorphism is K, Derived polymorphism is M
  VARIANT 20: note = Ancestral polymorphism is S, Derived polymorphism is W
MSSLRLPYNRSRENEADQPSPPPSPAGAPLGGKALTPAELEAQLVKARKWHQLNSKRYSNKCNKFGKAKDVIKSVKKCIGSRSKTTQLFAVMLLEMLLNNCGEPVHRHVIDNGLLPILVKIVKKKTDLPVREKIFLLLDATQTSLGGAKERFPQYYEAYYELVVGLNMQKLGFLNYKRAD

SEQ ID NO: 13954 - protein, 455 aa, Zea mays
  VARIANT 248: note = Ancestral polymorphism is R, Derived polymorphism is H
  VARIANT 18: note = Ancestral polymorphism is H, Derived polymorphism is Y
MSKAAAASLPPPPPEVAHLVEQLQRHHLAPDASLLSSSAHSDLLQAREEVAAERALYLEALAVYAEAVAMVEEYHAAAGAGKKLNCSPQVYESLEHRLAVAEAAQRLRLPLLSQDGEVHEQEIEKLSTYSRSSFDSTLTSATPSSSSISTSYNNYSSSASAVTVAAPHWSGSSDAVEPGVGGVPDRFLGITSDYLYQVQQEQPAMSVDMVDYQRTLAREIEARLEAKCDALADLFAMDERGQLLKLIRHPSVKFQVLGFQKVGQASLISIPHFFYFPFDRVKLIIEEIEKEEAHLLEDLASMDRKFAEHYNVSMVLKIPKVLEQILAVLIQFVKDKKLEHQHQFDDLKKTWLIKRCRTMNAKLSYLEHHLLRDTYTKDTVPALHRIRKYLVEATKEASNSYNEAVSRLREYQGVDPRFDVIARQYHEIVKKLEGMQWTIHQVEMDLKPHHDHAAV

SEQ ID NO: 13955 - protein, 289 aa, Zea mays
  VARIANT 10: note = Ancestral polymorphism is R, Derived polymorphism is W
  VARIANT 18..289: note = Derived polymorphism lacks residues 18 to 289
  VARIANT 19: note = Ancestral polymorphism is A, Derived polymorphism is V
  VARIANT 25: note = Ancestral polymorphism is V, Derived polymorphism is I
  VARIANT 39: note = Ancestral polymorphism is V, Derived polymorphism is A
  VARIANT 44: note = Ancestral polymorphism is R, Derived polymorphism is C
  VARIANT 58: note = Ancestral polymorphism is L, Derived polymorphism is P
  VARIANT 80: note = Ancestral polymorphism is V, Derived polymorphism is D
  VARIANT 84: note = Ancestral polymorphism is L, Derived polymorphism is H
  VARIANT 102: note = Ancestral polymorphism is A, Derived polymorphism is V
  VARIANT 182: note = Ancestral polymorphism is A, Derived polymorphism is T
  VARIANT 186: note = Ancestral polymorphism is A, Derived polymorphism is V
  VARIANT 216: note = Ancestral polymorphism is R, Derived polymorphism is C
  VARIANT 226: note = Ancestral polymorphism is G, Derived polymorphism is D
  VARIANT 248: note = Ancestral polymorphism is V, Derived polymorphism is M
  VARIANT 249: note = Ancestral polymorphism is R, Derived polymorphism is H
  VARIANT 251: note = Ancestral polymorphism is A, Derived polymorphism is T
  VARIANT 263: note = Ancestral polymorphism is R, Derived polymorphism is H
MVSVASETLRVLELVGCQALKQLCVDAPALESFALHCNVFVTNRDASYMPNLEELQLLMNYEGYCLEAVSGFFKLIPLPVLQRLFVRLHIDHKREGEGSSSAAVWSVENDDSEDMAPKEEIVLDQLTFVKFVNFSGTWCQLRLLSFFLDKSPVLHQLVLVTPEGEGALGDDRLKVIHERVAALEKASSEASITVCRPKEDDTPNHPHTSWRISRMRKGILTGAAAGVEEVDIQGLGMQERKNLIERLMRTAEEDNERFLLKLHDRMERVGIDNPTIEVRFENLDIDAEA

SEQ ID NO: 13956 - protein, 199 aa, Zea mays
  VARIANT 39: note = Ancestral polymorphism is G, Derived polymorphism is D
  VARIANT 46: note = Ancestral polymorphism is G, Derived polymorphism is E
  VARIANT 47: note = Ancestral polymorphism is P, Derived polymorphism is R
  VARIANT 49: note = Ancestral polymorphism is G, Derived polymorphism is R
  VARIANT 51: note = Ancestral polymorphism is G, Derived polymorphism is R
  VARIANT 89: note = Ancestral polymorphism is S, Derived polymorphism is L
  VARIANT 111: note = Ancestral polymorphism is S, Derived polymorphism is F
  VARIANT 172: note = Ancestral polymorphism is A, Derived polymorphism is V
  VARIANT 183: note = Ancestral polymorphism is G, Derived polymorphism is V
MTNFFSNKVMDVLSAMHIVSSGKRHVSILHDISGVIRPGRMSLLLEPPGSRKTSLLLALAGKLDSNLKVSGRVTYNGHDMDEFVPQRTSAYIGQHDVHVGEMTVRETLAFSARCQGVRTRYDMLTELSRREKEANIKPDPDVDVYMKAISVEGQESVVTDYILKILGLEICADTMVGDSMIRGILGGQKKHVTTGICNL

SEQ ID NO: 13957 - protein, 171 aa, Zea mays
  VARIANT 144: note = Ancestral polymorphism is T, Derived polymorphism is R
  VARIANT 127: note = Ancestral polymorphism is T, Derived polymorphism is M
MKPLQDLVLGCNKGSRETEPVGSSGTRAGTTGSAAYMFALLILLLCFGPGNFSCPLRLDHNRLKGPIPRELAGLPNLGIVDFSNNDLCGAIPTDGAFQNIPRSSELLLVDACQHIPGDPSTSFSVFTVTTLPFVQQIVAETSGTTLTFVIIDKWVVTVPSIGDSHCVQESA

SEQ ID NO: 13958 - protein, 399 aa, Zea mays
  VARIANT 244: note = Ancestral polymorphism is R, Derived polymorphism is G
MAGGAGNGSNEAVQAKGSGGDSSAAKPLPPCCVKARAAAPESEAKCHATVVSGWFTEPRSHCGKASKVQYYNNPMWPGEAHSLKVENILYQGKSPYQEVLVFESSTYGKVLVLDGIVQLTDKDECAYQEMITHLPLCSIPSPKKVLVIGGGDGGVLREISRHSSVESIDICEIDQLVIDICKEFFPHLSVGFEDPRVQLHVGDAVEFLRNAPEGTYDAIIVDSSDPIGPAQELVEKPFFETIARALRPGGVLCNQAESMWLHTHLIQDMLSICRETFKGSVRYAWASVPTYPRLYKLDYGGRVESGVIGFLLCAKDGPPVNFLTPVNPIEEVEGATKAGREIRFYNSEMHMAAFVLPTFAKRELEAYCASTETEQAEEVAATAPQKLTAAPKRGITTAS

SEQ ID NO: 13959 - protein, 202 aa, Zea mays
  VARIANT 24: note = Ancestral polymorphism is G, Derived polymorphism is E
  VARIANT 51..202: note = Derived polymorphism lacks residues 51 to 202
  VARIANT 100: note = Ancestral polymorphism is M, Derived polymorphism is T
  VARIANT 105: note = Ancestral polymorphism is R, Derived polymorphism is W
  VARIANT 116: note = Ancestral polymorphism is L, Derived polymorphism is F
  VARIANT 124: note = Ancestral polymorphism is R, Derived polymorphism is C
  VARIANT 163..202: note = Derived polymorphism lacks residues 163 to 202
  VARIANT 165: note = Ancestral polymorphism is T, Derived polymorphism is M
MSCVQKVYYHSGGLRLNPNLYESGKVCLSLLNTWWGKGCEKWGKSSSTMLQVLVSIQGLVLNDRPYFNEPGYKNSAETTGGERCSLAYNQTTFVRSCKTTLYSLRKPPMHFETLVLWHFHEHERAILDACRAYMSGTVVGSSAGTGSNRRYVHDKCFAEFHKSLTLYTEHLRAEFATNRRRVMELETEDEIVPSIAASMKSC

SEQ ID NO: 13960 - protein, 484 aa, Zea mays
  VARIANT 356: note = Ancestral polymorphism is T, Derived polymorphism is A
  VARIANT 349: note = Ancestral polymorphism is R, Derived polymorphism is S
  VARIANT 315: note = Ancestral polymorphism is G, Derived polymorphism is E
  VARIANT 203: note = Ancestral polymorphism is R, Derived polymorphism is S
  VARIANT 64..484: note = Derived polymorphism lacks residues 64 to 484
MPAVASLWAPPAAARRRRFSPVVSSSLRRVASGGGSSWRSERRLMSELERTVTAGATERVIRSYVGTKSERAALAALSRLLMDSDPLAIPFYEAVTQARWFKWSSIHAAAVAALLEANGRAGESRSLIADSVSQHLQQSTDEVALFYCDLIAAFSSRGLKDRATEFHMELRSMPPLSGRKAYAAMVKSLCLLGMPAEAEAALREMVSRGHRPEAAQFGAVARCYGRAGSPADMERVIASMADAGGIRLGAGAADAVLSCYSACRDHARTLAWLKRMRKLRVAVTAKGYNLVLNSCPSLASVVRELGPELPLSTAGLVGWLRSASTTPAPAAEVEVVRELLASSASVLDRAMEWSEAEAKLNLHGFSTVAAYVLVLQWVDAVRGRARALPLEVSVVCGVGKHSDVRGESRVRELAQEVLGRMGSPLKLSARNRGRLVAKRDRVEQWLASLPVPEDGTDPSPDAANEEPFVFALFRKLGQFFSNLM

SEQ ID NO: 13961 - protein, 245 aa, Zea mays
  VARIANT 25..245: note = Derived polymorphism lacks residues 25 to 245
  VARIANT 107: note = Ancestral polymorphism is G, Derived polymorphism is D
  VARIANT 148: note = Ancestral polymorphism is E, Derived polymorphism is K
MLGTLPPSYLRWVAAELDYGDTAPWAGLARAVLDDPVYVDRVEWEHAHRFLRGDADGYDYAYDADGDGPLQEMAERFGWDLSDEEGWGRLDLRLLGTSYGGRIPRKGARTKQSNSNSNSSPGGAKKGGSLFGAAAGADPGGAVGKRDKRRERVRTRREEQVRTAKMDMLGVHAGVADGGVLGSSSARKQAQIRMASKEILGLGQSSRAGETLDEKRTPGKGGKGANPFPGRQAFLDKVRKLKGDD

SEQ ID NO: 13962 - protein, 931 aa, Zea mays
  VARIANT 256..931: note = Derived polymorphism lacks residues 256 to 931
MSYTISGGGTAPAAWAWLHGDLELTIHEARGLPNMDLLSTLLRRLCLCPPLAGITPARRRSLSDDDDDSAHAHAHTHPHHHHLRGRLHRRPRRRHEPQPHGHLLLPTSDPYAAVVVAGPHETTVARTYVFRNSEAPRWEASFLLPLAHAATGLEFHVKDADPFGSDLIGVAWLPAAAVLASAAAPIESQWLDLARPDARGPPAPGGGSAIRVSAAFVPAAASRGRSGVGVPAYFPLRRGCDVRLYQDAHVAAGELEGVGVVPGFLPGRCWEDLCMAVLGAQRLVYVAGWSVHTTVRLTREAMSPEMAAKVAELEELGGEPVEHMSLGELLKYKSQEGVRVLLLVWDDRTSHNNFFVKMKGVMQTRDEETKKFFKHSSVICVLSPRYPSSKLGLVKQKASEIVLRAINVVGTLYTHHQKCVLVDTPASESTRRITAFLGGLDLCAGRYDTPSHRLFRDLQTVFHGDVYNPTFGGDVNGPRQPWHDLHCRLDGPAAYDILKNFEQRWRKATKLREMFGGKAAHRKDDALLKLERIPWILSPTKPKQQPPSAAADTGAADHDDDERDQPALHVLPDGDPERWHAQVFRSVDAGSVKRFPRPWERAEMARRHLVGDKNLAVERSIHAAYVAAIRSAERFVYVENQYFIGGSYAWPSYRNGGACNLVPMEIALKVASKVRAGEPFAAYVVLPMWPEGNPGSGPAQEILFWQNQTMEMMYSVVAAALEGKGGHPQEHLNFYCLGNREPAEDAGDGNKWAPADPLDDATTSSAAAHARRHRRFMVYVHSKGMIVDDEYVIIGSANINQRSLAGSRDTEIAVGAYQPDHTGACPRGKVHGYRMSLWEEHLGKEAVRRPEVLRPESPRCVKLVNRIARDNWRRYAADDDKLGPLQGHLLRYPVHVRADGRVEPLPGNELFPDVGGRVVGAPNNLPDYLTM

SEQ ID NO: 13963 - protein, 563 aa, Zea mays
  VARIANT 480: note = Ancestral polymorphism is G, Derived polymorphism is V
MAASALLTGSPWLRMRLLPDAPARPFRHLHLRRSFSVRASGADGSPAPVRVRFAPSPTGNLHVGGARTALFNYLFARSKGGRFVLRVEDTDLERSTRKSEEAVLADLAWLGLDWDEGPDVGGDFGPYRQSERNSLYKQYAEKLLDSGAVYRCFCSSEELEQMKEVAKQRQLPPVYMGKWASASDAEVQQELEKGTPYTYRFRVPKEGSLKISDLIRGEVSWNLDTLGDFVIMRSNGQPVYNFCVTVDDATMQISHVIRAEEHLPNTLRQALIYKALGFAMPSFAHVSLILAPDRSKLSKRHGATSVGQYKNMGYLPQAMVNYLALLGWGDGTENEFFTIDDLVQKFTINRVNKSGAVFDATKLKWMNGQHLRSFPHDELIKAFEDRWTDTGILQESESGFAKEAAELLKDGIDLITDADAALTNLLSYPLHTTLSSEEAKPVVQDKISEVAWSLISAYDSGELGQALAEGRDGWQKWVKGFGKSIKRKGKGLFMPLRVLLTGKLHGPDMGGSIALIHKAGVCCAVTPQSNFVTLDERFRMLKDVDWESLAKEQETPAVPAAAS

SEQ ID NO: 13964 - protein, 181 aa, Zea mays
  VARIANT 19: note = Ancestral polymorphism is Y, Derived polymorphism is H
  VARIANT 20: note = Ancestral polymorphism is S, Derived polymorphism is N
  VARIANT 27: note = Ancestral polymorphism is G, Derived polymorphism is R
  VARIANT 34: note = Ancestral polymorphism is G, Derived polymorphism is D
  VARIANT 84: note = Ancestral polymorphism is R, Derived polymorphism is W
  VARIANT 85..181: note = Derived polymorphism lacks residues 85 to 181
MVDSLAKLSMDVGDKDLVYSLLLVFSGMLMDEKGKECILDNIQITISVLSELVSYPHMMVVRETTLQCLVAFSTFPHPKIYPVRRKVVQAAIRALDDKNGLFVKWLSDGGTHGADILQFLNQLHGCSFLSKQLFLALMSIPPTYAGSHLLLFVIVHQTFLLLSCTELPVLGMSSLLHDATK

SEQ ID NO: 13965 - protein, 202 aa, Zea mays
  VARIANT 156..202: note = Derived polymorphism lacks residues 156 to 202
  VARIANT 62: note = Ancestral polymorphism is M, Derived polymorphism is I
  VARIANT 39..202: note = Derived polymorphism lacks residues 39 to 202
  VARIANT 28: note = Ancestral polymorphism is G, Derived polymorphism is V
  VARIANT 18: note = Ancestral polymorphism is F, Derived polymorphism is L
  VARIANT 14: note = Ancestral polymorphism is A, Derived polymorphism is T
MLAALCRAGDLATARRLFDGMRAGEQGGEAGAFPNVVTYTTMIRACCARRLADEALSLFKMMLADGVRPNRITYNTMVQGFCQAGRMELVKEVFGMDSFKPDTCTFNTLMAAHCREGRIQDAKKVFDQTMELRVRRDSASYSIVTRALCENGEFGRAEELVDSLLEELVDSHSLHLTIQFLSTSVRMARQRRQRRPGWNPRF

SEQ ID NO: 13966 - protein, 406 aa, Zea mays
  VARIANT 7..406: note = Derived polymorphism lacks residues 7 to 406
  VARIANT 14: note = Ancestral polymorphism is T, Derived polymorphism is I
  VARIANT 17..406: note = Derived polymorphism lacks residues 17 to 406
  VARIANT 25: note = Ancestral polymorphism is S, Derived polymorphism is N
  VARIANT 48: note = Ancestral polymorphism is D, Derived polymorphism is Y
  VARIANT 54..406: note = Derived polymorphism lacks residues 54 to 406
  VARIANT 73: note = Ancestral polymorphism is R, Derived polymorphism is H
  VARIANT 79: note = Ancestral polymorphism is A, Derived polymorphism is P
  VARIANT 117..406: note = Ancestral polymorphism lacks residues 117 to 406
MEFAALQPSPAALTSLRRVGSGMGNIILDRRRCFFVSNFTAAEQVLRYSFRALRCMALAVARVNDEDALSARRELLRVAAVGILWRREPRRRGSGGGGWAKCQLGGVREGEELDPPCRWEELDMDVGARRPESGTDECRDVWDNRRVIQEGERQPSLKEVCPSFPGGDAVAIPGGSGCLGGAKWEGSEAEEARIGNGGAGGGWGGTSVVRRVRRRQLPTKAILPATNDHADVKALGGNGWGGGGKGAGQHSSRCRADAAIGVWCQGAGGRRGGAEGREVDMGVVSFNGGAGAAAPGDSEDSSGKGQLTRGHRGRVLGWRNSGEGGGLAPGQSASDNFCADARSDCNRGSELGHDSHEPGGPRRGSENSGKGRVGGKRGGGGGEGELWRERASRLKRGCSSRGKRLS

SEQ ID NO: 13967 - protein, 213 aa, Zea mays
  VARIANT 49..213: note = Derived polymorphism lacks residues 49 to 213
MEAAASNMDHAPMEEDAAPASMVEMNAEELEVADILSDLSRLIRSRDRQERCRERRERHRRRPVQRDDNPSPEPAPAAASSAVPSPETPLAYPQSGGDDDAPPKDKGEAAAAVRPRDQSAEQQYGEEAAASSGQAPENARPLTVATRKKKDTPWTVPSRDLTDERLLEWAKAVEDRYLQAMAKKQKAAARRRRVGILRAKGLSLVSRRMWRAS

SEQ ID NO: 13968 - protein, 468 aa, Zea mays
  VARIANT 214..468: note = Derived polymorphism lacks residues 214 to 468
  VARIANT 184..468: note = Derived polymorphism lacks residues 184 to 468
  VARIANT 117: note = Ancestral polymorphism is P, Derived polymorphism is H
  VARIANT 72: note = Ancestral polymorphism is A, Derived polymorphism is V
MDPAGGLELPHAGVDERVAGPPLPPDLEVHLIDDPGEEPEVQREGLLVAAGVVEGEVPRVLPQADGAEEQGAALLAGVVAVVAPHEALHPDLVEDLPDAELAEVQLRCGGVRHAQAPVPEWREHGEGAAVFVEDLPRLVHQIGVEGLHVDALGRQLLLDAIVLDQRQRVCTVGTGQRSVAMRKQKDTPRAVPSRDLTDERLLAWAAAAKNQYLQAMDEKQEAVARRPHAKKTKVSVHEVLETGLAAHLVPRLTPQAIEERDALQLVLDDVMLSEAPDVRHCPIAGVGGNLHTGSLYRVMCNGEGVHSAEAAFVWRNQAPPPRVRFFGWLVNNGRVQCRVNLARKKVVQDTTCEVCGQAPEDTAHIFLHCGFASSFWGTLGVQIAPDRSNVLLSLLRPSTIPAKHYNMFVLLCCWQLWKCRNVVVFRGERSPLATTMLLCRSKAELWRHRLRHEDYQIVVAWYRALYVT

SEQ ID NO: 13969 - protein, 187 aa, Zea mays
  VARIANT 24: note = Ancestral polymorphism is R, Derived polymorphism is M
  VARIANT 123: note = Ancestral polymorphism is C, Derived polymorphism is Y
MYEPWEVLDEDRRPFTMFAPFWNRCLCMPDPATPQLPPKRINSGDLSRCPWDELNANKPLTAFLNGPLMDYSVNRKKADSASTSLLSPYLHFGELSVRKVFHQVRMKRLMWSNDGNHASEESCTLFFRSIGLREYSRHLTFNHPCSHEKPLPLHLRFFPWVVNEVYFKVWRQGRTGYPLVDAGMREL

SEQ ID NO: 13970 - protein, 225 aa, Zea mays
  VARIANT 66: note = Ancestral polymorphism is R, Derived polymorphism is H
  VARIANT 128: note = Ancestral polymorphism is A, Derived polymorphism is T
MIGESRHPLPSLPLRPPTQTCHGGLFPGCQVYLLTVLLVPDKSCNAIICENENEPAKSSDVVETKHVEALVPSSIGTVVTAEQKDNGHRASGEWHGDNVQVIGQQQKIYIIKVPKFAGDDLWNKIQAAQAHLDHLTQERDAINRRRQKQKAVCDQYREELEAARREEWEARTALGDKKNDLNNVRSVLGKLHQANSVEELDELIAKKERTMQHETISLKEEKLFN

SEQ ID NO: 13971 - protein, 255 aa, Zea mays
  VARIANT 54: note = Ancestral polymorphism is R, Derived polymorphism is C
  VARIANT 33: note = Ancestral polymorphism is R, Derived polymorphism is W
MEACNYRRTPSTPSSPRSCGGAGAARRFPALPRRLPDVATLNTLIHGLSTASPRPSSPALLRLFRFLPEAYAFAPDAITYNSMLAALCRAGDLATARRLFDGMRAGEQGGEAGAFPNVVAYTTMIRACCASRLADEALSLFKMMLADGVRPNRITYNTMVQGFCQAGRMEPVKEVFGMDSFKRDTCTFNTLMAAHCREGRIQDAKKVFDQMMELRVRRDSASYSIVTRALCENGEFGRAEELVDSLLEKEVLKKR

SEQ ID NO: 13972 - protein, 289 aa, Zea mays
  VARIANT 2..289: note = Derived polymorphism lacks residues 2 to 289
  VARIANT 204..289: note = Derived polymorphism lacks residues 204 to 289
  VARIANT 219..289: note = Derived polymorphism lacks residues 219 to 289
MQHHGPPPMARLRPEPIDREKTCPLLLRVFTRVAGHHQNEEFAVRGKEPKDEVQIYAWKDATLRELTDLIRILGMRKLKRSFSCCRRLYPFLEMQRKERLYDDTGITDDALVGEAADNLQEYFRTMYKKVTEADIEEFEAKYRGSDSEKTDLKELYTKYKGNMNMLFCTMICSEPKLDSHRFKDIIDEAIGEGELKSTKVYEKWAKKISGMEPPTNPLERRAKKRKNSEENDLILAISQRKAERKKQFNSILSNIMSKCDSKASSSEPTEEEFEQAQQRPESRRAKRRK

SEQ ID NO: 13973 - protein, 622 aa, Zea mays
  VARIANT 421..622: note = Derived polymorphism lacks residues 421 to 622
  VARIANT 315..622: note = Derived polymorphism lacks residues 315 to 622
  VARIANT 238..622: note = Derived polymorphism lacks residues 238 to 622
MATGAPPETEPASTAAARKLHHLLRSRDLLPALSYLRTLPSPFTLLPNHALNALLRALAAAGRVRAAASLFRAIPAPTPHSFNSFLAALLRRGRRRAASALLAAFLRCPGASPDVATLNTLIHGLSTASPRPSSPALLRLFRFLPEAYAFAPDAITYNSMLAALCRAGDLATARRLFDGMRAGEQGGEAGAFPNVVAYTTMIRACCASRLADEALSLFKMMLADGVRPNRITYNTMVQGFCQAGRMELVKEVFGMDSFKPDTCTFNTLMAAHCREGRIQDAKKVFDQMMELRVRRDSASYSIVTRALCENGEFGRAEELVDSLLEKEVLKKRGGCVPLIASYNPVFKYLCENGKAKKARLLFGQLLDIRSKVDFLAFKTLILGHCKEGDFEEGYELVLSMLKRDLMPDSECYIAVIDGFMQKGRMKSAWEALHRMLNSGLRPSTSTFHSVLLGLLKKDGCAKEAADLIEIMLERKIRQNVDLSTNLIGVLFKSDLNDRAYKITKHLYDNGYYIKMEKLIATLCEDKKFIDAAEFSLFSLRKRHELGVAVHSQVLDGLCSDRRTSEAFQLFYELNENKRTSAVAAPRSLVFLHHALEEAGMVQEAGFVAKQMRRATATTRRRS

SEQ ID NO: 13974 - protein, 581 aa, Zea mays
  VARIANT 386..581: note = Derived polymorphism lacks residues 386 to 581
  VARIANT 269..581: note = Derived polymorphism lacks residues 269 to 581
  VARIANT 242: note = Ancestral polymorphism is K, Derived polymorphism is M
  VARIANT 127: note = Ancestral polymorphism is M, Derived polymorphism is T
MYSLPGATMSAAPASIISSSSFVEPLLLAAASPAAAAAAANSHHQVRQRGHLVRTLAASSSSNTLLRSDFDLQEGLTTDVKRMLRQRQKKSGGGREMLVTIDNLKRLCIDHYFEEEIEGAMATGACTRLLHSDDLFDATLAFRLLREAGHDVSAKDDVLRRFIDGASGDFKLSLSNDVRGLLSLHDMSHLDVGGEAALLHRAKEFSSRHLASAVRYLDDPSLAEYVRQSLDHPYHLSLTQYKARHHLRYLQSLPSRDAAVERLAVAEFQLNKSLHQGEMREIKRWWMDLGLAEEIPVVRDQVMKWYMWSMAALQGSSFSRYRVEITKIISLVYVVDDIFDLVGTLEELSAFTEAVKMWDTVAADSLPSCMRSCYKALHTVTNEIAEIAQKEHGSNHVNRLRKAWAVLFDGFMVEARWLATDQVPTAEDYLRNGVITSGVPLTFMHIFSMLGYDDPSTEEEEEAIIDHMPSIISCPAKILRLWDDMGSAEDEAQEGFDGSYRDFYLMENPSRSPGEAEAHMRGLIAREWEVLNRECFCRRTFPSNLVQVCLNTARMVSVMYSYNKEQRLPVLEDYAAMMLVL

SEQ ID NO: 13975 - protein, 574 aa, Zea mays
  VARIANT 200: note = Ancestral polymorphism is H, Derived polymorphism is R
MYSLPGATMSAAPARVISSSSSSSFVEPLLLAAASSAAANSHHQVRQRGHLVRTLAASSSSNTLLRSDFDLQEGLTTDVKRMLRQRQKKSGGGREMLVTIDNLKRLCIDHFFEEEIEGAMATGACTRLLHSDDLFDATLAFRLLREAGHDVSAKEDVLRRFIDGVSGDFKLSLNNDVRGLLGLHDMSHLDVGGEEAALLHRAKEFSSSHLASAVRYQDNPSLAEYVRQSLDHPYHLSLTQYKARHHLRYLQSLPSSCRDAAVERLAVAEFQLNKSLHQREMREIKRWWMDLGLAEEIPVVRDQVMKWYMWSMAALQGSSFSRYRVYVVDDIFDLVGTLEELSAFTEAVKMWDTAAADSLPSCMRSCYKALHTVTNEIAEIAHKEHGSNPINRLRKAWVVLFDGFMVEARWLATDQVPTAEDYLRNGVVTSGVPLTFLHIFSMLGYDDPSTEEEEEAIIDHMPSIISCPAKILRLWDDMGSAEDEAQEGFDGSYRDFYLMENPSRSPGEAEAHMRGLIAREWVELNRECFCRRTFPSDIAQVCLNTARMVSVMYSYNKEQRLLVLEDYAAMMLVL

SEQ ID NO: 13976 - protein, 110 aa, Zea mays
  VARIANT 1: note = Ancestral polymorphism is R, Derived polymorphism is M
  VARIANT 13: note = Ancestral polymorphism is K, Derived polymorphism is R
  VARIANT 25: note = Ancestral polymorphism is N, Derived polymorphism is D
  VARIANT 32: note = Ancestral polymorphism is E, Derived polymorphism is K
  VARIANT 39: note = Ancestral polymorphism is E, Derived polymorphism is D
  VARIANT 42..110: note = Derived polymorphism lacks residues 42 to 110
  VARIANT 45: note = Ancestral polymorphism is P, Derived polymorphism is L
  VARIANT 74: note = Ancestral polymorphism is A, Derived polymorphism is V
  VARIANT 89: note = Ancestral polymorphism is I, Derived polymorphism is M
MLYDRTLALYLDKAKCRGNRTAALNGLCCLGEAIKECEEALQIDPSYVHTHHRLTSLHIRYVIVGGGNAAGYVARTFVEHGMADGRLCIVSKEEQSQREGILRLVIPGRV

SEQ ID NO: 13977 - protein, 162 aa, Zea mays
  VARIANT 145..162: note = Derived polymorphism lacks residues 145 to 162
  VARIANT 112..162: note = Derived polymorphism lacks residues 112 to 162
  VARIANT 106..162: note = Derived polymorphism lacks residues 106 to 162
  VARIANT 104: note = Ancestral polymorphism is E, Derived polymorphism is K
  VARIANT 71: note = Ancestral polymorphism is K, Derived polymorphism is N
  VARIANT 39: note = Ancestral polymorphism is V, Derived polymorphism is I
MTPVELTLAYHPAIGDAALGLNGRALLPAAPAKVTLRRVAANAYASADRVAAAEVARFVVLAATGEEVAAKGVFSARREGVARGVPSSTTLAGGVCGGGGGAREGWRADAGQGPRGRPRPGRMRCGATRLEGIPEEDATTGLCGWCRCECDDDGWEVVGDAE

SEQ ID NO: 13978 - protein, 1371 aa, Zea mays
  VARIANT 1102..1371: note = Derived polymorphism lacks residues 1102 to 1371
  VARIANT 1013..1371: note = Derived polymorphism lacks residues 1013 to 1371
  VARIANT 941..1371: note = Derived polymorphism lacks residues 941 to 1371
  VARIANT 880..1371: note = Derived polymorphism lacks residues 880 to 1371
  VARIANT 48..1371: note = Derived polymorphism lacks residues 48 to 1371
MSSPSNNRGTCSRSSSARSKHSARVVAQTPVDAQLHADFEGSQRHFDYSSSVGAANRPSASTSTVSTYLQNMQRGRYIQPFGCLLAVHPDTFALLAYSENAPEMLDLTPHAVPTIDQRDALTIGADVRTLFRSQSSVALHKAATFGEVNLLNPILVHARTSGKPFYAILHRIDVGLVIDLEPFNPADVPVTAAGALKSYKLAAKAISRLQSLPSGNLSLLCDVLVREVSELTGYDRVMAYKFHEDEHGEVISECRRSDLEPYLGLHYPATDIPQASRFLFMKNKMRMICDFSATPVLIIQDGSLAQPVSLCGSTLRASHGCHAQYMANMGSVASLVMSVTINDDEEEDGDTDSDQQPKGRKLWGLVVCHHTSPRFVPFPLRYACEFLLQVFGIQLSKEVELAAQAKERHILRTQTLLCDMLLRDALVGIFTQSPNVMDLVKCDGAALYYQNQVLVLGSTPSESEIKSIATWLQENHDGSTGLSTDSLVEAGYPGAAALREVVCGMVAIKISSKNFIFWFRSHTTKEIKWSGAKHEPFDADDNGRKMHPRSSFKAFLEVVKWRSVPWEDVEMDAIHSLQLILRDSLQGEDANRNNIRSIVKAPSDDMKKLQGLLELRTVTNEMVRLIETATAPVLAVDIAGNINGWNKKAAELTGLPVMEAIGRPLIDLVVADSVEVVKQILDSALQGIEEQNLEIKLKTFHEQECCGPVILMINSCCSRDLSEKVIGVCFVAQDLTRQKMIMDKYTRIQGDYVAIIKNPSELIPPIFMINDLGSCLEWNKAMQKITGMKREDAINKLLIGEVFTLHDYGCRVKDHATLTKLSILMNAVISGQDPEKLLFGFFGTGGKYIESLLTVNKRTNAEGKITGALCFLHVASPELQHALEVQKMSEQAATNSFKELTYIRQELRNPLNGMQFTYNLLKPSELTEDQRQLVSSNVLCQDQLKKILHDTDLESIEQCYMETNTVEFNLEEALNTVLMQGIPLGKEKRISIERDWPVEVSHMYIYGDNIRLQQVLADYLACALQFTQPAEGHIVLQVIPKKENIGSGMQIAHLEFRIVHPAPGVPEALIQEMFQHNPGVSREGLGLYISQKLVKTMSGTLQYLREADTSSFIILIEFPVAQLSSKRSKPSPNVLLRVLFVVQQLLQQNKHCSKRDIYYMYPSIFVEVAVVDRAINDICILFKCSRHNLNVVPVVKGLVMGWIRFMEGEKKVYCITSVNAAFSIPVDIEAIKDVVSVAHYILVVEKETVFQRLANDKFCERNRCIVITQLAHDANLLRVPDIRWLGVFTSDFEEYCLPDCCLLRLSPEDRRKAEGILARCYLHREAPEWRSELEAMLQKGVKFEIEALSANSISFLSHEYIPQKIKQGMHL

SEQ ID NO: 13979 - protein, 152 aa, Zea mays
  VARIANT 40: note = Ancestral polymorphism is C, Derived polymorphism is Y
MAGMGDMPMRPARPGPPMQHRGPPPMARLRPEPIDREKTCPLLLRVFTRVAGHHQNEEFAVRGKEPKDEVQIYTWKDATLRELTDLVKEVALPARKRNARLSFAFVYPDKNGRFVVRQVGSTFAYGHGRGDDAKTLAELGFQIGDYLSVAIM

SEQ ID NO: 13980 - protein, 545 aa, Zea mays
  VARIANT 72..545: note = Derived polymorphism lacks residues 72 to 545
MSAHLRLLSAAHVSAPTPTSLHRLRGPPPSPPAARLRLLLRPPRLGGSQARFAGAVRCSGSASAPAVARVGEDSDAAAGIWEQVRDIVVFAGPALGLWICGPLMSLIDTMVIGQTSALQLAALGPGTVFCDYLSYIFMFLSVATSNMVATSLAKKVCPLILSETHSSSFYHTQDEELTQHQVSMLLFLALACGIGMFLFTKVFGTQVLTAFTGSGNYELISSANTYAQIRGFAWPAVLVGLVAQSASLGMKDSWGPLKALAAASVINGVGDIFLCSVCDYGIAGAAWATMVSQVVAAFMMMQNLSNKGFRAFSFTIPSVRELLQIFEIAAPVFVTMTSKVAFYALLTYSATSMGAITLAAHQVMINVLCMCTVWGEPLSQTAQSFMPELVYGANRNLTKARMLLKSLVIIGAITGLTLGVVGTLVPWLFPSVFTNDQRVIQQMHRVLAPYFSVLLVTPSIHSLEGTLLAGRDLRYLSQSMGVCFSIGTLLLMLLRSKGSLAGCWWVLVLFQWSRFGSALLRLVSPTGMLFNKNFNQVEYIEAKTT

SEQ ID NO: 13981 - protein, 217 aa, Zea mays
  VARIANT 188..217: note = Derived polymorphism lacks residues 188 to 217
  VARIANT 146: note = Ancestral polymorphism is P, Derived polymorphism is L
MPTIIVSVDLECSRCRAKIEKVLNRIQEKGEFCIDDIDLDEKSNKVKVTGPFDPDKLADKLCCKACKIIKQIEIVEPPPPPPEKPKKEEPAPPPPKKKEEPAPPPPAKVEPPPKEKPPPPAPKEEPKPAPAPAPPPKVVEVPYPWPYPCPYPYPAWPSDCCCHHGHGGCHCCSCGKAPEAPAPPPMPQYVPQPYPCGGGGGYRIVCDEDPSYACAIM

SEQ ID NO: 13982 - protein, 227 aa, Zea mays
  VARIANT 8: note = Ancestral polymorphism is Y, Derived polymorphism is C
  VARIANT 17: note = Ancestral polymorphism is L, Derived polymorphism is S
  VARIANT 52..227: note = Derived polymorphism lacks residues 52 to 227
  VARIANT 132: note = Ancestral polymorphism is V, Derived polymorphism is M
  VARIANT 133: note = Ancestral polymorphism is R, Derived polymorphism is M
MEASLVEYQDCVFQVNLKEEEIKQTGAASFIHTQILENHECISRRHLTGARQGRDSKIERIIGSGLAIGRGAGRMREHRHCKDEHEPQPGCGEGAGQAAANCAAVCCCFPLALLDVLLLVTVRLPTGVMRRVRRRRRHRGPTGAGAGANRKRPASAGAAPAPPSGSSAKAMIGATLVTEKEEKARGEAESSAATAELEREIMDSHFYGAGFWRSVSSSSSSSSMRCQ

SEQ ID NO: 13983 - protein, 840 aa, Zea mays
  VARIANT 630..840: note = Derived polymorphism lacks residues 630 to 840
  VARIANT 285: note = Ancestral polymorphism is S, Derived polymorphism is L
MATPPPRPGPAAASAAVSLLDHLEHANFAPPPPPPPPPSPTTVLTAWSRLRDPNSTSPADALAALETLHHHRRALRLSSAHASLLLPLLPLHPRLVATLLAAAPHLGPASVPASLPFAPRLLLLGARASAKDLPGRASFGEPASTAKNPAGSGEPADGQDDDPVVAVGRILEDVERGGQSIDDVDHLALAGVGYALASADEVQFRRIIVPLLRICGRTGNLSVGVRVLKLMEWLVMGFIESRKMRNAQVLFEMTSPEECEGENYCVLLPAVMLACGGLRALRVASARYRLDFDPRLKQAPERTIQFAAERAVLEGRPADDQHILVQCVALGLSRCGQVAFHESVLRCVCMGLLKELLPLPDFLRRSVQNAGGNSNEVIKAQVNKHLDSVLFKEAGPVTGVLCNQYSYANDKAKSFVETCVWEYAQEIYRHLRAAVLLHRGKQDGLITAIDKNAEASFLMVVVFAAEVAKHRLNAKSSEGFQPEVAARILVAFSCVEHLRRLRLPEYTEAVRSAVLANQENVAATALFIESIPSYTELTSEPDLLALDRPTTYNWYRDEVQTSRMLFYLRVVPTCVSLIPVHTMQDKLASIMFLYLQHPNEKVTSASHSVMVSFLSSGSDADQDDRAALKERLAFYYIKRSLEAYPGLTPFDGLASGVAALVRHLPAGSAAILFCIHSLAVKAKDLCETANVQNKSLWRSWEESTDPCKKTLDLLLRLIFLVDIQVRLYMVNFLPPHGLIYGSLELLVSAVLAFRSFPYLLKELAQLVTLLPKEGQDAVLDDMHTHVAESDDVTRKPVLVSWLQSLSYLSSQSSRESHSKAKSATASVASDELLDRAVARL

SEQ ID NO: 13984 - protein, 523 aa, Zea mays
  VARIANT 35: note = Ancestral polymorphism is G, Derived polymorphism is A
MAPTSTETRSSAKATVSSSQLALAAAVLCLTACGGNGVAAFNYADALDKALLFFEAQRSGKLPPGQRVTWRGDSGLTDGSAAGLDLAGGYYDAGDNVKFGLPMAFTVTMLSWSVLEFMPSGGAGADAGVTGRAAVRWGADYLLKAAAAAPDALYVQVADPYQDHKCWERPEDMDTPREVYKVTPDRPGSDVAGETAAALAAASIVFRTCDPAYSAKLLQTAHKVFDFADRYRGSYSDSLSSVACPFYCSYSGYQDELLWAAAWLHMATAAQGNSSDMYLSYIYSNGHILGAEQDDFTFSWDDKRVGTKVLLSKAFLQGMVGKGKGHAEDDALRLYKAHADAYVCSLVPGASGFQPSQFTPGGLLFKEGDSNMQYVTSTAFLLLAHAKSLAGARVSCGGGAGVPASALVAAAKRQVDYILGANPAGMSYMVGFGARYPRHVHHRGASMPSMRDHPARIGCDEGFQYLHSPDPDVNVLVGAVVGGPDDSDAFTDSRDNYAHTEPSTYTNAPIVGALAFFAAGRHR

SEQ ID NO: 13985 - protein, 99 aa, Zea mays
  VARIANT 6: note = Ancestral polymorphism is G, Derived polymorphism is R
  VARIANT 22: note = Ancestral polymorphism is M, Derived polymorphism is K
  VARIANT 34: note = Ancestral polymorphism is C, Derived polymorphism is Y
MSYMVRFGARYPQHVHHRGASMPSVRDHPARIGYDEGFRYLHSPDPDANVLVGTVVGGPDGSDDAFTDSRDNYAQTEPSTYTNALLVGVLAFFAAGRHR

SEQ ID NO: 13986 - protein, 99 aa, Zea mays
  VARIANT 8: note = Ancestral polymorphism is G, Derived polymorphism is W
  VARIANT 75..99: note = Derived polymorphism lacks residues 75 to 99
MSYMVGFGARYPRHVHHRGASMPSVRDHPTRIGCDEGFRYLHSPDPDANVLVGAVVGGPDGSDDAFTDSRDNYAQTEPSTYTNTPLIGALAFFAVGRHR

SEQ ID NO: 13987 - protein, 366 aa, Zea mays
  VARIANT 61..366: note = Derived polymorphism lacks residues 61 to 366
  VARIANT 192..366: note = Derived polymorphism lacks residues 192 to 366
  VARIANT 193..366: note = Derived polymorphism lacks residues 193 to 366
MVSEGEAREAAAGAAGAACRDPRRARERKEQLVENEKEKCKVLAELKRAKKVADEANAKLQDALDVQRRAIEAQEADKLPAGESEQASIHGQQEADDAVLRSTVEQLEKARYELVDAIDAKNEALSQVDDAVRASEVKAQEVEHLTTELELEKKKAAEEKTVRLERMIDELKSDVDDARNFGSKSKQLAHEWQKKAQLLEVRLEEADQSNILKGESLNSAMEELDSTSSLLRDRESEVAALRDKVRFLEDELTKLKSDIVVSGQRADATEKEAADLWTEVEGLRLKLHTVEEEKMDALKSDKNTSSEIETLNEQKNQLADELEASKDELEKIKKAMEGLASALQEMSAESREAQEKYLLKQGGCRS

SEQ ID NO: 13988 - protein, 80 aa, Zea mays
  VARIANT 57: note = Ancestral polymorphism is D, Derived polymorphism is N
MGRTTPAAVAAADDDGQKTSWPEVVGWVTLNAALQISSDRPDVSTDFYSETTTLPTDYDPNRVIIVADDRNVVVRTAVIG

SEQ ID NO: 13989 - protein, 222 aa, Zea mays
  VARIANT 153: note = Ancestral polymorphism is P, Derived polymorphism is T
  VARIANT 24: note = Ancestral polymorphism is L, Derived polymorphism is P
  VARIANT 19: note = Ancestral polymorphism is H, Derived polymorphism is N
  VARIANT 14: note = Ancestral polymorphism is T, Derived polymorphism is I
MEGNLELSTLEMRTTLCIHGFYWLLYFLFTLYVLVPSLVDMKKPPEMISGNMKLVTWFQSLHRPSVFFARFQHVLSTLEDAVTDAPKATKFLGQIFARVVLEDGISLTEWDGREELAGQHALEDSLASEDLGSMLESIRVERAKYSLMCFQFPVGRIHPVYSAAILEYLTVEVLELAGNASKDLKLAIRGDEEMDTLIKGTIACGGVIPHIHKSLINKSSKE

SEQ ID NO: 13990 - protein, 588 aa, Zea mays
  VARIANT 205: note = Ancestral polymorphism is P, Derived polymorphism is S
MTLSLGLLRSGLLNRRINQPANQVLRLHLAFSSASPSPSDPSAAAAGPQTTIREGKVEIFLDESNSVFYNKTQVNNRDISIAVLRSFILKRHEEYAARSRKDNTEILQNVIAGPGDTTLSAQAKYKEPKVLEALAASGLRAIRYAVEVDGIGEVTAVDNNEAAVEACKKNIQHNGSLASSKVVPHHADARVYMLTHPKEFDVVLPSFYFHVCFLCFQHHGYKVDLDPYGSPAAFLDSAVQCVADGGILMCSATDMAVLAGGNAEVCFSKYGSYPLRGKHCHEMALRILLACIESHAIRHKRYIVPIISVHMDFYIRVFVRIFTSASTVKSSPLKLAHVYQCTGCNSFYLQNIGRIHSKDKENIAVPNFRLTLPEVCSECGHQFVMGGPLWSYPIHDKVWAASILSDIHAMREAYPAYPKISAILSSVSEVMSFSSAVHNATDIDGKIGKIDHELLEAPLFVSLHNLCAILKCTTPTMVMLQCAIRNAGYQVSGSHVDPLALKTDAPMSVIWDIMRCWVKLHPVKHRPGNHPGNVILSQEPKFQAKFSRVLGASVTRKRARFMPNPEKYWGPGTKAGRNPRTFQMDNRN

SEQ ID NO: 13991 - protein, 679 aa, Zea mays
  VARIANT 596: note = Ancestral polymorphism is D, Derived polymorphism is G
MSGSSAAGEDIVQHLSSNSNPSSSKLAKLEARMAGKAVSAPSSPPHHPMAAPASAPAISFMDQEELPETSSSDDDNCEEFLIQKNTLKRPRSPDGDNISALGNFEGSSNEAAKILDVTDTRPSLDNSNRKKQGRGRGRAGTGRGRGSKTVDQPRLTLISSAVVTNGQLDKLTNKEPQSSVQLGHDDRAALQEELSMLHGKVAFLEEELSKSRQDATNYHQLSDRVAKELKDLKDHDQQMRSKQMKVLSDLLIAVSKAERQEARMRIRQESFRLGNVGVMRAGTIISEIWEDGQAIKDLNSHLKSLLETKETIERHRKSLKKRQSDKGDGSDAETSMSEEDIVLQDEICKSRLTSIKREEEQYMRERDRYELEKGRLIREMKRLRDEDGSRFNNFQILHHRYALLNLLGKGGFSEVYKAFDLVEYKYVACKLHGLNAQWSEEKKQSYIRHAIREYNIHKTLVHPNIVRLWDIFEIDHNTFCTVLEYCSGKDLDAVLKATPILPEKEARIIIVQIFQGLVYLNKRGQKIIHYDLKPGNVLFDEVGVAKVTDFGLSKIVEDDVGSQGMELTSQGAGTYWYLPPECFDLSKTPFISSKVDVWSAGVMFYQMLYGRRPFGHDQTQERILREDTIINARRVEFPSKPAVSNEAKDLIRRCLTYNQSERPDVLTITQDHYLSYAKK

SEQ ID NO: 13992 - protein, 649 aa, Zea mays
  VARIANT 13: note = Ancestral polymorphism is R, Derived polymorphism is S
MGVGMKLLERVRRRLVPLLRRHRMALLTAPAVAALLLFFWSAAAQGVPPYKDASKDVEVRVRDLLARMTLAEKVGQMTQIERLVASPQVLRDYYIGSLLSGGGSVPRKQATAAEWVAMVGDFQRACLSTRLGIPMIYGIDAVHGHNNVYGATIFPHNVGLGATRDPNLVKRIGAATALEVRATGIQYAFAPCIAVCRDPRWGRCYESYSEDRRLVQNMTELIPGLQGDVPQNFTSGMPFAAGKNKVAACAKHFVGDGGTHDGINENNTIIDRKGLMSIHMPAYLDALRKGVSTVMISYSSWNGLKMHANHNLITGFLKGEHKFQGFTISDWEGIDRITSPPGANYSYSVQASILAGIDMIMVPNNYQDFITILTGHVNSGLIPMSRIDDAVTRILRVKFTMGLFENPMPDPSLADQLGKQEHRDLAREAVRKSLVLLKNGKPGDAPLLPLPKKAAKILVAGSHADNLGYQCGGWTIEWQGDTGRITVGTTLLDAVKAAVDPSTAVVFAENPDAGFVRNGGFSYAIVAVGEHPYTETKGDSMNLTIPEPGPSTIQTVCGAVPCATVLISGRPVVIQPFLGTVHALVAAWLPGSEGQGITDVLFGDYGFTGTLPRTWFKSVDQLPMNYGDEHYDPLFPLGFGLTTQGKKGC

SEQ ID NO: 13993 - protein, 135 aa, Zea mays
  VARIANT 111: note = Ancestral polymorphism is Y, Derived polymorphism is N
  VARIANT 105..135: note = Derived polymorphism lacks residues 105 to 135
  VARIANT 64: note = Ancestral polymorphism is S, Derived polymorphism is L
  VARIANT 11: note = Ancestral polymorphism is T, Derived polymorphism is N
  VARIANT 8: note = Ancestral polymorphism is G, Derived polymorphism is R
  VARIANT 4..135: note = Derived polymorphism lacks residues 4 to 135
MVEQIKRGISTVKLIKHPNVVQLHEVMASRTKIYMVLEFVDGGELFNKIPENLLLDSNGALKVSDFGLSAFAPQTNEDGLLHTTCGTPNYVAPERITIAEILEDEWFKKDNKPPRFEQGEDVSLDDIDAAFNDSE

SEQ ID NO: 13994 - protein, 240 aa, Zea mays
  VARIANT 28: note = Ancestral polymorphism is E, Derived polymorphism is A
  VARIANT 39: note = Ancestral polymorphism is P, Derived polymorphism is A
  VARIANT 54: note = Ancestral polymorphism is I, Derived polymorphism is S
  VARIANT 86: note = Ancestral polymorphism is R, Derived polymorphism is Q
  VARIANT 91: note = Ancestral polymorphism is A, Derived polymorphism is S
  VARIANT 119: note = Ancestral polymorphism is S, Derived polymorphism is A
  VARIANT 175: note = Ancestral polymorphism is A, Derived polymorphism is D
MEEPPPGSSKAAAARAPRVVGVLAGLLERAAERGDTATPTLADSAFRGRALPGIPVRRYAERIYRYAGCSPACYVLAYVYLDRLARGQCDAGAGEDEDEDEAAVVGIDSYTVHRLLITSVLVAAKFMDDRHHNNAYFARVGGVEVAEMNALELRLLFALRFRLNVAPDTFARYCAALECHVDTPDAGGPVPRMPPSSHVDGEEAVTSSKGKVAAAGGGSVVVQRSHRQRRAVVQIMTTAQ

SEQ ID NO: 13995 - protein, 468 aa, Zea mays
  VARIANT 19..468: note = Derived polymorphism lacks residues 19 to 468
  VARIANT 354: note = Ancestral polymorphism is S, Derived polymorphism is Y
MEPPAWSPPREEEEEEETEIDFDEEEDPEEVEPWFTSSGSEPELEPEPEPKHPAPTPSPAPAWAEPEQQPAPVTAVEATKKGEGEDARPRWPGWPGASVFRLVVPADKVGGIIGRRGDTIKRLCDETRARVRVLDAPHGDGAFSRIVLVSAREEVEAELSPAMNAAIKIFKHINEIEDINSDGTLMAPAPEISSVRLLVPFAQALHVIGKQGVTIKSIQESTGSTVRIMDEDELLSHETMGERIVEINGASLEVLNALKLVLGLLRKFLVDHGVLHLFERKNPEVAQPQQSRGNPKGSRFLYGHDPSFHAPYSRDLSQPADSLITKITRTMQIPLADVGEIIGVRGENVELIRSVSGAVVVLEKIGNGQEVRVMIEGTPSQVQTAHQLVQEALSGDRGLPSGSSYYSAEGGDGDPSLVKPPHAGPRFLHPISAIEASWDYLPWQYQEQTPRDDHRGYPTLSDYRGYLP

SEQ ID NO: 13996 - protein, 281 aa, Zea mays
  VARIANT 116..281: note = Derived polymorphism lacks residues 116 to 281
  VARIANT 95: note = Ancestral polymorphism is P, Derived polymorphism is L
MENFRLQEMGKRAVRTVRVRNISDLATEREVREFFSFSGEIEHVDIRFDTVSSGRTAYVTFKDPKALEIALLLSGATIVDQIVNITPAEDYIYIPVTEQQLMVHEVTSRSSASNAELEYSSEANVSPNSRVYVSKAHDVMTNVIAKGSAMRQDAVNKAKAFDEKHQFRANASARINSFDKRVGLSEKINNGISVVNERVKSVDQRLHVSDKTMAALLAAERKLNDTGSAVKTNRYVSAGTSWLNGAFSKVAKAGHVAGSRTREKFQLAVSNLTAKGPAVVA

SEQ ID NO: 13997 - protein, 611 aa, Zea mays
  VARIANT 170: note = Ancestral polymorphism is G, Derived polymorphism is A
MPSLKLRPILFPFQMEPRREELLHELGDMWDEIGEAEEDRRGALSALEEECLSLYRAKVEQVRQHRAQLKREISDSVAEVAAICATIGEPPSTVHTACSSLQGTGSLKEELGMIAPELAEMRRRRDERRREFADVTQRVARIQEELDLQLGGGQGQSEAHAAAVIVDVDGSDLTTTKLDELRAYLQHLQLEKESRTKKVAELVAQLHSSSLVLGMDPTEANSVVHVGADGAQVQPGDISDGAIAGLAAGIERLREIKRSRMEKLQDLLGSMLELWNLMDTPAEEQRQFQGVACNIAASEDEITEPGALSMAFISNVRIPGAPTARRRRGCRSDPPCVQVEAEVVRLENLKECRMKDLVVKKHEELKEIRRRARLPEDDDATVVMVFDAMDSDADRAAILEWLEVQISEAKDLEFNRKDVLEKMDRWQAALEEESWLEEYSRNENRYNVGKGTHLVLKRAEKARALVSKMPVMAEALMAKVVAWEKERGAKFEYDGEVLLDVLDDYGNARKEKEQERKRQRDQRRLLQQVQGAAAAADRDVSSPVAHPPPKNIKNVTRTLSMGGNNTSGGGSARKAAPAAARPGTPSFLKSPLSARRGGSDEGHMMASESFE

SEQ ID NO: 13998 - protein, 128 aa, Zea mays
  VARIANT 12..128: note = Derived polymorphism lacks residues 12 to 128
  VARIANT 67: note = Ancestral polymorphism is V, Derived polymorphism is E
  VARIANT 87: note = Ancestral polymorphism is S, Derived polymorphism is L
MLLGVDKRRKGQDGAAMEEEDSGGGDYDTVLKAHARSGGGDYGAVLKARARSGASDGVLHDCLLMYEVVEAPCANKYKNVDVVSTISEFSSSLETASGHWRVDCLLRAERMPFYFAVLDQGARSVSSG

SEQ ID NO: 13999 - protein, 126 aa, Zea mays
  VARIANT 115: note = Ancestral polymorphism is D, Derived polymorphism is V
  VARIANT 114..126: note = Derived polymorphism lacks residues 114 to 126
  VARIANT 93: note = Ancestral polymorphism is P, Derived polymorphism is S
  VARIANT 54: note = Ancestral polymorphism is E, Derived polymorphism is D
MEEEDSGGGDYDTVLKAHARSGGGDYGTVLKAHARSGASDGLLHDCLLMYEMVEAPCAKKYKNVDVVSTISKFSSSLETVGGQLGTGGWTVFSVLKECHSISLCWTRVLEVFLQVELLLFGHCYII

SEQ ID NO: 14000 - protein, 564 aa, Zea mays
  VARIANT 14..564: note = Derived polymorphism lacks residues 14 to 564
MSEAEAAGSLSRRRMEDEEGAAAMEADAAHSGRGEAEDEEVESSDYTSEDEGTEDYRRGGYHAVRVGDSFKQGAYVVQYKLGWGHFSTVWLAWDTVHSRYVALKVQKSAQHYTEAAMDEVKILKQIADGDPDDSKCVVKLLDHFKHSGPNGNHVCMVFEFLGDNLLTLIKYTDYRGIPLPMVKEICRHVLIGLDYLHRTLSIIHTDLKPENILLVSTIDPTKDPRKSGVPLVPPSMRTDEPPPKVPAQSGNGGLTKNQKKKIRKKAKRAVAATSEGSSAVASADTDGSDDRGDLGTTNEGSPRQDGAKKRVTRDRRGSKGAKKMMAMKADLKCKLVDFGNACWTYKQFTNDIQTRQYRCPEVILGSKYSTSADMWSFACICFELATGDVLFDPHSGDNFDRDEDHLALMMELLGMMPRKIALGGRYSRDFFNRYGDLRHIRRLRFWPLNKVLMEKYEFTEINANGMADFLVPILDFVPEKRPTAAQLLQHPWLDVGPLRQQPKTRPESARSPGDGVSEKQKKEKEEREAMAVELGNIAIDGASSRMANDPQSSTNKTTATSSKK

SEQ ID NO: 14001 - protein, 821 aa, Zea mays
  VARIANT 117..821: note = Derived polymorphism lacks residues 117 to 821
  VARIANT 75..821: note = Derived polymorphism lacks residues 75 to 821
  VARIANT 43..821: note = Derived polymorphism lacks residues 43 to 821
  VARIANT 29..821: note = Derived polymorphism lacks residues 29 to 821
MAVEKSSSGTSTPSTTSTMDRFQKIVLSWDYLRLIAESKGGKQAKVLQHVKNTYVSVAEYLGVFEPLLFEEVKAQIIQGRSNDEEESGMDWRRGAVGSCTESEGFHKLSVAVEDNFQDNVSENDLLLISKEKFEEGSTPNAYAFALVEQRGGGIHISLRTFVAGEIQNLNVAKPVKSTRLQHFASIIASQNSLLWILKVCSLSTIMREFTAMHSVASLPFKDLILSATEAHKDGDDQSRAWNVPEPLMDYLKVNLNDSQLEAVNAGLSRRSFVLIQGPPGTGKTQTILGLLSAVLHSAPARMQIKGGFDVLKHGPELDIDGKRAHWIKASPWLLGANPRDLIMPVDGDDGFYPTGNELKPEIVSSNRKYRAHVLVCAPSNSALDEIVLRVLKTGIRDENNNTYNPKIVRIGVKALHSVKAVSMDYLIQQKLSGVDRTLDGGRRGAGEYDRIRASILDEAAIVFSTLSFSGSSIFSRMTRAFDVVIIDEAAQAVEPATLIPLIHGCRQIFLVGDPVQLPATVISQTAQKLGYGTSLFKRFQAAGFPVQMLKIQYRMHPEISTFPSKEFYEGVLQDGEGLSRKRPWHSYSCFGPFCFFDVDGIESQPSGSGSWVNQDEVEFITLLYHQLALRYPELKSSPEVGVISPYRHQVKLLKDSFRSTFGDQSRELIDVSTVDGFQGREKEIVIFSCVRCNKEQKIGFVSDFRRMNVAITRAKSAVLVVGSASTLKQDKHWNNLVESAKERNCLFKVPKPLTAFFAEDNLKTMKVERRPPPELNARVLEEINQEVVRQELMNVDDAADHADAGDDDDADMDADDGGGDD

SEQ ID NO: 14002 - protein, 105 aa, Zea mays
  VARIANT 55: note = Ancestral polymorphism is R, Derived polymorphism is C
  VARIANT 54: note = Ancestral polymorphism is H, Derived polymorphism is R
  VARIANT 46: note = Ancestral polymorphism is L, Derived polymorphism is P
  VARIANT 38: note = Ancestral polymorphism is T, Derived polymorphism is I
  VARIANT 24: note = Ancestral polymorphism is A, Derived polymorphism is D
MPQVVGSASTLKQDKHWNILVESAKERNCLFKVPKPFTAFFAEGNPKTMKVERHRLPEPNARVLEEINQEVVRQETMNVDDAADHADVGDDDDDGMDADDGGDDD

SEQ ID NO: 14003 - protein, 284 aa, Zea mays
  VARIANT 150: note = Ancestral polymorphism is R, Derived polymorphism is G
  VARIANT 144: note = Ancestral polymorphism is N, Derived polymorphism is K
  VARIANT 138..284: note = Derived polymorphism lacks residues 138 to 284
  VARIANT 71..284: note = Derived polymorphism lacks residues 71 to 284
  VARIANT 49..284: note = Derived polymorphism lacks residues 49 to 284
  VARIANT 15: note = Ancestral polymorphism is P, Derived polymorphism is L
  VARIANT 5..284: note = Derived polymorphism lacks residues 5 to 284
MDRSWVYNSVPFSEPYMLGVEQFMAHVKSRFSAHEKIKCPCRKCLNHIEKSQDEVQEDIEINGISRCYTRWVYHGEGDIDVQEDDDDTLAVGYEYMSWDGNNHAPLDDEGQAKDVILDDSERGVQDFALSCQFFPRAQEPWLSNLLQWWRVLTVDIHYPEGTPNILPRTKTYHMSHASKFQQSQPLQTRMKFGQCKLFNHFTDISTVLPRTLEKSLSNVIGVCGISSKHPHILAVWAHYQWQPGHIIDRRLQIDANGHSSCSNNIKGSGFYDIPSCASPPRARS

SEQ ID NO: 14004 - protein, 1557 aa, Zea mays
  VARIANT 750..1557: note = Derived polymorphism lacks residues 750 to 1557
  VARIANT 184..1557: note = Derived polymorphism lacks residues 184 to 1557
MGTPVNIIVGSHVWLEDPGEAWVDGVVTEIKGGDATIATTNGKTVVASLGSVYPKDTEAPPAGVDDMTKLAYLHEPGVLHNLSCRYGLNEIYTYTGNILIAVNPFQRLPHLYDVHMMEQYKGASFGELSPHLFAIADACYRALINDQASQAILVSGESGAGKTETTKMLMRYLAFMGGRSGTEGRTVEQQVLESNPVLEAFGNAKTVKNNNSSRFGKFVEIQFDKHGKISGAAVRTYLLERSRVCQVSDPERNYHCFYMLCSAPPEDVKRFKVGDPRSFHYLNQTNCYEVANVDDAREYIETRNAMDIVGIDQEEQDAIFRVVAAILHLGNINFSKGQEIDSSKLRDDKSVHHLKTVAELLMCDEKALEDSLCQRVIVTPDGNITKPLDPGSAALSRDALAKTVYSRLFDWIVDKINNSIGQDPDATNIIGVLDIYGFESFKINSFEQLCINLTNEKLQQHFNQHVFKMEQEEYTREEIDWSYVEFVDNQDVLDLIEKKPGGIIALLDEACMFPKSTHETFAQKMYQTYKVHKRFSKPKLARTAFTINHYAGDVTYQADQFLDKNKDYVVAEHQALLNSSRCPFVANLFPPLPEETSKQSKFSSIGTRFKQQLQSLMETLNTTEPHYIRCVKPNAVLKPGIFENYNVLNQLRCGGVLEAIRISCAGYPTKRTFDEFIDRFGMLAPELVDSDEKAACAAICDRMGLKGYQIGKTKVFLRAGQMAELDARRAEILANAARLIQRRIKTHLMRKEFIKLRKASVQSQKFWRARLAKKIFEYMRRDAASIRIQKHVRAHSARKAYLQVYESATAIQTGLRAMAARNEHRFRRETRASIIIQTRWRQHRAYTAYKQQQKASLILQCLWRARIARKELRKLRMEARETGALKEAKDKLEKRVEELTWRLDVEKRLRADLEEAKSHEIEKLQSALQKMQENLEEAHAAIVNEKEAAKLAIEQAPPKIVEVPVIDNAKLEELTTQNKELEDELSTFKQKAEDLENKLIEFQKQSDELSQETQEQASKVTELQELVERLEASLSNMESENQVLRQQSLVVASADEDKSKQIESLESKIATLESEIELLHSNSALAIQAVVTPEMNQTTVIEEFDKGHQLEEVKTVNEQVVVPPVKNLSKQKSLTDRQQENHDALIKSMVEDRRFDDKKSAAACIVYKSLLHWHSFEAEKTNIFDRIIQIIRSSVEGAESSGELAYWLSTTSTLLYLLQNTLKASSSLSKGTNRSRTTTGSLFSRMVQSARTSSGLGIASGYSGMVGRPDTDASMVEAKYPALRFKQHLTAYVEKIYGIIRDNLKKEISPFLTMCIQAPRANRVRPSRGSLKSIHSNALARQASSLHWQNIVKCLDHTLETMKKNYVAPVIIRKTFNQVFAYLNVQLFNSLLLRRECCSFSNGEFLKAGLQDLEQWCSRTTEEYVGTSWDELQHIRQAVGFLVLHQKSHKILEEITNEICPVLSITQIYRIATMFWDDKYGAQGVSQEVIGRMRTMTTDDSVTTPNSSFLLDDDSSIPISLDDIARLMLHIDPSDVEPPPLLRQNSQFHFLLQQHTD

SEQ ID NO: 14005 - protein, 158 aa, Zea mays
  VARIANT 1: note = Ancestral polymorphism is M, Derived polymorphism is L
  VARIANT 2: note = Ancestral polymorphism is G, Derived polymorphism is A
  VARIANT 66: note = Ancestral polymorphism is G, Derived polymorphism is W
MGFFRRIAGFFGVSRDDADHSDSPSSAGVAAELPRDRAAAAHGARRGFSVQVPVPVPVERHGPGPGPVLLPCPQGDGGVQGFRWYTRQLSMDEDGDVADEFLDEIIPESSVNNAKSPVGRFQVKYNTKRTALALRKHVIAVDGEIRHSLEHQGQLRWV

SEQ ID NO: 14006 - protein, 290 aa, Zea mays
  VARIANT 195: note = Ancestral polymorphism is R, Derived polymorphism is Q
  VARIANT 200..290: note = Derived polymorphism lacks residues 200 to 290
MWGAQPMVPPYGTPPPPYVMYPPGAVYAHPSTPPTMHPFSHYPMPTNGHAETPGTAPSAPEMNGKSEPGRTSAPSANGITSHSESGSESESEGSDANYENDSHSKDNDGKEDGNSQNSISYSASQGVLNQTMAMLPIQPGAMVGGVSSSTANLNIGVHYWEAPGSAAVSATHGKAPAGSARGDQWDERELKKQKRKQSNRESARRSRLRKQAECEELGQRAETLRSENSSLRAELERIRKEYEQLLSQNASLKEKLGGSSDPIPDMNEQNDGNGSDKKQSDSDAQPGSES

SEQ ID NO: 14007 - protein, 313 aa, Zea mays
  VARIANT 259: note = Ancestral polymorphism is T, Derived polymorphism is A
MAPGSSIVTVVPESDCGDDDGLSESLGGIMLDVDSASKPWSTSASLANVALSSLCGLNDLLECPVCTNSMRPPILQCPNGHTICSSCKHRVENHCPTCRQELGNIRCLALEKVAEQLQLPCKYQSTGCTEIHPYKSKLKHEELCRFRPYSCPYAGSECLIAGDVPFLVSHLINDHKVDLHEGCTFNHRYVKPNPYEVENATWMLTVFKCFGQHFCLHFEAFVLGMAPVYMAFLRFMGEESEAQGFGYSLEVGGGGRKLTWQGTPRSVRDSHRKVRDSFDGLIIHRNMALFFSGGGRQELKLRVTGRIWREQGQ

SEQ ID NO: 14008 - protein, 256 aa, Zea mays
  VARIANT 191..256: note = Derived polymorphism lacks residues 191 to 256
  VARIANT 139: note = Ancestral polymorphism is R, Derived polymorphism is C
  VARIANT 135: note = Ancestral polymorphism is R, Derived polymorphism is C
  VARIANT 25: note = Ancestral polymorphism is L, Derived polymorphism is V
MAASSSFKPNPLSLSVPDPALDRWLRDSGYLDLLDSTTTTGRPSSSASGPSAPSSAAYSPGAGQASSGVAADVLAFARTLASLLALNPFARLSTADLAAPTPSWSLAFVGPPGAASYSWPPTPTQARLRVQENFRRYARNYAALAILVFACCLYRMPMALLGMLASLAVWEGVRYCRDHWDLTTRAPGVAQALLHCAQIATAVLLYVCNLQFALVYAVGVSYALMLLHASLRRLTTPSSLPDASSNKNRRAQPRRS

SEQ ID NO: 14009 - protein, 106 aa, Zea mays
  VARIANT 44: note = Ancestral polymorphism is L, Derived polymorphism is V
MAPSISVGAAAPSRAAGASTKKSADEVELLRRRNAELEREVAALRLELGAARRRAETAEEAEERLCVQLGDAEVEALELARAYQAHVHELARELAAARAAPARPAR

SEQ ID NO: 14010 - protein, 119 aa, Zea mays
  VARIANT 71: note = Ancestral polymorphism is A, Derived polymorphism is T
MARVFRGSLLLMSPAAAAAAAAAAGAKKAASTKPRAPAGITKPMPVSEAFRRFAGGAREVARSEAIKLVWTHIKAHGLQNPSNKTEINCDATLKSLFGGRDKIGMMEVSKLLSPHFLKN

SEQ ID NO: 14011 - protein, 356 aa, Zea mays
  VARIANT 209: note = Ancestral polymorphism is G, Derived polymorphism is R
MDGEAIRMGGGNLAPAYLSGAATATAITMQDPNQNQNQNQNQNQSQFLFSANSTALQLFGSAAVPTVGPAGYINYTGNTHLPVMNQASTSNIGAGNENLLKLQVPLSDYHQQSAGRLARVGNPGAVSTGLRLSYEDDERNSSITSGSGSMASLPATMSCVDGFMAELDKESKEINFYLRLQADQICKRMKEANQRWMVSFLASVNQAVGKKLRDKELEVEAVNRKSKELNEQMRQVAMEVQSWQSAAMYNQSVVNTLKNKLMQLVAQNTNLAREGMGDSEDVASSQSPDAGGDALGGLRGTATVGLGACRCCGRKEASVLVMACRHLCLCADCDKVSDVCPVCRFPKSGSVEINMS

SEQ ID NO: 14012 - protein, 243 aa, Zea mays
  VARIANT 95..243: note = Derived polymorphism lacks residues 95 to 243
MALAARLVSRSRQLYSVQATLGNGGVTQVRSFAKDAAPADRPPVGGDDLLKGIFFEVKKKFETALGVLKKEKITIDPDDPAAVSRYAQVMKTVREKADLLSDSQRIKYTIETFTKGIPDARTYLNTLQQLRIKSGLIDHLGIEPLMMEALEKIEKDIKKPLLRSDKKNMATLLAEFDKINKKLGFRKEDLPKIEEELELEIAKSELTELKKECVEAMETQLKREEFQDEEMPDVRKLDIRNFL

SEQ ID NO: 14013 - protein, 151 aa, Zea mays
  VARIANT 25: note = Ancestral polymorphism is G, Derived polymorphism is R
  VARIANT 63: note = Ancestral polymorphism is R, Derived polymorphism is C
MGLPEVKQKKKKRLVHSTRGEDRHGHHHQDGSEAWVLGLSGAGIAALPLHQLKPVRVEVKAGRRRHAAATEDGEEEEEPVTPRGEGWRIPAEAVACPPAPKKPRTAVFIVRDNAAAGGRRCNYDGGDVVDEFFRVPADLEAVFVARAAKAN

SEQ ID NO: 14014 - protein, 588 aa, Zea mays
  VARIANT 30: note = Ancestral polymorphism is Y, Derived polymorphism is C
MAGAVSVSAHRRQWRYTWEALNHLPLLRLYLLPRAALPFRIPSDLRADLRLQGSLLHLSFSLPGDGAAVALRVPVPRVLVDPSAPVECRAAAAGDHLELRLALVLPVDHPVVAAAFPPPPGAEPPASLALRDDLKSLSTGDVHLYCKNCSSRLTKQPLRKIMEMPSVDWVDVADNWVGGCCTSFGGAGEKLVSQFIRAYGRLEGTSLLDATSITVETDNLETDLVSQVACSALSRHFVAIKEDIFNVSVEKDHTTGKIKLKNSEEQANITATHAQPPIILEEGPSVSCSETNGVTQTNQPGISQTEADTDAYFEKSENDCCVEKVGKSKKEVDLLLVDPCRCCCVNGYSEKAEDNPSQLSLVNEKKQNMLEIKRDYKLTKTISLGSSFIVKASNLLNDFEWVELLCGQCSSPLGSYPSQCSLGPADGRLRLFKCYTSTEIPVTGPHDVFRGHTLERVFVNLLLEVAEDEISFRTLVRDLKTKRPMLQLVLLSSKAWLSSGCCYENDIDGSHGTTDLQPSVKLLYSDYSNASEADLRIVEAWASKYRAEELYMMKRQIDELTECLSSGRNNFPVSCSSLEGMRLSSLRR

SEQ ID NO: 14015 - protein, 560 aa, Zea mays
  VARIANT 348..560: note = Derived polymorphism lacks residues 348 to 560
MDPAGPRVATDPAGSGAAPPREELDRRGGACSGAAAAEGSASRLAGAGLGDPRAGILESSGQAEAYLHTCTMDVSQLTAEGVTQCGARVSLLPQIGALQSETPCLTLGRDSSAESMEKLHGSESLPCCKENIGTVRQPKPDPEHVDNRMSVARLGLDLNTVDSSDAAELNPFFPYKKLGQSKVSDPSECGSTTAATAESESHRKWREMKRNGFLSSSHGNAVVPRPRGRPPKRKKDDEFKRSTSTQHGQANKSVKVAAPSGLLSGLNPGIINHVRNSKQVYSIIKAMVHSERLENEKQPAFTSQTGGRGREASEGIQDEKYGAGFKKCHMLMKDNNAVFHQALPTTSQFLAQDGDRLKLQLSSAVTMSSDRACSTSADDPATNHDYMTVLSVKAASVASQWLELLHQDIRGRLAALKRSRKRVRNALHTELPYLISTEFSSNQENESSIANTCDAGCTEKAVSEAHVARWRSLFVQMDRALQEEGKQLENRLKQVQEMQSNCDKGLKHMSCEAPLLGPIPELWKLKNPDISESEWAVQAAAASIYSTCNMAMRTENVPCF

SEQ ID NO: 14016 - protein, 218 aa, Zea mays
  VARIANT 175: note = Ancestral polymorphism is V, Derived polymorphism is L
  VARIANT 163: note = Ancestral polymorphism is F, Derived polymorphism is C
  VARIANT 111: note = Ancestral polymorphism is A, Derived polymorphism is V
  VARIANT 92: note = Ancestral polymorphism is P, Derived polymorphism is S
  VARIANT 63: note = Ancestral polymorphism is S, Derived polymorphism is R
  VARIANT 58..218: note = Derived polymorphism lacks residues 58 to 218
  VARIANT 27: note = Ancestral polymorphism is T, Derived polymorphism is K
  VARIANT 3: note = Ancestral polymorphism is A, Derived polymorphism is D
MNAKITDFGLALMLAPKSTVEVLVMGTYFLETAPPLRVCSTKSSSTSVSVLDFLCHSQTLVQSKKEGTEDDNGSGRAGGDGGVAGGRGRVQPLHSWSLCVCTHYLLLEFYAPWCGHYQNMALFLDEVIVLLQKDEGATIAKMVTYNRILIVRVGTRDIVKSLFQDDSPTTLLAHVMGTIGSIEQAMLAQGRHTYKYFIKNHMLYEKKSGKVCIWKNGI

SEQ ID NO: 14017 - protein, 923 aa, Zea mays
  VARIANT 163: note = Ancestral polymorphism is L, Derived polymorphism is S
  VARIANT 198: note = Ancestral polymorphism is I, Derived polymorphism is N
MAAGSGGGGFLGDVNDPWLKPRLLRAVVTGRLPQPGAAAELSPTEVASILEVVRTHGLLTEDLPGRGALVNPKLAEAWRAAVDAWVERVVALVESDSTYSCWLGTCFLGVTFQECRNDRFAESHSIWFEKILSNLQQSSSFQLVIVISCTSMSDLFVRLAKFSNLKKEGSSFAGRVVEPVLRLLNQNGLVAVWSTLFILMAYLFEFNHSMVESAIAAKIMSNVKPSENSPSLTYTVSMLQKFARTLALLPSVRVSEDSWSLMIRRILIVVNNLLNDAFIGLEEEKKGHDIMLLLVPPGTDPLPTLGDEVMPGGNVHIMKKFRVFTVPTISALTLCCSVMLTSYYPVQFYSFIVKKVNVPIHALIALMRRVLLVDGSLHNKLFPSTTSLHQELICFDLPSLHSTFLDLLNATIKGMRSQLLPHGASIIRLITEYFKIAKLPTLRTKTYSILQLLLTSMGVGTSLHLLEATVRNAVADLNDDGEINMTMINTNSSQLTNESSSKVYSKKRKQEPQMQNSTISGSEKVAISPRKRKGSSIPITSKGVAPESTGDVTLSTPHSVKIAALETLEVLLNVHIYCYLIINRFLCHYQLITEQGGSLRMDRWRSEVDMLLINVARSACGMGGSYEQKPSTFGEPNISDFQLASLKGLLASFLSSHARPPYLANGIELFRKGKLEIGTKVAEFCSHALLALDVLVHPRALSLERTVPASSGFNYTAQKKTVFGAGTHQISPFGDQPQAMEVEDMYDDWLISNNNEPPEVPVNGSDAVVSKGVLVEDGKQLNPIAEDPKVDPPRITDAAQDAPASTKTDVKVVDAAAATAAKPNTAENPSSSNAVPSPVRTTDSDSRKHASFPEQDSPHENKSAAVHPGEASATPGVGSSHHRHEAPEARSASFTELFGSESGIESESEDLMPDIVDGDPDSD

SEQ ID NO: 14018 - protein, 274 aa, Zea mays
  VARIANT 190: note = Ancestral polymorphism is R, Derived polymorphism is C
MIWVLFIMQLASHGTQTEETMQFVPHCDHAEVSDSQSTSSQLNLIERSTEHLASCEINPVSVDDDNDNEHIDANEETHLVIQDVPQCRICLDSEGDDLIAPCRCKGTQKYVHRSCLDNWRSTKEGFAFSHCTECRAAFFLRANVPPDRWWLRLKFQLLVVRDHTLIFFIVQLVVAFMGMVIYRFYGDELREMFGYEEHPYAFYAMAILAIVLVGLLYGFFIAIICGQRITERHYHVLAKQELTKEYIVEDLEGADHVPDLDPSHVIELKILGLY

SEQ ID NO: 14019 - protein, 170 aa, Zea mays
  VARIANT 92: note = Ancestral polymorphism is D, Derived polymorphism is G
  VARIANT 75: note = Ancestral polymorphism is A, Derived polymorphism is V
MASSSGSGSSGSLSAATAALAAAAGTEEELRALMEQRRAKRMLSNRESARRSRMRKQRHLDELTAQAAHLRRENAHVATALGLTAQGLLAVDAENAVLRTQTAELAARLGSLNDILACMNTNAVGAVAVSLTAAAAAAASSDPCLAFDGATALDDLLRSCPENMFQYQLC

SEQ ID NO: 14020 - protein, 118 aa, Zea mays
  VARIANT 24: note = Ancestral polymorphism is L, Derived polymorphism is S
  VARIANT 19: note = Ancestral polymorphism is F, Derived polymorphism is L
  VARIANT 13: note = Ancestral polymorphism is R, Derived polymorphism is P
  VARIANT 3: note = Ancestral polymorphism is R, Derived polymorphism is L
MVRSLIRYADSLRFCWLLFDLMILRILSWKSGQVLQNDIDLLNPPAELEKLKHKKKRLVQSPNSFFMDVKCQGCFSITTVFSHSQTVVVCPGCQTVLCQPTGGKARLTEGCSFRRKGD

SEQ ID NO: 14021 - protein, 438 aa, Zea mays
  VARIANT 141..438: note = Derived polymorphism lacks residues 141 to 438
  VARIANT 195..438: note = Derived polymorphism lacks residues 195 to 438
  VARIANT 287: note = Ancestral polymorphism is S, Derived polymorphism is R
MEDNAVEEPELSGAAEFAPALVAAHPHGNSVAVAIGPELRVFDLRAGHPVSLSDDCGGHSHSDAIRAICFSVSGALFASAGDDKLVKVWKTDSWRCIQTITSEKRVSAVVISNDDLYVSFADKFGVVWLVTLREDSAEQVSVDNKPVSILGHYCSIITSMKFSPDGRFIATADRDFKIRVTLFPKNPLKGAHEIQSFCLGHTDFVSCITFTSISENQSFLISGGGDSTVRLWDYVNGCLLDTFQAKDKSYLQMAELLGPNETDDSSLAITDICPSNDGSLVAVAIQSFSGIMLLACDLVGKKLSFLKVITMEKSYIPTSLASSPSSELLWTVMGASNMPSQASSHLLTRLRIITCFQKDRLSSSDAGPATLEDGDVPHGEKLLLALQGSLDVAKQEEVLASVLAALKVSMHKMLVKKHYSEERREQRKRGRNDKKMKN

SEQ ID NO: 14022 - protein, 537 aa, Zea mays
  VARIANT 238: note = Ancestral polymorphism is L, Derived polymorphism is P
MCRLRLLLPFFLLLRPIPHASQPAAPSPALQCALNFTALLPFLAPPLPSDDASRCAVATQSVAFLLSLHLAATSSFVLPPDASSCLSPLRAALPYPLPASACGLSGLDAALASPGCGNVSTVADFDALVPPSSRGDIDASCDRDLSAVPDCTACSTALSKAAAAYLLAGSPSARSNNVTGCVQYPSIYAGAEASPHGPADPATAYCLFLLKANPPQSHSSGAAPWVYGVAFGSLAAVLLLAAALGCCFVVRRRQARDAAAALAADSRSKRSQAMESISASTTLVKFTYDDIKAATDGFARKSIIGQGGFGNVYKGVLRDGAEVAVKRFKNCSAAGDAAFAHEVEVVASVRHVNLVALRGYCIATTQREGHQRMIVCDLMHNGSLYDHLFAAGECQLAWPLLSGKKAFISLSEGQSFVLTDWAWSLVRRGRTVEVIQEGMVDPGPTKVMEKYVLVGALCTHPQLHARPTMEQALKILEADSVPSPLIIPERPIPVVANLAEIERSASSSGSGQLFSPSGFRSFIHANEDAALVSPNDT

SEQ ID NO: 14023 - protein, 142 aa, Zea mays
  VARIANT 95: note = Ancestral polymorphism is N, Derived polymorphism is K
  VARIANT 93: note = Ancestral polymorphism is N, Derived polymorphism is I
  VARIANT 85: note = Ancestral polymorphism is S, Derived polymorphism is F
  VARIANT 83..142: note = Derived polymorphism lacks residues 83 to 142
  VARIANT 79: note = Ancestral polymorphism is E, Derived polymorphism is K
  VARIANT 71: note = Ancestral polymorphism is P, Derived polymorphism is S
MDDPHERAVCLEKDDTMARAHLLAANDGATEGMSPDVATAPKSKGCLMIGEYNKVAKKMSTEPVELLEFDPIELLFPFELNKQISCTLPLTNNTNKQVAFKIVDEANTKLMRDYVVERSGSNRYLGGPLPAAIGKLLKLEYL

SEQ ID NO: 14024 - protein, 183 aa, Zea mays
  VARIANT 87: note = Ancestral polymorphism is K, Derived polymorphism is N
  VARIANT 39..183: note = Derived polymorphism lacks residues 39 to 183
  VARIANT 37: note = Ancestral polymorphism is R, Derived polymorphism is H
  VARIANT 16: note = Ancestral polymorphism is N, Derived polymorphism is I
MEESGFAITSINGRINRAVWGPLIRTIVTAREDATIRIWDSEEAQEDEERERVCQKQGHQREGDHGGVVDAELDFGKKLPSFFFIQKRMAFSDDGKMKPNLFRTRGNRCIAMTNNGVEKKNKRSSNRRCAKKYPTFFNTNCMSSYFQLEYKAEGLMNFVAPVHNFSETYVKVDYELGYNVHLH

SEQ ID NO: 14025 - protein, 654 aa, Zea mays
  VARIANT 9..654: note = Derived polymorphism lacks residues 9 to 654
  VARIANT 58..654: note = Derived polymorphism lacks residues 58 to 654
  VARIANT 166: note = Ancestral polymorphism is G, Derived polymorphism is D
  VARIANT 197: note = Ancestral polymorphism is G, Derived polymorphism is R
  VARIANT 224..654: note = Derived polymorphism lacks residues 224 to 654
  VARIANT 233: note = Ancestral polymorphism is S, Derived polymorphism is I
  VARIANT 290..654: note = Derived polymorphism lacks residues 290 to 654
  VARIANT 404..654: note = Derived polymorphism lacks residues 404 to 654
MQVVPFKAWEAEVGSGRIRSRPAPVDAPMSGHLDRFARPCFEGRSSHDECRDHKSDFEVSEDEKKTRMGSLKKKAIDASTKIRHSLKKNRRKSGSRVLSVSIEDVRDLEELQAVEAFRQALLLDELLPARHDDYHMMLRFLKARKFDIDKAKQMWMDMLHWRREYGTDTILEDFEYTELDAVLQYYPHGYHGVDKEGRPVYIERLGKVDPSKLMNVTTMDRYVRYHVKEFERSFLIKFPACSVAAKRHIDSSTTILDVQGVGLKNFSKTARELIQRLQKIDNDNYPETLYQMFIVNAGPGFRLLWNTVKSFLDPKTTAKIHVLGNKYQSKLLEIIDASELPEFLGGTCTCPEYGGCLKAEKGPWKDPNILKIVQSGEVHCARQIVTISNGEEKIITYAKPKHHSMRGSDTSTAESGSEADDAISPKALRSYIQHPKLTPVREEVKIVRATSFSTRLPEYDVPVVDKAVDATWRREQPRKIPFMPQDADSSVKTMSRPSDSSWDKIVATLMACLMAIVMLVRSVKDLVTRRLPYKGGSEEIHSTLYPDPIQKEEFRPPSPIPGFAEADLFAVVLQRLGELEEKVQMLQEKPSEMPCEKEELLNAAVRRVDALEAELIVTKKALHEALIRQEELLAYIDRKEIAKAQRKKKAMLCY

SEQ ID NO: 14026 - protein, 145 aa, Zea mays
  VARIANT 112: note = Ancestral polymorphism is G, Derived polymorphism is E
MFGFQKVSFRIFLMQVQPTLIDRKQVLSNRCIASISVVLIALVIGGIDRCLDSKESTLVIALIDGVIGHYACCNGDTWSSELDILCKAEPRIMTTFKVLVRQATIGGVTIDGLLAAAARFSIGLAFVLIEFSPLNVLLMYSKTSC

SEQ ID NO: 14027 - protein, 70 aa, Zea mays
  VARIANT 19: note = Ancestral polymorphism is F, Derived polymorphism is L
  VARIANT 31: note = Ancestral polymorphism is V, Derived polymorphism is M
  VARIANT 44: note = Ancestral polymorphism is E, Derived polymorphism is K
MDDIVVFTDENRILRTELFDEAQKVTTVCAVPVGILGKDDGASESFLQAPSCDVEGNLVGYRVSQETATY

SEQ ID NO: 14028 - protein, 274 aa, Zea mays
  VARIANT 52: note = Ancestral polymorphism is P, Derived polymorphism is L
MFRNQYDTDVTTWSPQGRLFQVEYAMEAVKQGSACVGLRSSTHAVLAAVNKPASELSSYQRKVFRVADHAGVALAGLTADGRVLSRFLRNECINHSFVYEAPLPVSRLALKLADKAQVCTQRSWKRPYGVGLLVAGLDESGAHLYYNCPSGNYFEYQAFAIGSRSQAAKTFLERRFQGYNDYTPEQLIKDALSAIKETLQGEKLSSSNCTVAIVGRKEDGTIEPFEMIGAARIQELIDSMEVAEEAPAEEASSMQEEERGPEDAAAAAPAPMDI

SEQ ID NO: 14029 - protein, 223 aa, Zea mays
  VARIANT 43: note = Ancestral polymorphism is P, Derived polymorphism is S
  VARIANT 56: note = Ancestral polymorphism is D, Derived polymorphism is G
  VARIANT 75: note = Ancestral polymorphism is E, Derived polymorphism is V
MAMEEGSGAVEKGPAVGTVADASASVIGEGAVKEEAGGRRQPPAGYAAVVIGGTFDRLHQGHHLFLKAAAELARERIVVGVCDGPMLAKKQYADLIQPIEKRMQNAMDYIKFIKPDLDVRVEPIVDPFGPSIVDQGLEAIIVSKETLPGGHAVNRKRAERGLTQLQIEVIELVPEESTGDKISSTAFRKMEAERALQQQNKQDDTAVGTPVGVQNIAVQSHGA

SEQ ID NO: 14030 - protein, 302 aa, Zea mays
  VARIANT 23..302: note = Derived polymorphism lacks residues 23 to 302
MALQAQQQATPSPTRDRAGSGEWLADTEKLPGAAASPEDVVVASTHHAAAAARYVPPRATSHTAEPNPGRGGGGGWYSWNGGRRARHDPPAPRRQQPAKTPPPAPPLPAAPPPPPAASPAPAPRAPPPHAQVRSADRVVPAILSRKRRAAVMQRAALLARAAAAGLCLAALAVLASDTRRGWARDSYSNYAQFRYSEAVNVVGFLYSVFQFVALAELMRRNKHLIPHPKRDLFDFTMDQVVAYLLISSSSSATARASDLIENWGSDSFPSMANGSIAISFVAFVVFAICSLISAYNLFRRDM

SEQ ID NO: 14031 - protein, 221 aa, Zea mays
  VARIANT 23: note = Ancestral polymorphism is S, Derived polymorphism is L
  VARIANT 32..221: note = Derived polymorphism lacks residues 32 to 221
  VARIANT 77..221: note = Derived polymorphism lacks residues 77 to 221
  VARIANT 104..221: note = Derived polymorphism lacks residues 104 to 221
MADLLQAMETFTQEHVIGIPLTSFAYADEERQGKSSCSTMVHKKNKKSSFIHRMNKLSHKTDSYMQGFKEHLTMGPKISETIKGKLSFGAKVLQAGGIDKVFREYFAVEKDEKLRKAFQCYLSTTAGPIAGMLFISTKKIAFHSDRPLSFTSPKGGSTRVPYKVLIPTERMKSASVRENLYNPDEKYIDVVTVDGFDFWFMGFVSYEKSFKYLQQVIMELR

SEQ ID NO: 14032 - protein, 176 aa, Zea mays
  VARIANT 5..176: note = Derived polymorphism lacks residues 5 to 176
  VARIANT 47: note = Ancestral polymorphism is K, Derived polymorphism is N
  VARIANT 51: note = Ancestral polymorphism is D, Derived polymorphism is N
MTAREPRGFGFIQYFDTEDASDAKYHMDGKMLLGREIVVVFAEENWKKPFDMRAREKISGRGRSYDGRLHSRSPGLNDSPRGRSRSQSRSYSPTLKQKHYSRYEFLPSSYMLMKTPCARSVPIQLVGSHTILTGPRLLDLGRDLCRVPQLSTDQGVQAPLLAGLLVDRGLSLLASE

SEQ ID NO: 14033 - protein, 224 aa, Zea mays
  VARIANT 12: note = Ancestral polymorphism is R, Derived polymorphism is T
  VARIANT 29..224: note = Derived polymorphism lacks residues 29 to 224
  VARIANT 118: note = Ancestral polymorphism is E, Derived polymorphism is K
MHSSSTDNMTSRPPFSGSCTTSVNSNQMQTIASSSANKHMVTDGLAVSLQSSSGFQHGGWSRTPGQLSMADIVKMGLPQGKASSKHVVTADRVNSHENSHLELDENSTFALRSTPASKRHFEPSDSIPEYNDGILNNSSSYQPHNYSYTEQEVKDPSADVSATTENFHSLSLHNDELAAKKTAEDNPAVIIPDHLQVTNIECVSLSFGSFGFGAFSGLLPHKDH

SEQ ID NO: 14034 - protein, 334 aa, Zea mays
  VARIANT 279: note = Ancestral polymorphism is H, Derived polymorphism is Y
  VARIANT 105: note = Ancestral polymorphism is S, Derived polymorphism is F
MADKPSRALVVYAAGHAAALIPPPGSAAAGSHLDAFASRACCGLLTLRSPPTSHPTTGTEDNSSTILELAQLLDVYDHLYPGKNEESGQEVAQVDPQELVVPKLFERFMGLRAALVTSCPHVSSFAANLGFHVFKTNDFAPQSGSSSITKEDGLIKRAFDLLGFSDGDVQETSEFDLVFMHVAMENTSSKLGKLGMKTDINRLDKLVGAVLESAPVGSAIASRIHVSVILSYGSASGNKDEFSLLTSSTETDSDLNLLRPRQSYTMKTGRTLDDVRLHHPILLAQWQDGVTRVDLAKGFSFEEFMKRGGNLAMLAERFLHEVAFKLWKAPKYGA

SEQ ID NO: 14035 - protein, 176 aa, Zea mays
  VARIANT 82: note = Ancestral polymorphism is S, Derived polymorphism is I
MSRSCEPRKPDWGFQLNPHAAPFVPSSTPSFAFAAASETLNQTTGSQNKTGSTTDDEATPDKSADAEYHLPDSLSLDFHAESLLAKPSVSAEPLSLSRAEAAAAAAATAPDSSVRLGGGSGVHHLPGAVSCLSHMFPDVSVDFIVHALRLQEFDFDFTVDMLSHLCEAYGYGHSAE

SEQ ID NO: 14036 - protein, 1497 aa, Zea mays
  VARIANT 1403: note = Ancestral polymorphism is S, Derived polymorphism is I
MAGKKRTQTDRAVLEAVPASDAIRNEAAAAEAPAKKKLAMERKKERKEMDKERHRQSAEFAKPQPPAAESAAPVNPPAAPVAVGPGLHMNVFRDLASPEASVREAAAEALVVELRQVQKAYEKSARNGERDAGDGDTQMEAEKDDGLDNCAPSVRYAIRRLIRGISSSREYARQGFALGLAAVLESIRAIKVEAIMKLIPNLLEHSSSMKGPEAKDNLLGRLFGFGAIERSGRVSRQWSRDKSSPIVKEFVSVVVELGGKKRYLTEPAVAVILDLVRKLPDEAILSEVLEVPGVQDWFNKAAEVGDPDALFLALKLQERTIVQKEIFGKLLPYPFSSDNFFAEQHLRSIAACFKESSFCLPRIHSLWLVITEMLVREATSQHDISTSSGKKHKKNKKASSCEDNRRNLRNFCEVIIEGSLLLSSHDRKHLAFSILVSLLPKLSPSAIQVVLSSKVVQGLMDILSNESSWLYNAGKHFLKELMSVASHDNDRCAAVIINLQKYSGGRFDSMTKTKTVKELLLKFHNVEDCLYLVQNLMALFVDEESVTDEPSDQSQTTDDNSENGPTEEQDLFSQGNADLLKSWVVNTISCVLKNLKLTSKGNSDSEMARCIEEKFQVQTEILKFLAVQGLFSASLGTEVTSFELQEKFKWPKNPISTSLRKECIERLQFLLEDAQKDASLHVPNEVKSNDLGYYLMCFINTVCNIPSVSLFRILSGHDDNAFKKLMAVESMLFHEERKTGPGLESTKMHAMRYLLIQLLLQVLLHPDEYWEAAVDVTICCKKSFPVIAQGDNSSAQESAEHGSQESDEDGFEESDEDGSEDPNEEVSLEFMDVLVQTFLSILPHASGPVFRVFCDDITETGLLDMLRVVKIDLKDRHQTDSDDEDDGRVDIEDDDETVMEDEEVGEIDNVTDGLDENTDDDSTDEDDLDQDDFNKTVPNETKGGGKTETTKDGDDSDDSDGMDDDAMFRIDPYIARIFKERNLPGSDTKQSQLMRFKLRVLTLLDIYLQRNPGKVLVLEVYSFLMQAFVKSHGADGTEQFRQRISGILQRRVFKGNEYPKGDAVEFGKLESLLEKALRLTSRSRYNTVASVAQNATFWILKIINSKHCSEQELARVVDLFRSILSDYDRKKSRLKLGFVKQVAKRNPWIGQKLFGFVLQRAENTKAQYRRNQLLELAEFILKSWADGTSEMFLNHLSQLCGLIQAALSAVAENKSRRKEVRNFCTGILQTVLKLGLKDQFQKALSPETYSLCEAKLGAAFTAFKKAYLDRAPEVCELHPFISSLGERLGPDITVNTLPEKFRLGPDITVNTLPVLQKLMHQVFVSCEPRKPDWGFQLNPHAAPFVPSSTPSFAFAAASETLNQTTGSQNKTGSTTDDEATPDKSADAEYHLPDSLSLDFHAESLLAKPSVSAEPLSLSRAEAAAAAAATAPDSSVRLGGGSGVHHLPGAVSCLSHMFPDVSVDFIVHALRLQEFDFDFTVDMLSHLCEAYGYGHSAE

SEQ ID NO: 14037 - protein, 309 aa, Zea mays
  VARIANT 151: note = Ancestral polymorphism is L, Derived polymorphism is V
MALLALKPNPLPNGFRLCPKRTNASAAAAAARSPSVHPLPDELQLVADIRSPYNHIRVADVSPRAAGHPLAGARLLLLDGPGNIHSLTFPRRGDRPPLTGTYLDAFATLPPLLPRPSLAVLGFGAGAAARALLHFYPDISVHGWELDPAVVAVARDFFGLADLERRHAARLSVHVGDALEARAPPGGFGGAAVDLFARGSVLPALQEPGTWRRLGALVAPGGRVMVNCGGAGVEAEDEGRDGAAVKDATLRAMAAAFGEGAVSVLHVDGSWVAMTGPPVTAAAWRARLPPELRHFVDAWRPYGGGASGE

SEQ ID NO: 14038 - protein, 204 aa, Zea mays
  VARIANT 187: note = Ancestral polymorphism is L, Derived polymorphism is P
  VARIANT 120: note = Ancestral polymorphism is P, Derived polymorphism is L
  VARIANT 72: note = Ancestral polymorphism is S, Derived polymorphism is I
  VARIANT 71..204: note = Derived polymorphism lacks residues 71 to 204
  VARIANT 57: note = Ancestral polymorphism is P, Derived polymorphism is S
  VARIANT 49: note = Ancestral polymorphism is A, Derived polymorphism is T
  VARIANT 29: note = Ancestral polymorphism is S, Derived polymorphism is F
  VARIANT 26: note = Ancestral polymorphism is P, Derived polymorphism is L
MDAEAGIAGADQLPGAISHYLIAMIPLSSLPVVGEDVGVGRPRGGHRTARARPPRWPRRQYYMNLLLLAYQSFGVVYGDLSTSPLYVYKSTFSGKLNQYQDEETVFSVLSLIFWTFTLILLLKYVTIVLSADDNREGGPFALYSLLCRHTKLSLLPNQQATDEELSSYYRNGFAPRNGPSPWLRRFLEKHKNESCASSHSSLWR

SEQ ID NO: 14039 - protein, 118 aa, Zea mays
  VARIANT 15: note = Ancestral polymorphism is K, Derived polymorphism is N
  VARIANT 27: note = Ancestral polymorphism is Y, Derived polymorphism is C
  VARIANT 37: note = Ancestral polymorphism is G, Derived polymorphism is R
  VARIANT 79: note = Ancestral polymorphism is R, Derived polymorphism is K
  VARIANT 90..118: note = Derived polymorphism lacks residues 90 to 118
MPAKKRIESKWSAYKSDDKQYSLKFSCISLLADIHAGLQQTNPTPSRNMKRQGMLRKRFIGTFPVIISTQYNSDILQQKNQSEGPEDEGKHTEHCLLILVLIELSRECAFINVKRRCA

SEQ ID NO: 14040 - protein, 649 aa, Zea mays
  VARIANT 378: note = Ancestral polymorphism is S, Derived polymorphism is L
MRSGTRLLGVGVAAAAVVCAWLASCSRAFPFPIPLLEPYTSQKDVDAINGLYAALGSPDLAGGWTGSGGDPCREAWQGVQCDGPNVTAIDLRGAGLRGELSQTLGDLTAVTELDLSGNRIGGALPRSLPPALARLDVSSNSLGGELPDSMAKLSSLSTLDVENNQFSGLIPDKLLSVPKFLRDGNHFTIPTPAAPPSPATQDDAPPSGHRGRVSPATAAGFSVLAAGSLGAAVVAVLLFTASRRRRERERALRVGCLRGAEMCAPSAVREARLRAAAKLEKDTGRHYSAAEEKIERTPRDCVEAAGSSLKHSSNGGIVVGGSEAQQEQPLQLRSASFTLFTVASLQQHTGGFSRQDLVRETCFGKIYAADRPTGSKLSVLKLDSDAARTPVPEFLEAVRGVAGLRHPNVEQLVGCCVEHGQRLLVYRHFSDRALDGVLRLEHGASTSGPDENETLRWDARVAVALEAAKALEYLHEGAGKQVVHRHFRPEHVLVDGELRVSVSGCGLAPLVAERSDCCGVATSYEPPEAGGGAAWTPKGDVYSFGVVMLQLLTGRRPYDGARARGERRLVPWASARLYDLAALRKMADPRLGAPPPVRSLSRFADVISRCIQPEAEFRPAMSQVAQDLRRTLENARAVTGTGSGGSAQV

SEQ ID NO: 14041 - protein, 1351 aa, Zea mays
  VARIANT 731..1351: note = Derived polymorphism lacks residues 731 to 1351
MASSAAPPASPSSRSHGNAAGAGSSATAMMLPGPPGRGNGGCIDLSPAGLLAHGAGSSVVVSDPRSMQLLCVLPMPSSSLASFVTAVRWAPPDTPSLDDDDDDRRPLRLAAGDRHGRIAVWDARARAVLHWLNLDEARGVAPGSGGGVQDLCWVHHGSGWHLASIHGPSLLCIWETSNSPRVLWMFDAAPEYLSCLRRDPFDARHLCAIGLRGFLLSAIPRQDSDISLQEHRVNCGAGDVADLQRLEKEISAPVPAPALAAFPLFSSRICFSPLWRQILFVTFPRELIVFDLSYSTALSVTPLPRGFGKFSDVMADPDIDMLYCTHLDGKLSIWRRKEGEQVHLLCAVEELMPSIGTVVPSPAVLAATIWQSESIFRSIEKQCQDLAQPHSFMIDTNSDQNACQGTMTYLTSISEDGKIWSWLLKFDKSALPSKANLGANLCDHSSANEIIYSTVKPTNVSISATNIGKEPGRPSHNNAATANTCSNRPDFIIKINLVGQLHLLSSTVTTLAVPSPSLLATVARGGNNPAPAVPLVALGTQNGTIEVVDVVANAVSASFSVHSSTVRGLRWLGNSRLVSFTYNQVNDKTGGYNNKLVITCLRSGLNRSFRVLQKPERAPIRALRASSSGRYLLILFRDAPVEVWAMTKNPMMLRSLALPFTVLEWTLPAAPRPGQNASSKQSSTSKERSAEASGAESSDETCESFAFALVNGALGVFEVHGRRIRDFRPKWPSSSFASSDGLVTAMAYRLPHVVMGDRSGNIRWWDVTSGLSSSFSTHREGIRRIKFSPVVHGDRSRGRIAVLFYDNTFSIFDLDSPDPLANALLQPQSPGTLVLELDWLSTRTRKDEPLMLCIAGADSSFRLIEVNIDAKGSSISKPVATKERFRPMPFCLPVLFPTAHALALRMILQLGVKPSWFECNSSDKLTGDSFKVAPTFGDLRSYMIETTLPPIGDAVVAELLLKVLEPYRKEGCILDDGRASLYSAIVNKGACARFAFAAAIFGDFQEALFWLQLPQALRHFLGKSTSRSREKISQSSLHPDSEQSSRFNRIASRERSASEKFTKNAANYGQLSSMAFNQEQLWFNASERIPWHDKLDGEDALQKHVHELVSLGNLEAAVSLLLSTPPEGSNFYPNALRAVVLSSAVSQSLHELAVKVSSFKINIIQYSFFGLHSVVAANMVRTDKSLSGTHLLCAVGRYQEACSQLQDAGCWNDAATLAASHLHGSDYARVLQRWADYVLRGEHNMWRALILYVAAGALPEALDTLRKSQRPDTAAMFLLACHETYSQALSESEPEDDTSVLALTPTPEQTEKLRFPSKNVADEDLIAVSEVFGQYQQKLVHLCMDAEPTSD

SEQ ID NO: 14042 - protein, 213 aa, Zea mays
  VARIANT 19: note = Ancestral polymorphism is S, Derived polymorphism is L
MARWRPAALLVVALAAVLSAAWRADALSVTVTDTECIHEFVPYEGDTVSGNFVVVDHDIFWSSDHPGIDLTVTSPGGNTVYTLKGKSGEKFEFKAPRGGMYKFCFHNPYGAPETVSFYIHVGHIPNEHNLAKDEHLDPINVKIAELKEALESVTAEQKYLKAREARHRHTNESTRKRVMFYTMAEYLAFMAASALQVLYIRRLFSKNVGYNRV

SEQ ID NO: 14043 - protein, 143 aa, Zea mays
  VARIANT 106: note = Ancestral polymorphism is G, Derived polymorphism is D
  VARIANT 94: note = Ancestral polymorphism is S, Derived polymorphism is L
  VARIANT 65..143: note = Derived polymorphism lacks residues 65 to 143
  VARIANT 62: note = Ancestral polymorphism is R, Derived polymorphism is C
  VARIANT 40: note = Ancestral polymorphism is C, Derived polymorphism is R
  VARIANT 11: note = Ancestral polymorphism is P, Derived polymorphism is S
  VARIANT 9: note = Ancestral polymorphism is G, Derived polymorphism is R
MHMSHLNFGVPPNSMCKDTATFPAAAFTLPELWALFLVGCFKNPDVVAAFTLTPASKLSSLRLQQLSVRANLSLSGALPPQLASMRSLQVLTVLQNALIRGAVLNDIGALASLVHLDLSYNSLADHGSHCPKRPCSLPQRWPP

SEQ ID NO: 14044 - protein, 1229 aa, Zea mays
  VARIANT 432..1229: note = Derived polymorphism lacks residues 432 to 1229
  VARIANT 470: note = Ancestral polymorphism is W, Derived polymorphism is C
  VARIANT 717..1229: note = Derived polymorphism lacks residues 717 to 1229
  VARIANT 756..1229: note = Derived polymorphism lacks residues 756 to 1229
  VARIANT 778..1229: note = Derived polymorphism lacks residues 778 to 1229
MYLYSLTLQRATGAVCAVIGSFSGRDSKKSAASGSGSTQEIAVARGSTLDLLRPDPETGRLRTLLSVDVFGAIRSLAQFRLTGANKDYLVVGSDSGRLVILEYSPDRNRLDKVHQETFGKSGCRRIVPGQLLAVDPKGRALCIAALEKQKLVYVLNRDAAARLTISSPLEAHKSNTLTFALAALDCGFDNPVFAAIELEYAESDRDPTGQAANQAQKLLTFYELDLGLNHVSRKVSEPIDNGANLLVTVPGGGDGPSGVLVCCDNFVLYRNQGHPEIRAVIPRRADLPAERGVLIVAAATHKQKSMFFFLLQTEYGDIFKVDLDHNGDAVSELRIKYFDTIPVTSAVCVLRSGFLFAASEFGNHALYQFRDIGREADVESSSATLMETEEGFQPVFFQPRALKNLMRIDEIESLMPVMDMRVANLFDEETPQLFTACGRGPRSTLRILRPGLAISEMARSMLPAEPIAVWTVKKNINDMFDAYIVVSFTNVTLVLSIGETIEEVSDSQFLDTTHSLAVTLLGEDSLMQVHPNGIRHIREDGRVNEWRTPGKKTITKVGSNRLQVVIALSGGELIYFEMDMTGQLMEVEKQDMSGDVACLAIAPVPEGRQRSRFLAVGSYDNTIRILSLDPDDCLQPLSVQSVSSAPESLLFLEVQASVGGEDGADYPANLFLNAGLQNGVLFRTNVDMVTGQLSDTRSRFLGLRPPKLFPCIVSHRQAMLCLSSRPWLGYIHQGHFLLTPLSCDTLESAASFSSDQCSEGVVAVAGDALRIFTIERLGETFNETAIPLRYTPRKFVILPKKKYIAVIESDKGAFSAEEREAAKKECLDASGAAENGNANNGDPMENGDGQDGAEEGNTFPDEQYGYPKAESERWVSCIRILDPRSRDTTCLLELQDNEAAVSICTVNFHDKEHGTLLAIGTAKGLQFWPRRTLAGGFIHVYKFVDEGRSLELLHKTQVEEVPLALCQFQGRLLAGVGSVLRLYDLGKRKLLRKCENKLFPRTLVSIHTYRDRIYVGDMQESFHYCKYRRDENQLYIFADDSVPRWLTTAQHIDFDTMAGADKFGNIYFARLPQDISDEIEEDPTGGKIKWEQGKLNGAPNKVEEIVQFHVGDVVTCLQKASLIPGGGECLIYGTVMGSVGALLAFTSREDVDFFSHLEMHLRQEHPPLCGRDHMAYRSAYFPVKDVIDGDLCEQYPSLPADMQRKIADELDRTPGEILKKLEDIRNKII

SEQ ID NO: 14045 - protein, 1175 aa, Zea mays
  VARIANT 483: note = Ancestral polymorphism is S, Derived polymorphism is F
MQANKPPKVNWPHHENAVQGYSSRDDFLSSSFLFSLPTQRPNPEARERMLSLRSSACKIQGPERLQAPLIEKAWRSLCNTQAACKSYLRPGLSAKARDCDRGHARTYGEGSYNTNKMSTVPGNRILSMESTGQPSERVSLQNNSSHQTVGICSSMRSHQNNHVVQEDMRATNQYNFARTNAALHQSMAADNMCSYDKFDAMDDDILATIDVDQIVMEHYQATNAPRGSASHNMSTPPGNKCSVNGMDEANLPRELSELCNHQCKLAFCREAMTHLQEMKDELLAVANELLDDDGELNPQHSQELHKRRLHLKKLVQLLEDHMTRSAQDEERQISHSMASTTSTQQHLPPMTPGSTFTMDSNRFQSQVYVGNGPRDSDLCYSPAPYSCSDNLSTPLNSVWKSYTPKVIDINYTEGSGDRKWSSTNFPWTKELEAKNRNKFGNHSFRPNQREIINATMSGHDVFVLMPTGGGKSLTYQLPALISSGLTLVVCPLVSLIQDQIMHLSQANIPATYLSGNLDWSEQQEIMKDLMSCRYKLLYVTPEKIAKSGALSRLLDNLNSQGHLSRIVIDEAHCVSQWGHDFRPDYKSLGVLKQNFPKTPVLALTATATARVKEDVVQALALENCIVFKQSFNRANLRYYLRPKTKKCVEDIDLFIRTNHSKECGIIYCLSRMDCEKVAEKLRDCGHKVSHYHGSMDPMDRTHIQKLWSKDKINIICATVAFGMGINKPDVRFVIHHSLPKSIEGYHQECGRAGRDGQPSSCVLYYQYSDYIRVRHMITQGVTEQTGAPRDLSSHEQALKTHKDNLLRMVSYCENDVDCRRLLQLIHFGEKFDPSLCARTCDNCLKESGWVEKDVTNIARQLVELVTRTGHSHSSTYILEVYRGSMSQNVKKQRHDALALHGAGRHLAKGEAARIMRHLVTEEILNEDVKKSDMYGSISSVLKVNHLKASGLLSGKHNIVLKFPASDKASKMRNLDASLLPQTNKNVQQQSEVDVKLASMLYEALLSLREQIMEECNEGFNAYHIFKTDTLKEMSIRVPRTKEELLDINGLGKTKVKKYGDRLLATIEDFLSKHPNPRRNSGGGGGGNEHSDAAKKRRGSTAISAASYGDYDFDERTGQQSKKRAAKTRTVSAHGPRCTDADLDGPEVVEVDGELRSVRKPVAYGNGRVLPKWAPL

SEQ ID NO: 14046 - protein, 158 aa, Zea mays
  VARIANT 58: note = Ancestral polymorphism is P, Derived polymorphism is L
MRPPPKPASGGGATQLASRPTSNRPGGGVLRLRLRLLQAPAVVALAAALAVSSAATPPPAPAPAPLCNLPPTLSGSDGGGRQGEANRIRHPKSERAARCTSKCVSTCVLGGYGAPGVAGPFNIRRPLVVFKDTFRSRQYCLVECSDICNLLKDGEDDQ

SEQ ID NO: 14047 - protein, 257 aa, Zea mays
  VARIANT 3: note = Ancestral polymorphism is E, Derived polymorphism is K
  VARIANT 101: note = Ancestral polymorphism is P, Derived polymorphism is T
  VARIANT 129: note = Ancestral polymorphism is S, Derived polymorphism is C
  VARIANT 145: note = Ancestral polymorphism is A, Derived polymorphism is T
  VARIANT 194: note = Ancestral polymorphism is R, Derived polymorphism is W
  VARIANT 198: note = Ancestral polymorphism is I, Derived polymorphism is V
  VARIANT 246: note = Ancestral polymorphism is G, Derived polymorphism is R
MVETAVKQVYAALLPRTMVVADLGCSAGPNTLLFISSVLSSIAAAAAAERCKPPSGGGDDDDHHVELQFVLNDLPGNDFNHLFRSVEEEFRRAAGCERGPPPPPYYVMGLPESYYNRLFPRQSVHLFHSSYCLHWRSQEPEGLEAWRKPCLNEDNIYIARTTAPSVAKLFQEQFQKDFSLFLKLRHEELVHGGRMVLIFLGRKNEDVYSGDLNQLFALVATALQSLVSKGLVEKEKLESFNLPIYGPSVGEVKDLVT

SEQ ID NO: 14048 - protein, 153 aa, Zea mays
  VARIANT 53: note = Ancestral polymorphism is K, Derived polymorphism is E
  VARIANT 55: note = Ancestral polymorphism is R, Derived polymorphism is Q
  VARIANT 132: note = Ancestral polymorphism is K, Derived polymorphism is M
MSSWEAKARQFLLEEEKEDDELFLVIVPAVLLAMQEEKRSVRTRSTSAHGSAKKRKKNHVASVLEDYLEHRKKQTEKTVEALLEMKSREEEYSIERCLDIVDALEELTDEEKAAAAEVFKNEVNREMFVIAKQKIPNVGLIWLRRKISRIAST

SEQ ID NO: 14049 - protein, 489 aa, Zea mays
  VARIANT 101: note = Ancestral polymorphism is P, Derived polymorphism is L
MATQAAFLAGFSQLAAQPGRDRAVAVAVAPAPGPARVAVAAVGSAKLGVKAGTSRTAAVARLGVRCRASLIEPDGGRLVDLVAPEEGGRRAALRREAAELPHRLRLGRVDKEWVHVLSEGWASPLQGFMREHEFLQALHFNAIRGQDGRMVNMSVPIVLSVGDAQRRAIQADGATRVALVDERDRPIAVLSDIEIYKHNKEERVARTWGTTAPGLPYVEEAITNAGDWLVGGDLEVIEPIKYNDGLDQYRLSPAQLREEFARRNADAVFAFQLRNPVHNGHALLMTDTRKRLLEMGYKNPVLLLHPLGGFTKADDVPLSWRMKQHEKVLEEGVLNPESTVVAIFPSPMHYAGPTEVQWHAKARINAGANFYIVGRDPAGMSHPTEKRDLYDADHGKKVLSMAPGLERLNILPFKVAAYDTKQKKMDFFDPSRKDDFLFISGTKMRTLAKNRESPPDGFMCPGGWKVLVEYYDSLVPSEGSSKLREPVAA

SEQ ID NO: 14050 - protein, 392 aa, Zea mays
  VARIANT 51: note = Ancestral polymorphism is T, Derived polymorphism is I
  VARIANT 243: note = Ancestral polymorphism is V, Derived polymorphism is A
  VARIANT 279: note = Ancestral polymorphism is K, Derived polymorphism is M
  VARIANT 286: note = Ancestral polymorphism is P, Derived polymorphism is L
  VARIANT 289: note = Ancestral polymorphism is G, Derived polymorphism is R
  VARIANT 306: note = Ancestral polymorphism is S, Derived polymorphism is C
MDIRRDFHMAEGEGEWSYSKNCRRQHVAVRETRPMVETAVKQVYAALLPRTMVVADLGCSAGPNTLLFISSVLSSIAAAAGAERCKPPSGGGDDDDHHVELQFVLNDLPGNDFNHLFRSVEEEFRRAAGCERGPPPPPYYVMGLPESYYNRLFPRQTVHLFHSSYCLHWRSQEPEGLEAWRKPCLNEDNIYIARSRTTTPSVAKLFQEQFQKDFSLFLKLRHEELVHGGRMVLVFLGRKNEDAYSGDLNQLFALVATALQSLVLKEIKSIVKGLVEKEKLESFNLPIYGPSVGEVEDLVTQSGLFSMDLIKQFEMNWDPLDDSEGDDVVEDSARSSMNVAKYIRSVLKSLIVRHFGEAIIDAWFAEFRRLVAEHLEKEKTKFTTFAMCLKKE

SEQ ID NO: 14051 - protein, 451 aa, Zea mays
  VARIANT 386: note = Ancestral polymorphism is G, Derived polymorphism is V
  VARIANT 384: note = Ancestral polymorphism is P, Derived polymorphism is L
  VARIANT 255: note = Ancestral polymorphism is L, Derived polymorphism is P
  VARIANT 250: note = Ancestral polymorphism is G, Derived polymorphism is R
  VARIANT 239..451: note = Derived polymorphism lacks residues 239 to 451
MAWGEDEAIGPDVASAGLHISDQIDRDAATLPDLEARATRLTPTPRTPRNVPMSFPSVFPQSCFVAFPRILCSKQQQQQKRLILQETEAGEDDGKPSRMRQMMSMLMWTAEVLRMAPAKKNMPPISIEFLRPIVLIKWPNTRLERMAARYNEETNKNAWRNDSIRINPPEIKQNKLKALLSILVYSGIVLFPVLLPVRVAATGGALSTIPIHTNKTAQSAQNFSSIERLGMGNVHVIKWMFNKGQGKTMGSYYTLLNALIELFGMIFADMEELGVRPDGSIIRMLGDVFQKLEMMDKYEKLKKKYPPPKWEYRYIKGKRIRIRVYLDSKSEEAARGDPDNDELGEVESIHLDNELEEEASLGLDRSVLDDAALETLNIYNSKLPFGIFFNACLIKAAWSKLNGRRPYPGHRTWQSSRYIIHMILHCSAWKDTVSDTGVVCATHIQCGGKNP

SEQ ID NO: 14052 - protein, 273 aa, Zea mays
  VARIANT 29: note = Ancestral polymorphism is P, Derived polymorphism is L
  VARIANT 113: note = Ancestral polymorphism is P, Derived polymorphism is H
  VARIANT 154: note = Ancestral polymorphism is V, Derived polymorphism is M
  VARIANT 197: note = Ancestral polymorphism is E, Derived polymorphism is K
  VARIANT 211: note = Ancestral polymorphism is R, Derived polymorphism is W
  VARIANT 215..273: note = Derived polymorphism lacks residues 215 to 273
  VARIANT 235..273: note = Derived polymorphism lacks residues 235 to 273
MVETAVKQVYAALLPRTMVVADLGCSAGPNTLLFITSVLSSVADEHSKSASGDDHHVEVQFVLNELPGNDFNHLFRSFEEEFRRPAGCERPPPPSYYLASKQEPEGLEAWRKPCLNEDNIYIARTTAPTVAKLFQEQFQKDFSLFLKLRRKELVHGGQMVLVFLSRKNEDVYSGDLNQLFAFVATALQSLVSKGLVEKEKLESFNLPIYGRSVGEVEDLVTQSGLFSMDLIKQFEMNWDPFDDSERSQKHECRQVHQIRAEVFNCLPFWRSHN

SEQ ID NO: 14053 - protein, 90 aa, Zea mays
  VARIANT 27: note = Ancestral polymorphism is I, Derived polymorphism is T
  VARIANT 14: note = Ancestral polymorphism is L, Derived polymorphism is V
MALHAPVLVMKDSLKRESGAKVHKANIQAAKAVADIIRTTLGPRSMLKMLLDAGRCGRQIFSSTALSSCSGDHTSERDAKKAGEKTKFFR

SEQ ID NO: 14054 - protein, 132 aa, Zea mays
  VARIANT 122: note = Ancestral polymorphism is P, Derived polymorphism is S
  VARIANT 71: note = Ancestral polymorphism is G, Derived polymorphism is R
  VARIANT 38: note = Ancestral polymorphism is K, Derived polymorphism is N
  VARIANT 24..132: note = Derived polymorphism lacks residues 24 to 132
  VARIANT 11: note = Ancestral polymorphism is R, Derived polymorphism is W
  VARIANT 9: note = Ancestral polymorphism is S, Derived polymorphism is L
  VARIANT 7..132: note = Derived polymorphism lacks residues 7 to 132
  VARIANT 6..132: note = Derived polymorphism lacks residues 6 to 132
  VARIANT 5..132: note = Derived polymorphism lacks residues 5 to 132
MIDIQCSESARVFAARSAPRAEVSLRIGTQCNDAQLLKGINSYRSSLKVPALSENKNAACLTEQLARQFKGQECTNTTGANTVIGTEQQFPDYPRYLDRCHLNASVTEDGQVMPACVLGLVSAVVLAIYTKS

SEQ ID NO: 14055 - protein, 280 aa, Zea mays
  VARIANT 105: note = Ancestral polymorphism is S, Derived polymorphism is T
  VARIANT 141: note = Ancestral polymorphism is T, Derived polymorphism is A
  VARIANT 165: note = Ancestral polymorphism is K, Derived polymorphism is N
  VARIANT 189: note = Ancestral polymorphism is V, Derived polymorphism is A
  VARIANT 218: note = Ancestral polymorphism is K, Derived polymorphism is M
  VARIANT 257..280: note = Derived polymorphism lacks residues 257 to 280
MVVADLGCSAGPNTLLFISSVLSSIAAAAAAERCKPPSGGGDDDDHHVELQFVLNDLPGNDFNHLFRSVEEEFRRAAGCERAPHPPYYVMGLPESYYNRLFPRQSVHLFHSSYCLQWRSQEPEGLEAWRKPCLNEDNIYIARTTTPSVAKLFQEQFQKDFSLFLKLRHEELVHGGRMVLIFLGRKNEDVYSGDLNQLFALVATALQSLVLKGLVEKEKLESFNLPVYGPSVGEVEELVTRSGLQFSMDLIKQFEMNWDPFDDSEGDNDVASSSRTALAVA

SEQ ID NO: 14056 - protein, 167 aa, Zea mays
  VARIANT 110: note = Ancestral polymorphism is K, Derived polymorphism is E
MEETAAAAPAEKASSYRYWVREATGDAAPLPVPRKLDPAANGNGNPPPLGSVWNQAGTWEEKNLNSWANSRIKDLLGSLGSLKFPTGNASVDEVSKCSGDAFQVTVRNKKRVGYNYELSLRFKGEWLVKEENKKIKGHLDIPEFSFGEIDDLEVKLPHYHVPPLFPT

SEQ ID NO: 14057 - protein, 220 aa, Zea mays
  VARIANT 105..220: note = Derived polymorphism lacks residues 105 to 220
MASWMTSSRRRISTSPSVASAFLRGLATKVKIIEIDLTEEDGEGGKGDVSGVEGDRVSGVEGAATARLAGGGRGRRHGSGLGPRCRRGFCATGGTKAEEEQSDSQLEQEQEVPCVPDIFVQKVPVSRRSSPAKAAEKPTPPPDVDEATTAPVSRRSPDTPTSRGEKAKADVFPTPIEDIDMELDWRRTKRGSSQRARHGRHIHIRCQRYGKKSKCLSVKA

SEQ ID NO: 14058 - protein, 330 aa, Zea mays
  VARIANT 233: note = Ancestral polymorphism is V, Derived polymorphism is A
  VARIANT 135: note = Ancestral polymorphism is D, Derived polymorphism is V
MPLGQRSGDKSDSRYCGVEVLDFPAGEGLPAVLNHSLASAFDFILAPLVDPNYRPAPGAVLPVSASDLVLGPSQWSNHVVGKISEWIDLDAEDERLRLDSELTLKQEIAWASHVSLQLWLRLPLEKSEPMDGDLDKIKNNNHTSEIADSWELWNSFRLLCDHSSQLCVALDISGTLPSMNSLGRWFGEPAMETQVTACLFTSQAFLTNARGYPCLSKRHQRLLTGLFNHSVQAIISGRSNHNVFPASEGVLSGDEGNAEDSYVRHALAPYLEYIAYLYQKMDPLPEQERFEINYRDFLQSPLQPLMDNLEAQTYETFEKDVVKYTQVPAI

SEQ ID NO: 14059 - protein, 375 aa, Zea mays
  VARIANT 39..375: note = Derived polymorphism lacks residues 39 to 375
  VARIANT 65..375: note = Derived polymorphism lacks residues 65 to 375
  VARIANT 75: note = Ancestral polymorphism is V, Derived polymorphism is E
  VARIANT 90: note = Ancestral polymorphism is S, Derived polymorphism is F
  VARIANT 96..375: note = Derived polymorphism lacks residues 96 to 375
  VARIANT 115: note = Ancestral polymorphism is A, Derived polymorphism is G
  VARIANT 116: note = Ancestral polymorphism is T, Derived polymorphism is M
  VARIANT 134: note = Ancestral polymorphism is A, Derived polymorphism is T
  VARIANT 146: note = Ancestral polymorphism is R, Derived polymorphism is P
  VARIANT 246: note = Ancestral polymorphism is T, Derived polymorphism is I
MAAASNLVNGGVAALQIEGEPEEPQSQTNAAAALAPVPWLPSVAERYERREKLGEGMFGDVYEAWDRVHDHLVAVKRLSGRTNDRFVKTSIPEFAREVMSLAACRGHPSIVQLLATHVDGNRADGDCFAVTEHAGPMNLRQYMDARRANGDPFDEDEVRDVMRQLLAGAEHTHGAGVLHRNIVPENVVVGMDGATSKMVYKICGFGMSKPAAQTDKDDSGLLASPSPYRAPELFLGSKDYDGRVDTWSLGCIMAELVTGAGVPFFGGALDKEVFDKMMHVVGTKGIVKWQGLERVAPREKVASLQKVGHRERGYLHKMFPPKVLSSAGFKVLEGLLHSNPDRRLSAADALRMPWFRRRCSLGACFMPHGASMKSG

SEQ ID NO: 14060 - protein, 137 aa, Zea mays; identical to SEQ ID NO: 1775
  VARIANT 46: note = Ancestral polymorphism is H, Derived polymorphism is R

SEQ ID NO: 14061 - protein, 493 aa, Zea mays
  VARIANT 1: note = Ancestral polymorphism is M, Derived polymorphism is I
MGSRSGCGAAMAAAAAAVLVSWLCFAAAGVGAIGANWGTQASHPLPPETVVRMLKDNGFQKVKLFDAEEGTMSALRKSGLEVMVGIPNDLLSTMATSMKAAEKWVDTNVSSYLNDGVSIRYVAVGNEPFLETYNGSFLQSTFPAIRNIQGALIKAGLGNQVKVTCPLNADVYSSTTSKPSDGDFRTDIHDLMLTIVKFLSDNGGAFTVNIYPFISLYIDPNFPVDYAFFEGASSPIVDGSFTYSNMFDANHDTLIWALKKNGFGNLPVIVGEIGWPTDGDRNANAQMAQRFNQGFMTHIASGRGTPMRPGPVDAYLFSLIDEDDKSIQPGNFERHWGIFTYDGLPKYQLNLGTSNAGGGLVRAKGVKYLERKWCVLKPSVNLNDPKLADNVGYACSMADCTSLGYKTSCGMLDIRGNVSYAFNNYFQKNDQDDVACGFQGLATTTGQDPSTGTCRFGVMIEVDSAFSWRLQGLGSNLLLFLLLGVLQLSLSFS

SEQ ID NO: 14062 - protein, 148 aa, Zea mays
  VARIANT 138: note = Ancestral polymorphism is T, Derived polymorphism is I
  VARIANT 122..148: note = Derived polymorphism lacks residues 122 to 148
MAGIAHRCYFGPPETLSPPFSPLCPWIHGLFPAIEFVVVPSSPLPNSGDPGATLACASLNSGDFTAVERSGTARSRLFPRQSLYVHHILRGDNDYLDMVFTQVSLEEVENLCWYELPNESWEVNLPAQKVSPELLEPTLGINFARDGI

SEQ ID NO: 14063 - protein, 228 aa, Zea mays
  VARIANT 148: note = Ancestral polymorphism is K, Derived polymorphism is N
  VARIANT 178: note = Ancestral polymorphism is T, Derived polymorphism is I
MAGADVDVGTELRLGLPGGGAAAAKKDTIDLKLKLPTAGMEEAAAAARPEPAAEKAKRPAEAPAADAEKPPAPKAQAVGWPPVRSYRRNAMTVVQAVRSKKEEEPEKQQQPAAANAFVKVSMDGAPYLRKVDLKTYGSYKDLSAALKKMFGTFVTATGNSMNEGRLVDPAGDADDVVTTYEDKDGDWMLVGDVPWEMFVDSCKRLRIMKSSEAIGLAPRTKDKCKNKS

SEQ ID NO: 14064 - protein, 153 aa, Zea mays
  VARIANT 38: note = Ancestral polymorphism is S, Derived polymorphism is P
  VARIANT 47: note = Ancestral polymorphism is R, Derived polymorphism is H
  VARIANT 113: note = Ancestral polymorphism is I, Derived polymorphism is T
  VARIANT 134: note = Ancestral polymorphism is V, Derived polymorphism is M
  VARIANT 138: note = Ancestral polymorphism is D, Derived polymorphism is Y
MASPPPVATAGPHSVFVYGTLMEEEVVRVLLGRAPPSSSPALLPDHRRFSLRGRVYPAILPARAHAVSGKVIQGLTDRELHVFDMFEDEEYVKTTVEVSLTDASEKSLAYAYIWGNQGDPDLYGEWDFEEWRKVHLKYYLEMTREFMLELGQF

SEQ ID NO: 14065 - protein, 424 aa, Zea mays
  VARIANT 139: note = Ancestral polymorphism is M, Derived polymorphism is V
MGKHEFLTPKAIANRIKAKGLQKLRWYCQMCQKQCRDENGFKCHCMSESHQRQMQVFGMAPDRVVEGFSEEFLESFLSLIRRAHRHSRVAATVVYNEYIADRHHVHMNSTRWATLTEFVKFLGREGYCKVEDTPKGWFMTYIDRDSEQAVKERLKRKRIKSDMADDERQERMIARQIERAHKSLAKPNGGGAAEGEPESGSEGEYSGSDDDEQEPEDDSKEADKATGKIAIALQKAVPGPKVNPFDDKPKMKFGFDEEDGSGTRDQEKNELTKKMGKDVKAAEAKRSALDELMKEEEKAKERSNRKDYWLCPGIVVKVMSKSLAEKGYYKQKGVVKKVIDKYVGEIEMLESKHVLRVDQDELETVIPQIGGLVRIVNGAYRGSNARLLSVDTEKFCAKVQVEKGLYDGKVLRAVEYEDICKISS

SEQ ID NO: 14066 - protein, 1312 aa, Zea mays
  VARIANT 677: note = Ancestral polymorphism is R, Derived polymorphism is C
MDSIDADLARTQEERRRMEEALAAGAPMAVSSVTFDTDLYGGGGADPNRFAGYDTSIPASEDDAAEDDAEAANPAPRRLAAYTGHAIAAADIPRSADDDDGLPKRSQRIIDREDDYRRRRLNQIISPERHDPFAAGEATPDPSVRTYADVMRDAALQKKKEDLLREIAKKKKEEEEKEKERKAAAPEQPAATTKRRNRWDQSQDGDAGAGAKKVKTSSDWDAPDATPGIGRWDATPGRVGDATPSVRRNRWDETPTPGRMADADATPAAGGATPGATPSGAWDATPKLPGGVTPTPGKKQRSRWDETPASMGSATPGSLGAATPAGYTPGPTPFGAENLATPTPSQIARGPITPEQYQLMRWERDIEERNRPLTDEELDAMFPQEGYKILEPPASYQPIRTPARKLLATPTPLGTPLYAIPEENRGQHFDVPKELPGGLPLMKPEDYQYFGTLLNEEEEEQLSPEEQKERKIMKLLLKVKNGTPPQRKTALRQLTDKAREFGAGPLFNKILPLLMQPTLEDQERHLLVKVIDRVLYKLDELVRPFVHKILVVIEPLLIDEDYYARVEGREIISNLSKAAGLATMIAAMRPDIDNIDEYVRNTTARAFSVVASALGIPALLPFLKAVCQSKKSWQARHTGIKIVQQIAILMGCAVLPHLKSLVEIIEHGLSDENQKVRTITALSLAALAEAAAPYGIESFDTVLKPLWKGIRSHRGKVLAAFLKAIGFIIPLMDALYASYYTKEVMQVLIREFQSPDEEMKKIVLKVVKQCVSTEGVEADYIRNDILPDFFKHFWVRRMALDRRNYKQLVETTVEMANKVGVADIVGRVVEDLKDESEPYRRMVMETIEKVVANLGASDIDARLEELLIDGILYAFQEQTSDDANVMLNGFGAVVNALGQRVKPYLPQICGTIKWRLNNKSAKVRQQAADLISRIAIVMKQCQEEQLMGHLGVVLYEYLGEEYPEVLGSILGALKAIVNVIGMTKMTPPIKDLLPRLTPILKNRHEKVQENCIDLVGRIADRGAEFVPAREWMRICFELLEMLKAHKKGIRRATVNTFGYIAKAIGPQDVLATLLNNLKVQERQNRVCTTVAIAIVAETCSPFTVLPALMNEYRVPELNVQNGVLKSLSFLFEYIGEMGKDYIYAVTPLLEDALMDRDLVHRQTAASAVKHMALGVAGLGCEDALVHLLNYVWPNIFETSPHVINAVMEAIEGMRVALGAAVILNYCLQGLFHPARKVREVYWKIYNSLYIGAQDALVASYPALEDDGDNIFSRPELAMFVWIVPSEGGAMFRNFFSWFTIMQLKISIIVWSY

SEQ ID NO: 14067 - protein, 410 aa, Zea mays
  VARIANT 181..410: note = Derived polymorphism lacks residues 181 to 410
  VARIANT 183: note = Ancestral polymorphism is F, Derived polymorphism is S
MAGLAPEGSQFDDKQYDKKMQEILTEDFFTSYDDVCESFDSMGLQENLLRGIYAYGFEKPSAIQQRGIVPFCKGLDVIQQAQSGTGKTATFCSGILQQLDYGLVECQALVLAPTRELAQQIEKVMRALGDYLGVKVHACVGGTSVREDQRILASGVHVVVGTPGRVFDMLRRQSLRPDNIKMFVLDEADEMLSRGFKDQIYDIFQLLPSKIQVGVFSATMPPEALEITRKFMNKPVRILVKRDELTLEGIKQFYVNIDKEDWKLDTLCDLYETLAITQSVIFVNTRRKVDWLTDKMRSRDHTVSATHGDMDQNTRDIIMREFRSGSSRVLITTDLLARGIDVQQVSLVINYDLPTQPENYLHRIGRSGRFGRKGVAINFVTRDDERMLFDIQRFYNVTVEELPANVADLL

SEQ ID NO: 14068 - protein, 414 aa, Zea mays
  VARIANT 8: note = Ancestral polymorphism is G, Derived polymorphism is S
  VARIANT 86: note = Ancestral polymorphism is E, Derived polymorphism is G
  VARIANT 134: note = Ancestral polymorphism is S, Derived polymorphism is L
  VARIANT 169: note = Ancestral polymorphism is V, Derived polymorphism is M
  VARIANT 264: note = Ancestral polymorphism is S, Derived polymorphism is N
MLWKEADGKPDWVKDLDAVGENGEEIENPLTQLNDPSSVEPLGNCGKKVILWWLRVEARADSKFPEWNLVAILLDPHVPIIYSQVEDARGPREPWHDLHSKIDGPEAYDVLKNFEERWLKASKRSAAKKLSKLSRSHNDSLLWINKIPDIISIDDEIYSNDDDPERWDMQIFRSIDSNSVKGFPKDPREATKSCLWENVLIDMSVHTTYVNAIRGAQHFIYIENQYFLGSSFNWDSHRDVGEHKNLLLPYDHLKFPKFRTVKYSTLQKMTMQIMYEIIYKAMKEVGLDGTYEPQDYLNFFCLGNREAEDTTCTSSGPFSTSNPQKCPKLKEVLISPEKYNYAAAWISNQDQARNNRRFMVYVHSKGMIVDDEYVIIGSANINQRSMEGTRDTEIAMAAYQPQHTLANMLSAPRG

SEQ ID NO: 14069 - protein, 389 aa, Zea mays
  VARIANT 163..389: note = Derived polymorphism lacks residues 163 to 389
MRAARRLARVRREALAACMTCPLCRGLLREATAVALCLHTFCRDCIVEKINDDDADCCPVCNIDLGCDPEEKLRPDHNLQDIRNKVFPIKKINADSPKSLTTLPAKRKQRSLSSLVVDTPRSVVKRTGLTGKRTKAKRKTVASSAASPINNGTMQLPTKFENRDQKTDKSCASQSTNVASAANKTENQDLKKTRKTSAKQSTRAATSANRKQQNTDVDVSSKPSSENRKNGTTADKDELRKYSKIPRSTPKIHAVNEEQIKKKEDELPTRKAEADNKVVIPGTTVREHSNNSNLKEKDNGSSPESSPLKDKTTADDDSYQCLLGSASDVRDPITTPVWFLLISLPNQKEDPQLPQLSKSYMRIKDRSLQISSVQRYIMKKLDLANENEN

SEQ ID NO: 14070 - protein, 223 aa, Zea mays
  VARIANT 174..223: note = Derived polymorphism lacks residues 174 to 223
  VARIANT 110: note = Ancestral polymorphism is R, Derived polymorphism is K
  VARIANT 92: note = Ancestral polymorphism is E, Derived polymorphism is D
  VARIANT 89..223: note = Derived polymorphism lacks residues 89 to 223
  VARIANT 76: note = Ancestral polymorphism is S, Derived polymorphism is Y
  VARIANT 67: note = Ancestral polymorphism is G, Derived polymorphism is R
  VARIANT 61: note = Ancestral polymorphism is F, Derived polymorphism is S
  VARIANT 59: note = Ancestral polymorphism is L, Derived polymorphism is P
  VARIANT 51: note = Ancestral polymorphism is E, Derived polymorphism is D
  VARIANT 50: note = Ancestral polymorphism is S, Derived polymorphism is C
  VARIANT 17: note = Ancestral polymorphism is T, Derived polymorphism is S
MVMVSGGGGNAWAKEMTLRRRIASIFNKTQEHFPTLKDYNDYLEEVEDMSELFPMFVNLLFLNYTVGKKLSRFEFSCQAFNLIEGIDVEEIEAKIARYQQENAEQIYLSRAKRAEDLAAALKASRMNPVKAEANDTAAGSSQGISGGAGVQGQYAPAAVLGGVAQPRPTGMAPQLIGSGSDPLQGDDEETRRLRAERAARAGGWTAELSKRRALEEAFSAIFI

SEQ ID NO: 14071 - protein, 428 aa, Zea mays
  VARIANT 213..428: note = Derived polymorphism lacks residues 213 to 428
  VARIANT 220: note = Ancestral polymorphism is G, Derived polymorphism is D
  VARIANT 237..428: note = Derived polymorphism lacks residues 237 to 428
  VARIANT 348: note = Ancestral polymorphism is M, Derived polymorphism is I
  VARIANT 351: note = Ancestral polymorphism is G, Derived polymorphism is R
MLRVRHHRSPGCSTHSPAPPSTRSTPPIARSEGTLLWLSVSCPPCRTRTCRSPRLHRISRQGQAGAGGHSQIPSSAAINALLLDPVIRRESPFSSPSRFRRRRGPLAGADLPQAWHGGAGAVQGLHPAGQGEDGHAGWEQGPAGAEVRAGFEFWFMGFVRYQVSLHELENAIEQANVQGRIHRLPFGGLALCFCVAIRSLEKAIELLNKRKVQGRILLCGYSFNYISGTASIKKVSQTARNLRAVGFVVAVENIYPGTKFDPVPVSIPGILITDVSKTEDDWAERLLQFFHHNRLDWKGYNLQSNNSFQDVDVLKLKPDILAPGNLIWAAWAPNGTDESNYAGEGFAMVSGTSMATPHIAGIAALIKQKNPKWSPSAIKFAMMTTANTLDKGSHPLRAQQYTASEMMTLSRATPFDCGSGAVNPKAAL

SEQ ID NO: 14072 - protein, 226 aa, Zea mays
  VARIANT 96: note = Ancestral polymorphism is R, Derived polymorphism is W
  VARIANT 89..226: note = Derived polymorphism lacks residues 89 to 226
  VARIANT 83: note = Ancestral polymorphism is S, Derived polymorphism is F
  VARIANT 39: note = Ancestral polymorphism is S, Derived polymorphism is G
  VARIANT 36: note = Ancestral polymorphism is E, Derived polymorphism is G
  VARIANT 25: note = Ancestral polymorphism is T, Derived polymorphism is I
  VARIANT 22..226: note = Derived polymorphism lacks residues 22 to 226
  VARIANT 15: note = Ancestral polymorphism is F, Derived polymorphism is L
MAENYTAVNQHAYAFTNILFSSGTTATSKFHVMVDEELSFRSFGLNGEALASLSDISVVEGSKCLHLGIDDKREVVGTTGKCSIFSLKQSSAFVVRELFYNQPVRRKQMQSSEKRELHHVKKCVLQIALIHPQISLRLLDNDSEDELLYTEFSSSPLPLISKTFGDDISRCLHEITASDQGWTLSGHISGPADVFCTKDAQYLCILLANPLLYTCYLLSSNSWRHP

SEQ ID NO: 14073 - protein, 120 aa, Zea mays
  VARIANT 37..120: note = Derived polymorphism lacks residues 37 to 120
  VARIANT 33: note = Ancestral polymorphism is S, Derived polymorphism is R
  VARIANT 28: note = Ancestral polymorphism is G, Derived polymorphism is D
  VARIANT 21: note = Ancestral polymorphism is G, Derived polymorphism is S
  VARIANT 7..120: note = Derived polymorphism lacks residues 7 to 120
  VARIANT 6: note = Ancestral polymorphism is R, Derived polymorphism is C
  VARIANT 3: note = Ancestral polymorphism is R, Derived polymorphism is H
  VARIANT 2..120: note = Derived polymorphism lacks residues 2 to 120
MQRRRRQGGGDGPSADVEPHSPGAERRGVRGHSQRRQGRAPQGPARCRRRVQEGTLRVREGPQPVDTRGGEDPAAKQPVHQDPVPGRPDRHRRRRRRHRKLTGGCRRRDEEVRSETDLAQ

SEQ ID NO: 14074 - protein, 370 aa, Zea mays
  VARIANT 255..370: note = Derived polymorphism lacks residues 255 to 370
  VARIANT 202: note = Ancestral polymorphism is P, Derived polymorphism is T
MAMMVDPPNGIGNQGKHYYSMWQTLFEIDTKYVPIKPIGRGAYGIVCSSINRETNEKVAIKKIHNVFDNRVDALRTLRELKLLRHLRHENVIALKDIMMPIHRRSFKDVYLVYELMDTDLHQIIKSPQGLSNDHCQYFLFQLLRGLKYLHSAEILHRDLKPGNLLVNANCDLKICDFGLARTNSSKGQFMTEYVVTRWYRAPELLLCCDNYGTSIDVWSVGCIFAELLGRKPIFPGTECLNQLKLIVNVLGTMSEADLEFIDNPKARRYIKSLPYTPGVPLVSMYPHAHPLAIDLLQKMLIFDPTKRISVTEALEHPYMSPLYDPSANPPAQVPIDLDIDENISSEMIREMMWQEMLHYHPEVATAISMS

SEQ ID NO: 14075 - protein, 393 aa, Zea mays
  VARIANT 144..393: note = Derived polymorphism lacks residues 144 to 393
  VARIANT 48..393: note = Derived polymorphism lacks residues 48 to 393
MTMTNRKSTTGETDSRTGIELTGIAQIDDARPDLVSTTQRWASLPLLRHEVLAAEADEHNGGRGLGIEPAHHAVWKPHHPHEALAAEHQTARHSRRAPKSRAELGAKASAASELRGHVRKLNGGDLGERDTGDQSERCADEEAGSRDEGARRADWASWARRGETGELGWGWLRENRGAESSARRRGRVGREASAREARVATRAGGRADDEQEVASPEEQGRWVSYRGRSSALGSCRAGKKPAARGKQRAGTRARDIRWRSRTLPRPWKAGAAGLGDPGTRREQDAPWEHGGEAARLGGEKRSSAGGCLKKEQRTLALRAGPSSAAMAEQRAEQGRGRRNSGSARLEEARRAERTGGSSAAMAGARGRQRASATERRKILGTRAQGVRHGAAGD

SEQ ID NO: 14076 - protein, 250 aa, Zea mays
  VARIANT 163..250: note = Derived polymorphism lacks residues 163 to 250
MEVASGDEDLESLLQNFHRVSQGYKDALMQVQVLRVNCSTEFKRREALESHITDLKKDNERLRRQYTETLFKVTNQVKFRAEAQSLKEELDKANSRLLSMEEEHKRETEQLKHSSEMNINALENKLSHALVQQARDEAAMKQLKLELSAHKSHIDMLGSRLEQVTNDVHSQYKNEIQDLRDVVSVEQEEKKDIHRKLQNVENELRITRMKQAEQQRDSVSVQHVETLKQKVMRLRKENESLKRRLASSEV

SEQ ID NO: 14077 - protein, 138 aa, Zea mays
  VARIANT 92: note = Ancestral polymorphism is G, Derived polymorphism is S
MPGEWSVGLCDCFGDLHTCCLTLWCPCVTFGRTAEIVDRGSTSCCMSGTLYYLLSTIGWQWLYGCAKRSSMRSQYSLRESPCMDCCVHFWCGPCALCQEYTELQKRGFHMAKGWEGSNKVVGCFHGMTTPPRKQSMCF

SEQ ID NO: 14078 - protein, 670 aa, Zea mays
  VARIANT 217: note = Ancestral polymorphism is A, Derived polymorphism is V
  VARIANT 202: note = Ancestral polymorphism is P, Derived polymorphism is T
MDHGGEGRVAAARRTLRAGVDKSRALGHSLARAGPRLEEIQAALLALEAAVRPIRAPHAELAAAGPHIDRAVSPAAAVLKVFDAVHGLEPPLLAPGAAGSGAAGDLPGYLAVLAQLEEAHRFLADNCGLAAQWLADIVEYLGDRDLADQRFLADLGVTLDELRTPPAGDLDGGLLAAALSMLEAEFRRLLADHSAPLAMPQTGAAAGSATPSRVPAVAVHKLTLILDRLVANGRQDSCVASYIDARGGVVSASLRALGLDYLRDPSQDAQALGPALDLWRRHLEFVVRRLLDSERQLCAKVFGQHKDVASACFAEVAAQAGVLDFLRFGRAVADAKKDPIKLQRLLEVFDSLNKLRLDFNRLFGGKACAEIQSQTRDLVKLLIDGAVEIFEELIVQVELQRHMPPPVDGGVPRLVTFVVEYCNRLLGEQYRPVLGQALTIHRSWRKEAFNDRMLVDAVLNIVKALEANFDVWSKAYDNATLSYLFMMNTHWHFFRHLKATKLGEVLGDVWLREHEQYKEYYLSMFIRESWGALSALLNREGLILFSKGRATARDLVKQRLKTFNSSFDEMHRRQSSWVIPDKDLRERTCNLVVQTIVPTYRSYMQNYGPLVEQEGNASKYVRYTVDGLEKMLSALYMPRPRRAGSFQIKHSSGKIASAMTGLHRSASAVK

SEQ ID NO: 14079 - protein, 336 aa, Zea mays
  VARIANT 25..336: note = Derived polymorphism lacks residues 25 to 336
  VARIANT 62..336: note = Derived polymorphism lacks residues 62 to 336
MRGLSGFVETRQQLLSLKPNHRMNWIGFAVAHHLNSDSSKAVEVLEAYEGTLEDDYPPENERYEHNEMLLYKGDQLFPPDGIGIGIVISPQGIFCLVLRADPNFDDSPWQSVSPEAKDFVKRLLNKDYRKRMTAAQALSFGNNQELHNARSSFEQARFNLVTSLSHVEATKRYEFLEAVSATMDSHLRYFKQGYELLHQMEPYINQRHTSSQNQHETKKPIDLLRKVDGNNMCADCGASEPDWASLNLGALLCIECSGVHRNLGVHISKVRSLTLDVGVWEPSVINLFQSLGNMFVNSIWEETLPDDNSSADGSDTSQYLSVSKPNLFMRILVYFV

SEQ ID NO: 14080 - protein, 200 aa, Zea mays
  VARIANT 182: note = Ancestral polymorphism is K, Derived polymorphism is N
  VARIANT 166: note = Ancestral polymorphism is F, Derived polymorphism is L
  VARIANT 165: note = Ancestral polymorphism is R, Derived polymorphism is G
  VARIANT 151: note = Ancestral polymorphism is T, Derived polymorphism is I
  VARIANT 143: note = Ancestral polymorphism is M, Derived polymorphism is I
  VARIANT 117: note = Ancestral polymorphism is E, Derived polymorphism is K
  VARIANT 114: note = Ancestral polymorphism is L, Derived polymorphism is M
  VARIANT 113: note = Ancestral polymorphism is C, Derived polymorphism is Y
  VARIANT 91: note = Ancestral polymorphism is A, Derived polymorphism is T
  VARIANT 90..200: note = Derived polymorphism lacks residues 90 to 200
  VARIANT 83: note = Ancestral polymorphism is G, Derived polymorphism is R
  VARIANT 76: note = Ancestral polymorphism is D, Derived polymorphism is Y
  VARIANT 74: note = Ancestral polymorphism is P, Derived polymorphism is L
  VARIANT 65: note = Ancestral polymorphism is Y, Derived polymorphism is H
  VARIANT 52: note = Ancestral polymorphism is P, Derived polymorphism is H
  VARIANT 50: note = Ancestral polymorphism is C, Derived polymorphism is Y
  VARIANT 45: note = Ancestral polymorphism is R, Derived polymorphism is H
  VARIANT 27: note = Ancestral polymorphism is T, Derived polymorphism is P
  VARIANT 14: note = Ancestral polymorphism is A, Derived polymorphism is S
MVQDMLGNEYYIGAFKDGSTWRTNKYTDFSPYSMPHPCDSHLWERHLFHCVPVCYCFHGICSPFHNPKFFIIRPADGNENSQGFVTGLLQAPGQNSWTLESSPGPDVCRMSNCLAPELREKRKRDGDGDAMDVCIHMFLVNKMHLLFLILTVEMLTFVVFLSFDRFQKMAMAILHSTRSRRKVMFMSLPVQLKWQEPFQR

SEQ ID NO: 14081 - protein, 100 aa, Zea mays
  VARIANT 62: note = Ancestral polymorphism is Q, Derived polymorphism is P
MRRRRWAPLAAACLVALAALLAAVHGGGGGGARGAAAPMPATRRPEASARVAAFDAARCKRQRNRAGAACAMLPAAAAAGGGGDDDKRVVPTGSNPLHNR

SEQ ID NO: 14082 - protein, 354 aa, Zea mays
  VARIANT 286: note = Ancestral polymorphism is D, Derived polymorphism is E
  VARIANT 285..354: note = Derived polymorphism lacks residues 285 to 354
  VARIANT 263: note = Ancestral polymorphism is D, Derived polymorphism is V
  VARIANT 257..354: note = Derived polymorphism lacks residues 257 to 354
  VARIANT 226: note = Ancestral polymorphism is T, Derived polymorphism is M
  VARIANT 210..354: note = Derived polymorphism lacks residues 210 to 354
  VARIANT 145..354: note = Derived polymorphism lacks residues 145 to 354
  VARIANT 138: note = Ancestral polymorphism is S, Derived polymorphism is L
  VARIANT 134: note = Ancestral polymorphism is S, Derived polymorphism is L
  VARIANT 97: note = Ancestral polymorphism is S, Derived polymorphism is L
  VARIANT 95..354: note = Derived polymorphism lacks residues 95 to 354
  VARIANT 42: note = Ancestral polymorphism is G, Derived polymorphism is R
  VARIANT 34..354: note = Derived polymorphism lacks residues 34 to 354
  VARIANT 22..354: note = Derived polymorphism lacks residues 22 to 354
MDLRISEGSGTSTTLDDQSVQSPTRRAKVWEYFEQELVEVDRVMKAVCKYCGTKLTSKRNSGTNSLRNLVADTCPKIPVEDQKRFIATMRKRPGEGSFVFDPRKTRECMVKWCISAEVAFNKFDDPFFAPWMESLQPLFSGVGRQTMRNDCIARFKMMRQELRNELQSLNSRICLTSDLWTSNQKLGYLCLTVHYIDANFILKKKTIAFKDVKYPHTGLAIEEVITKCLIEWGIKEKVFTITLDNASNNQSACDLIRESGRSDMLFGGEHLHVRCCAHILNLLVQDGMAIAHGAFDKIRDLFIPLCLDPASSNTLSASGNGEIYASFSGLLMLSRCPLPLLLASSLITDSFHCC

SEQ ID NO: 14083 - protein, 195 aa, Zea mays
  VARIANT 180: note = Ancestral polymorphism is R, Derived polymorphism is W
  VARIANT 93..195: note = Derived polymorphism lacks residues 93 to 195
  VARIANT 70: note = Ancestral polymorphism is R, Derived polymorphism is I
  VARIANT 50: note = Ancestral polymorphism is C, Derived polymorphism is Y
  VARIANT 22..195: note = Derived polymorphism lacks residues 22 to 195
MAAPSLSFPVLLLASTYTFLLQEGVEPLHEEFIDKESVIGSSGLLAGDVCANVADSSFVFCAVSMVFRDRFCVPWYYGLMVDSSTISPRKQVQSDLKVRLAMLKPAKVERMVVITTCSHICTPQKKSQVFYLRRLLTMLHKKQSSKVDIPLNCALSDVLLKDESMADKVEWANNTKVIIRSKGVLSRVQVLRVVQ

SEQ ID NO: 14084 - protein, 201 aa, Zea mays
  VARIANT 43: note = Ancestral polymorphism is E, Derived polymorphism is D
  VARIANT 53: note = Ancestral polymorphism is M, Derived polymorphism is T
  VARIANT 105..201: note = Derived polymorphism lacks residues 105 to 201
  VARIANT 134: note = Ancestral polymorphism is S, Derived polymorphism is L
  VARIANT 159: note = Ancestral polymorphism is A, Derived polymorphism is T
MSLLGMGTCSASTWISPLSCSPTLMHKGVSDPLDVVAAEISYEAIILCLDEFMVTDIADAMILNRLFRQLFSKGVILVLTSNCAPDKLYEGGLQRDLFLPFIDTLKVPGLGLQLDASELNLLYRDRYNTEVPDSYEHLLLDVLDGDSHLFMRSDELVAAWNVLTPIIHEIDQNGVVPELYEAGDRGSINAYHLAAKHGVRG

SEQ ID NO: 14085 - protein, 609 aa, Zea mays
  VARIANT 120..609: note = Derived polymorphism lacks residues 120 to 609
  VARIANT 407..609: note = Derived polymorphism lacks residues 407 to 609
MEWDSDSDGGDDEEEEEVRPGGGDAGPGFSLAIEGVLGACGMVVSDALEPDFPIIYVNRGFESSTGYSAEEVLGRNCRFLQCRGPFAQRRHPLVDAAVVTRIRRCLDEGTEFHGDLLNFRKDCSPYMARLQLTPIYGDDEVITHYMGIQFFNDSNVDLGPSSGSVTKELARSTWIAPGNTDSPTPVGKGNLWEHSSLFLLSDEVICQKILSKLSPRDIASVNSVCKRLHHMTRNEDLWRMVCQNAWGTEATRALETVAGSRSLAWGRLARELTTLEAVAWRKLTVGGAVEPSRCNFSACAVGNRVVLFGGEGVNMQPMNDTFVLDLSASKPEWRHINVSAAPPGRWGHTLSCLNGSRLILFGGCGGQGLLNDVFILDLDAQHPTWREIPGLAPPVPRSWHSSCTVDGTKLVVSGGCADSGVLLSDTYLLDVTMERPVWREIPASWSPPSRLGHSLSVYDGRKILMFGGLAKSGPLRLRSSDVFTLDLSEDKPCWRCITGSRMPGAGNPAGVGPPPRLDHVVVSLPGGRVLIFGGSVAGLHSASKLYLLDPTEDKPTWRLLNVPGHPPRFAWGHSTCVVGGTKAIVLGGQTGEEWTLTEIHELSLASSLV

SEQ ID NO: 14086 - protein, 109 aa, Zea mays
  VARIANT 13: note = Ancestral polymorphism is M, Derived polymorphism is T
  VARIANT 36: note = Ancestral polymorphism is A, Derived polymorphism is D
MAAKIRVVMKSFMSQSNQVVGLLPFTKKVGLPESRALYTVLRSPHIDKKSREQFSMHVKKQFVELTAKPHELHKKFFWLKRLRIPGAQYEVQISFKTRLDMASLRSQAP

SEQ ID NO: 14087 - protein, 390 aa, Zea mays
  VARIANT 376: note = Ancestral polymorphism is R, Derived polymorphism is W
MAAGAGGGELEALEGVRSIVLKPSESLDESRFTRIAGADFNDPAVGLEGLLASLASTGFQASNLGDAIDVVNQMLDWRLSHEKPSEDCDEAELDPKYRASVKCKIFLGFTSNLVSSGIRDIIRFLAQHHMVDVIVTSAGGIEEDLIKCLAPTYRGDFSLPGALLRSKGLNRIGNLLVPNDNYCKFENWIMPLFDQMLQEQSTENVWTPSKVIARLGKEINDESSYLYWAYKNNIPVYCPALTDGSLGDMLFCHAVRNPGLIIDIVQDIRLMNGEAIHATPRKTGIIVLGGGLPKHHICNANMFRNGADYAVYINTAQEFDGSDSGAHPDEAVSWGKIKGSAKPVKGRKVYFIRVEKCIAMQVSLSRFLLQQHLHVRFITPNEQTEWDSVE

SEQ ID NO: 14088 - protein, 541 aa, Zea mays
  VARIANT 87..541: note = Derived polymorphism lacks residues 87 to 541
  VARIANT 142..541: note = Derived polymorphism lacks residues 142 to 541
  VARIANT 345: note = Ancestral polymorphism is R, Derived polymorphism is C
MDARNATPAPAPMEGLLSNPADGRWRMEVARTFHPRGAHRFLWASCGQQIHRPQGPTSFAPLIYAAIYVVENSNWQYHVLVIIADGQVFVQHSERSFHTSDVTSKNNQWEMYSETVPKYRDTKVRTKEPLEQYNQTKDDTDYLWYTTSFRLESDDLPFRNDIRPVLQVKSSAHAMMGFANDAFVGCARRNKQVKGFMFEKPVDLKVGVNHVVLLSSTMGMKDSGGELAEVKGGIQECLIQGLNTGTLDLQVNGWGHKVVYCSWPTSLTTKGLFICHRGICGAGVERVFADKAVPSWREQLTLRAFVINALLAVMFSVIVMKLNLTTGIIPSLNVSVGLLGFFFVCMWTAAAERMGFLRQPFTRQENTVIQTCVVSAYDISFSGGFGSYLFGMSEKIAKQATTVAHIFELPEEKLCLSFLSNNNTGEDETVIFRGDKHYVASRSVSIIWGYRGGMYKEPKFGHLRDLHNIIWSYQKAFLWGQHSSEILGHWYEAHIFELPEEKLCLSFLSNNNTGEDETVIFRGDKHYVASRSVSIIWGYRG

SEQ ID NO: 14089 - protein, 160 aa, Zea mays
  VARIANT 90: note = Ancestral polymorphism is A, Derived polymorphism is P
  VARIANT 74: note = Ancestral polymorphism is P, Derived polymorphism is L
  VARIANT 44: note = Ancestral polymorphism is A, Derived polymorphism is V
MGACTSREATAVAAAPGSPAPEARVVLADGALRRFPGGTRASQAVKASAASSAWFLCSADGLELGGAAAAAVGPEEALQPGQLYFVLPAAMRRRPLRAEEMAALAVRASAALAGDGGGPLVFPEAAAGARTAGKEACRKARRGGRSRGRDFVPDLAAIAE

SEQ ID NO: 14090 - protein, 647 aa, Zea mays
  VARIANT 16: note = Ancestral polymorphism is C, Derived polymorphism is R
MHFTNITNTLQILKNCRNLTSLLIGSNFKGEDMPEDETIDGFQNLQVLSMSNCSLSGKIPLWLSKLKNLQVLLLHTNQLSGTIPAWIKSLESLFHLDISSNKLTGEIPTALMEMPMLTTEKTATHLDPRVFELPVYKNPSLQYRITSALPKLLKLGYNNLTGAIPQEIGQLKSLAVLNFSSNNLSGKIPLELCNLTNLQVLDLSNNHLRGAIPSALNNLHFLSALNISYNNLEGPIPTGGQFSTFSNNSFEGNPKLCGPILHHSCSSAVAPTVSTKQHSRKAIFGIAFGSFFGVALLLLLVYLAVSFKCKRLIKKSKISDNEDVEATSHVSDSEQSLVIVPRGEGGENKLKFADIVKATNNFHQGNIIGCGGYGLVYKAILPDGTKLAIKKLNGEMLTMEREFKAEVEALSMAQHENLVPLWGYYIQGDSRLLVYSYMENGSLDDWLHTMDDDASTFLSWPMRLKIAQGASQGLSYIHDVCKPHIVHRDIKSSNILLDKDFKAYVADFGLSRLVLANKTHVTTELVGTLGYIPPEYGQGWVATLRGDIYSFGVVLLELLTGRRPVSALFLSKELVKWVQEMKSEGKQIEVLDPHLRGLGHDEQMLKVLEIACKCVDHDACMRPTILEVASCLDTIEPTLRMQNSVRI

SEQ ID NO: 14091 - protein, 75 aa, Zea mays
  VARIANT 35: note = Ancestral polymorphism is S, Derived polymorphism is Y
MPMQTKRTKKAGIVGKYGTRYGASLRKQIKKMEVSQHSKYFCEFCGKFAVKRKAVGIWGCKDCGKVKAGGAYTMK

SEQ ID NO: 14092 - protein, 183 aa, Zea mays
  VARIANT 155..183: note = Derived polymorphism lacks residues 155 to 183
  VARIANT 135: note = Ancestral polymorphism is D, Derived polymorphism is Y
  VARIANT 111: note = Ancestral polymorphism is D, Derived polymorphism is V
  VARIANT 108: note = Ancestral polymorphism is D, Derived polymorphism is A
  VARIANT 107: note = Ancestral polymorphism is A, Derived polymorphism is V
  VARIANT 103: note = Ancestral polymorphism is P, Derived polymorphism is L
  VARIANT 89: note = Ancestral polymorphism is R, Derived polymorphism is C
  VARIANT 80: note = Ancestral polymorphism is G, Derived polymorphism is W
  VARIANT 62: note = Ancestral polymorphism is Y, Derived polymorphism is N
  VARIANT 59: note = Ancestral polymorphism is V, Derived polymorphism is A
  VARIANT 58: note = Ancestral polymorphism is A, Derived polymorphism is V
  VARIANT 36: note = Ancestral polymorphism is P, Derived polymorphism is R
  VARIANT 32..183: note = Derived polymorphism lacks residues 32 to 183
  VARIANT 9: note = Ancestral polymorphism is A, Derived polymorphism is V
MATNPSNSVGADVPAASAAVRLSVATQAAAIQPSSPRFFFSSLVGTNPASPHRRIAIAADLNDESAFAVKWAVQNYLRPGDAVVLLHVRPTSVLYGADWGSIPVSVADEDDAAEDAAAAEGGPSEEELQKKWEEDYDAFTSTKAQDLAQPLIDAQIPFKIHVVKDHEMKERPCLEAERLGLPS

SEQ ID NO: 14093 - protein, 88 aa, Zea mays
  VARIANT 84: note = Ancestral polymorphism is R, Derived polymorphism is L
  VARIANT 37: note = Ancestral polymorphism is Q, Derived polymorphism is R
  VARIANT 13: note = Ancestral polymorphism is A, Derived polymorphism is S
MVWGLGGCFGGVAVAAVSPVAAGRKQSASEGGAEAKQQQQQRVAPREEEQQAAASVAGGRKERKKKDGEKASVVVMHQFPFHSRPGLL

SEQ ID NO: 14094 - protein, 347 aa, Zea mays
  VARIANT 60: note = Ancestral polymorphism is A, Derived polymorphism is T
MGSLPAPASAEFAPRPRGRATVVASDLAPLFSAQRRHLDHFFDRLDMAQAAAFAQALLDAPGAVFFTGVGKSGIVARKTAQTLASLGLARAGFLAPVDALHGDIGALFPGDVLVILSKSGASDELLALAPCARAKGAYLVSLTSAASGDDCPLAAACDLNVHLPLQGEVCPFGLAPVTSTAIQMVFGDTVIAAIMEARRLSRDQYASNHPAGKIGKTLIFKVKDVMKKQNELPLCKEGDMIMDQLTELTSKGCGCLLVVDEEHHLIGTFTDGDLRRTLKASGPAIFSLTVGEMCNRNPRTITAEAMAVEAMEKMEAPPSPVQFLPVVNENNVVCGIITLHGLVSAGL

SEQ ID NO: 14095 - protein, 571 aa, Zea mays
  VARIANT 248..571: note = Derived polymorphism lacks residues 248 to 571
  VARIANT 354..571: note = Derived polymorphism lacks residues 354 to 571
MAELRHSMAVRSSNSPAKRDSDTSAASSPFLLSPSTRGSRGGGGGDDDGKDAHRSSPLLSHHHHKRVHLLTSPFRSLLALEDPRSSAASSSYRILLALLALLLAAVIFCAPLFWSRLNTPFLCHKEGITLHCPETKEPPSLWENPRAATMSWKPCAERCSNEPSDVPSVNETSGYIFIHAEGGLNQQRIAICNAVAIAKIMRATLILPVLKQDQIWKDQSKFEDIFDVDHFINYLKDDVRIVRDIPDWFTEKDELFTSIKRTVKNIPKYASAQFYIDNVLPRIKEKRIMSIKPFVDRLGYDNVPTEINRLRCRVNYHALKFLPDIEEMAVKLAARMRNKTGSINPYMALHLRFEKGMVGLSFCDFAGTREEKAMMAAYRQKEWPRRFKNGSHLWPLALQKRKEGRCPLEPGEIAVILRALGYTSGTQIYVASGQVYGGKNRMAPLRNMFPNLVTKEELASAEELAPFRRHVTSLAALDFLVCLRSDAFVMTHGGNFAKLIIGARRYAGHRLKSVKPDKGLMSKSLGDPDMGWASFTEDVVVTHRTRTGLPEPTFPGYDLWENPLTPCMCRA

SEQ ID NO: 14096 - protein, 425 aa, Zea mays
  VARIANT 408: note = Ancestral polymorphism is A, Derived polymorphism is S
MAQLKAAADEQQEAALHGVASGGGNESNKKARAGLCGLLRERKVVDLARAKRRLVEVPYTATLAHTANALLAARVSAVAVAAPPGHWIGAGGSMILESDPATGAVRKHYIGMVNMLDILAHIAEASDDDEAADLDRRMAVPVSSVIGHSLEGLTLWTLHPSTSVLDCMETFSKGVHRALVPLESSADNVVALELVESAPGYRMLTQMDVVRFLRAHGAELRGVLLRTVRELGAVNDTVFAVSGVTKVIDVIKAMRAASLTAVPVVDAVGSGTETLQYGSGQRAVETFSATDLRDCPVARLQAWLGISVMEFKRKVAEYRASTRLVVPGADATDTGTPVAGYADTPAAAAATDEEQSEQQESALVTCSQESTLGEAIEAATSRHVHRLWVVDEEGLLRGVVSLTDILRAVREAALGEDLELHSIVP

SEQ ID NO: 14097 - protein, 65 aa, Zea mays
  VARIANT 6: note = Ancestral polymorphism is S, Derived polymorphism is P
MMIERSAAMALLLALLLVLLLATGGQADADEPATSQQRAVPAEQAPAPKGYETLREEPAPTGGAY

SEQ ID NO: 14098 - protein, 307 aa, Zea mays
  VARIANT 239: note = Ancestral polymorphism is G, Derived polymorphism is S
MRGRASHLRALLSRALSPSLPPPGRALPQVTRPGASPFGAGFVGRARFFSIDASAATQGGSKPPAPPPAGTAGGEGGGGGQSGKSEQADAGKAVRGGPVSWLSFLLLLVTGGGIIVYYDKEKKRHIEELKNRTSAVKPGQSVGTAAIGGPFKLLNHDGKPVTEKDFLGKWTLLYFGFTHCPDICPDELQKMAAAIDKIKEKAKLDVVPVFITVDPERDTVEQVRDYVKEFHPDLVGLTGTTDEVRQVARAYRVYYMKTEEEGSDYLVDHSIVMYLMDPEMKFVKFYGKNYDTDSLADGIVKEIKEHK

SEQ ID NO: 14099 - protein, 274 aa, Zea mays
  VARIANT 21: note = Ancestral polymorphism is V, Derived polymorphism is M
  VARIANT 30: note = Ancestral polymorphism is P, Derived polymorphism is S
  VARIANT 37: note = Ancestral polymorphism is C, Derived polymorphism is Y
  VARIANT 41: note = Ancestral polymorphism is T, Derived polymorphism is M
  VARIANT 82..274: note = Derived polymorphism lacks residues 82 to 274
  VARIANT 202: note = Ancestral polymorphism is R, Derived polymorphism is C
MANPCVFFDMTIGGAPAGRIMMELYANEVPKTVENFCALCTSWRRPARRASRSVVMGDCADEEEAHNRCRRGRDRRQVEGGRPHAYQDEELPGLAGYAWGPRILGLGGGFPLRIWWRPWKTGGRLLNIQRASRSVFKGWSEEKIYFAPTYKYSCNSYSYAGETATSKKKRRTPAWCDRILWHGDGIAQLSYFRGESQFSYHRPVCGTFTVEMDEIVDKAISIMQVTSKHLMYIRKEKLHSGKALSAIEVKELREALEAIAEGLDQDSLLCQSLA

SEQ ID NO: 14100 - protein, 496 aa, Zea mays
  VARIANT 33: note = Ancestral polymorphism is L, Derived polymorphism is V
  VARIANT 171: note = Ancestral polymorphism is S, Derived polymorphism is L
MAGRGEKRRRTGGAHEEPEEEDRISDLPDVLRLQILSLLPLKSAIRTGALSSRWRRLWAYRWPEPSSVSIRLPPGGGAAAAAATAAALAVIDRRGRRRVDGFSLAFHGGQLAQADLKRCVDYAAACEAEDLHLRVDGGAGAGGRGSRGGTRRPGMLTLQFPMGSPLLVRLSVRGLNLTAVNNAMVATLEVVHLHSVFLTDAALRRMVAACPRLRDLDLRYCRRLRRVDFTNVGVPNLRSFTVVDCSRTTELRVPVAPRLRSFRFSGAFLSSNILSGAKASLEHLYLCSGGPETGLPVTNLPYAVPRLSNLTVLTLCSIALQYVSSFTAKDVMESNLHGLRELHLLMFGMANSNLADIYSFLKTCPCPQLERLFVQLPTNTGDAFTENFLKVEEEDPPKGGLENLRLAKLTNFKGHRNEMQLVAFLLRQSSSLKKLFLIAPKEDHPQGLRKVHSDMLPDFLKKEISHLERASANTQIFFGEPDAQTHPLHSEVFVRF

SEQ ID NO: 14101 - protein, 131 aa, Zea mays
  VARIANT 13: note = Ancestral polymorphism is S, Derived polymorphism is R
MLSQSTTLSAPPSPQGLLSLSASSFAPPAWVDDLLALTLAEGQGHSPAPARAMPSPPTSTLRVALLDTCNAIAARLHRLHRRNLLARPSHSPARSSRWKRRYSVIVQLPTHKDFEQTRLSIINTFLFRVSS

SEQ ID NO: 14102 - protein, 113 aa, Zea mays
  VARIANT 63: note = Ancestral polymorphism is R, Derived polymorphism is W
  VARIANT 54: note = Ancestral polymorphism is A, Derived polymorphism is V
  VARIANT 22..113: note = Derived polymorphism lacks residues 22 to 113
MFHNLIGERDSHRHITMEGITEVLVALERIEQQVELTYDQLLMLEANLVFGAFASYDRHRDMRMDIDDMSYEVHALSVCDDPEYFYDYVQGLIDGLNSGLDSRDIVRSQQINR

SEQ ID NO: 14103 - protein, 470 aa, Zea mays
  VARIANT 425..470: note = Derived polymorphism lacks residues 425 to 470
MDERRTILMDRYEIGRQLGQGNFAKVYFARNLTDGQSVAIKMIDKDKITRVGLIVQIKREISIMRLVKHPNVLQLFEVMASKSKIYFVLEYAKGGELFNKVSKAKLSEDAARRYFHQLVNAVDYCHSRGVYHRDLKPENLLLDENENLRVSDFGLSALSESRRHDGLLHTTCGTPAYVAPEVLGRRGYDGTKADIWSCGVILFVLVAGYLPFHDPNLIEMYRKISRAEYRCPRSFSGELKDLLFRMLDPDPSTRISISRIKRSTWYRKPIEANAAKIKHGTARDTTVRDGEAATASSSIECSNRPEEDQGSSSLPNLNAFDIISLSTGFDLSNLFEERHGRREERFTTRQPVGAVFGRLKELAERLKLKIQKKESGVLKLAAQKEGMKGFLELDAEVFELAPSFLLVELKKASGDTIEYQRLVREEVRPALKDMVWAWQSDRHQQQQQRCEQSVQGEDQQQPLSSLPTQQ

SEQ ID NO: 14104 - protein, 1012 aa, Zea mays
  VARIANT 81..1012: note = Derived polymorphism lacks residues 81 to 1012
MSLGPTCLISPRARWANGPRRSFFSLFVLSLLFSCASFAWRRGEKAREWMRRAAIAGGEGGSRSKEAGLAHAGVATPRVEEGPGALGARRYIATPRRRPRGGVRRVDAWPPARPRISTASRRFLFHARVLVRDRQMQVRVPKSTFPSTSTIRRLLVPSGLTSCDAQTAALIRPSEVVGAEEEDWELFLLQWRQHNSLPSPLLNGDLVDRIWSICLPDMAGAQEILGNPLQFASDQLLSQPSENALKAMLFLEFLSLLSPEKLSSTYGCIHANYFGLGIPQELSVSLATYLESHQLLLGSNFYARRHLADNSIGDAPSMAPDFAPSMSSGDDVKLPQSVTETPYAPSSSYNNENPNRPHHSKPAQKHRGVPPISLLEKHKDYVRLVLIVVLPTAAFSFIAAFLIFYCCGCNKNKVSVGEQRDDHPLLHMQLANVPGSSPDARVSASHLNKDNRSHSGVSMSRCFSCCFKRSTDATPSSEVIGGTPENNVTSDAPKPMSPPAPPPLPPPIKKAPPPPPGPPRGSKARLAQLSPVESSRSEGSSASEQTSESSEAEVNAPRTKLRPFYWDKVLANPDQSMAWHDIKFGSFHVNEDMIEELFGYSGGSRNNLKDKELPSADPASQHISLLNVKKSCNLAVVLKAMNIRVQDIHDALIEGNELPRVLLETILRMKPTDEEEQNLRLYNGDFSQLGLAEQVMKALIDTPFAFKRVDMLLFMSSLQEDASSLRDSFHQLEAACGELKHRLFLKLLEAVLKTGNRLNDGTFRGGANAFKLDTLLKLSDVKGADGKTTLLHFVVQEIVRSEGVREARLAMENGRSPAHSASDDTSNGSLEEDGDHYSNRGLSIVSGLSSEMDNVKRVAALDAEPLFATVVTLRQELLKSREFLNEIATVEETSGFRRSLESFVEHADNETGFLLKEEKRLRSLVKKTIRYFHGNDSKDDGFRLFVVVRDFLVMLDKACKEVGASQKGTNKSRSSGSGSGNGNGNPTFPSILQEQQFPAVIDGHSDSSHTSN

SEQ ID NO: 14105 - protein, 586 aa, Zea mays
  VARIANT 43: note = Ancestral polymorphism is A, Derived polymorphism is V
MSPAARRILLAVAARRRRFSTDAAASDPSRASQQLPRGKRWDAVVIGGGHNGLVAAAYLARAGRSVAVLERRGVLGGAAVSESDLVPGFRFSRCSYLLSLLRPAILRDLELERHGLKLLPRSPSSFTPCLDGRYLLLGPDAELNYSEISKFSRKDAVAYPRYEEKLENFCKLMDFVIDSAPPELRQEAHFSMVDRMKHRVEKSAFWGHLLRHVMQQGQKNMVEFFDLLLSPASKILNTWFESEVLKATLATDAVIGAMAGVHTPGSGYVLLHHVMGETGGQRGVWAYVQGGMGSVSSAISKAALEAGVQIVTNAEVSQVMVNETSGMVEGVALVDGTEVHSPVVLSNATPYKTFVDLVPSSVLPEDFLCAIKAADYSSATTKINVAVDRLPQFQCCNTNLEGGPEHMGTIHIGSESMEEIDVAYREAADGISSKRPVIEMTIPSVLDKTISPPGQHVINLFVQYTPYKLSEGSWQDSNVRKAFAERCFSLIDEYAPGFSSSVVGYDMLTPPDLEREFGLTGGNIFHGAMGLDSLFLMRPAKGWSDYRTPVKGLYLCGSGAHPGGGVMGAPGRNAAAVVLEDHVKTK

SEQ ID NO: 14106 - protein, 259 aa, Zea mays
  VARIANT 72: note = Ancestral polymorphism is N, Derived polymorphism is Y
  VARIANT 60: note = Ancestral polymorphism is F, Derived polymorphism is L
  VARIANT 13: note = Ancestral polymorphism is V, Derived polymorphism is I
MMLMPAAISCVPIVFVYPKDQDSVLLVEPADYNACDTSSYVRKFDDGDTVVTLDRSGPLFFISGVEANCRANEKLIVMVLAARSNGNGTGGGAQAPSTAPQPASPAASPPPASSTPPPPSSPAPKGASPPPASAPTTTPGTPPPPAPSASSPAPASSTPPPPSAPQAPPPPPASSASSPAPALTTPPPPSATANAPQAPPPPSASSPSPSAHGATASSTGTPSSPPAGAEVKNGAALTVATGLASSFGACILGYAMLAL

SEQ ID NO: 14107 - protein, 269 aa, Zea mays
  VARIANT 180..269: note = Derived polymorphism lacks residues 180 to 269
  VARIANT 191: note = Ancestral polymorphism is K, Derived polymorphism is N
MQAPKELAKPVATVRAAPFLTSAPAGGDDGVPVELAVAPCALGDGELAEGGGGACGAFAVADGGGGVVNAGAGDDALEAGGGGGACGADGGGGVDDAGAGDDALGAGGGGVPGVVVGAEAGGGDAPLGAGDDGGGGVELAGGGDAAGDAGCGAVLGACAPPPVPLPLLRAARTMTMSFSLARQLASTPLMKKSGPERSSVTTVSPSSNFLTYDDGVSDLKPRPLRPSVEGLGAGGGHAPAIGAADHELRPAGDRSSNGEEASKPKAVVA

SEQ ID NO: 14108 - protein, 116 aa, Zea mays
  VARIANT 64: note = Ancestral polymorphism is P, Derived polymorphism is T
  VARIANT 83: note = Ancestral polymorphism is P, Derived polymorphism is T
  VARIANT 92: note = Ancestral polymorphism is G, Derived polymorphism is S
MSDLVVPLYITAREYGGRVHLLYITARASPTRAEDSTPRAARKSDPDRLALSPPQGYTVAATCPRQQKGAFAARPSVSRRLAPALRQRPLSGLVYRFLGIIIESYETSISQGDEEI

SEQ ID NO: 14109 - protein, 173 aa, Zea mays
  VARIANT 16: note = Ancestral polymorphism is L, Derived polymorphism is I
  VARIANT 98: note = Ancestral polymorphism is S, Derived polymorphism is P
MSDERVKAEALQILGLFQVLPRLVVFDLDYTLWPFYCECRSKRDSPSLFRHARGIMYALKEKGIDMAIASRSPTPDIAKVFLDKLEFQSMFVAQEIFSSWTHKTEHFQKIQRKTGIPYKSMLFFDDENRNIEAVSKMGVTSVLVENGVNLDMFKLGLSNFATNCAASSRKDDE

SEQ ID NO: 14110 - protein, 136 aa, Zea mays
  VARIANT 4: note = Ancestral polymorphism is S, Derived polymorphism is W
MATWQVIVAVVEGTRLAPDTADLETSSSTAATQQTDSTEKTALAVAATAAVDLTNLFFLLRGDTDTDAERRRRWGWTGGICVLFAFAALLSAAGTVLAPHVVSAARRRVLLVASAAALFVASAGTVLVLLLVELDA

SEQ ID NO: 14111 - protein, 223 aa, Zea mays
  VARIANT 56: note = Ancestral polymorphism is A, Derived polymorphism is G
  VARIANT 12: note = Ancestral polymorphism is D, Derived polymorphism is N
MKATLKGRYEGDKATAATTLAAPAGDLRLKASATEAAFTNGPSLRGLTLTLEKPGAFLVDLKPHNQDVRFQFMNSALVLDKRVSLTYTHSTSLAAAPAAAPPSRTALDCTVTFDPANKVSLSHSLGSGGCRLKYTYAHGVDRLTTIEPLFDTNKNAWEFAITRKFAGGDAVKGTYQASTKLLGLEWSRDSLAGGSFKVATTFDLSDQSKAPKLIAESTWNYEI

SEQ ID NO: 14112 - protein, 103 aa, Zea mays
  VARIANT 45: note = Ancestral polymorphism is K, Derived polymorphism is M
MASEDVVGKSRDDTAVTTIVNLAEEAKLAREGVKAPDHQILTICKSLVAGGVAGGVNTPVLIDALSSDGSACKKLESSTTAPFAVHGYANFEFDSLMPTELKA

SEQ ID NO: 14113 - protein, 158 aa, Zea mays
  VARIANT 29..158: note = Derived polymorphism lacks residues 29 to 158
  VARIANT 43: note = Ancestral polymorphism is T, Derived polymorphism is I
  VARIANT 64: note = Ancestral polymorphism is G, Derived polymorphism is R
MGEGAVSLRVSVRTPIGAKGRKKRGKRKYLWEQPRSSASKWVTREGAAPPLVFARMSATTCCQGSTATMKQDVDLALALLFWLRQGSVLLNASNFSIGGVLVGRVFGHGDLGAGERWRLGPPRAPPPRTLYDTTAQGDLGRGRQGVGRGGRGLGFCPA

SEQ ID NO: 14114 - protein, 366 aa, Zea mays
  VARIANT 1: note = Ancestral polymorphism is M, Derived polymorphism is I
  VARIANT 33: note = Ancestral polymorphism is S, Derived polymorphism is Y
  VARIANT 37: note = Ancestral polymorphism is A, Derived polymorphism is E
  VARIANT 42: note = Ancestral polymorphism is S, Derived polymorphism is P
  VARIANT 50: note = Ancestral polymorphism is T, Derived polymorphism is N
  VARIANT 91: note = Ancestral polymorphism is S, Derived polymorphism is I
  VARIANT 94: note = Ancestral polymorphism is F, Derived polymorphism is V
  VARIANT 126: note = Ancestral polymorphism is A, Derived polymorphism is T
  VARIANT 191: note = Ancestral polymorphism is K, Derived polymorphism is N
MRLPPPSTTAAAAAATVGAVLAAVALRRYLSASRHREPARVPMSAAAGATTLVVYGKSAQEQELLASAAGSVVLGEGDPSGDVAIALAYESAGFDAAAYMSALRARRFGRWMLWTPRIGSTQDLITRNFAKLPVGVVCVADVQFKGRGRSKNVWESPPGCLMFSFTSQMQDARKLPLMQYVVCLSITEAIKELCRAKGLPELDVRIKWPNDLYLKGLKVGGILCTSSYEPKVYNICTGVGLNVDNEKPTTCLNAALQEANHTSPILKREDILAYFFNKFENLFEIFMNHGFQVLEEQYYNSWLHSGQRVVVHDAHENKSGSVVTIQGLTPTGYLHAIGEDNKSYELHPDGNSFDFFTGLVRRKMEA

SEQ ID NO: 14115 - protein, 30 aa, Zea mays
  VARIANT 18: note = Ancestral polymorphism is F, Derived polymorphism is V
MFNGAPSLLSADELRQKFQQAGRNFPRQTH

SEQ ID NO: 14116 - protein, 224 aa, Zea mays
  VARIANT 58..224: note = Derived polymorphism lacks residues 58 to 224
  VARIANT 29..224: note = Derived polymorphism lacks residues 29 to 224
MASVVVRPSKLLLALLVAAMAASPRALAYDPSPLQDFCVADTASNVFVNGQACKDPAQVTAADFAFSGLQDAGDTGNAFGSKVTLVDARALPGLNSLGVAMARLDIAPGGVNPPHTHPRATEVLTVVEGQMYAGFLATDGKLFARVLNRGDAFVFPRGLVHFEFNCGAGPAVGLAGLSSQNPGLVRVADSLFGAAPAVTDEVLAKAFRIDAATVQRIKAQFAKK

SEQ ID NO: 14117 - protein, 444 aa, Zea mays
  VARIANT 315: note = Ancestral polymorphism is A, Derived polymorphism is T
MREILHIQGGQCGNQIGAKFWEVICDEHGIDHTGKYAGDSDLQLERINVYYNEAGGGRFVPRAVLMDLEPGTMDSVRSGPYGQIFRPDNFVFGQSGAGNNWAKGHYTEGAELIDSVLDVVRKEAENCDCLQGFQVCHSLGGGTGSGMGTLLISKIREEYPDRMMLTFSVFPSPKVSDTVVEPYNATLSVHQLVENADECMVLDNEALYDICFRTLKLATPTFGDLNHLISATMSGVTCCLRFPGQLNSDLRKLAVNLIPFPRLHFFMVGFAPLTSRGSQQYRALTVPELTQQMWDAKNMMCAADPRHGRYLTASAMFRGKMSTKEVDEQMLNVQNKNSSYFVEWIPNNVKSSVCDIPPTGLAMASTFVGNSTSIQEMFRRVSEQFTAMFRRKAFLHWYTGEGMDEMEFTEAESNMNDLVAEYQQYQDATAEEEEEYKEGDEVAA

SEQ ID NO: 14118 - protein, 888 aa, Zea mays
  VARIANT 43..888: note = Derived polymorphism lacks residues 43 to 888
  VARIANT 81: note = Ancestral polymorphism is M, Derived polymorphism is K
  VARIANT 239..888: note = Derived polymorphism lacks residues 239 to 888
  VARIANT 458: note = Ancestral polymorphism is P, Derived polymorphism is H
MGAQIDKSVNNGRGPPLFKICGQVYHRVGSLLPLDGSPPKFIQLYIYDTANEVQNRIECIKDNEGPHQDLDPSIVKDLIKMLDLHNPLAKKFRMARERLANNKNEEFIIRLIGAREGDSVQYNLPSVEELAMLVVGDFSLDTFKRDIIIEMRSKELKRISALHPAFMALQYPLLFPFGERRFQIGIIYNGVNPSDKGKHTHMTMQEYYCHQFHYRKNQPNPYLCYGLLSSQAKVDARACIDESRLEYILQNQKNLRMETIQGITDAISHGYTSGNEMGKTIILPASHIGGRRYMIQNYHDSIAICRIHGPPDFFITFTCNASWPEIQKSFFEPGQNPPDRSDVVVRVFHMKLQDMLHDIKSRSFFGPCNADMEFTLIPNLVPQNRHAVIKGNGISAEIPGNLAEEKGSIIEENEIYEISRFTISSARQMFKPVHIDKMIHFTYHTIIKASLDSPSTFPRYVYHLTPLHQIESYIQKNEYFLDVLGVITQVSALKPVRTQTRESSNVIKEIIIKDINDVTMRLTLWAERAKAFKLDDVYNPLEQKPIVTLFVGCLAKNFQGAYLNGGTTCRWYFNPDIKEAAPYYQRFGSQKVKLQIPSEQEQQLSVAKETHVEHKTLHELLALDPYAFPKQGYECTVTIIEVPTTNRWWFPACTKCSRACRPQDGGYYCSYCKSEAYTLRYKLTFMGSDATATAQMFCFDTVARHIVGRPCETVLKQATEATPIPPDLAQIVSLKFTFRVTASNQTFAQREKQPTVLQINSIVVHGRQHYLPSGIQNTIDQGPSTPNKEATLKLLEESPSIAMERLSTKVSKDVGRKLTYSTQDKDIIGSQVLDVAQGTNADKGIPTDKGKEIEPHLQSPPKRESPLIKAKRSNLIFNLLQKGTNKDR

SEQ ID NO: 14119 - protein, 126 aa, Zea mays
  VARIANT 45: note = Ancestral polymorphism is A, Derived polymorphism is S
  VARIANT 48: note = Ancestral polymorphism is E, Derived polymorphism is Q
MKRLLRRLSRTVVAAAASSEDGGAAARPSSKDDGSRRRRRKKAGSVPEGHVPVCVGEEGGPVERFAVRAELLGEPPFAALLRRAAQEYGYAHPGALRIPCPVADFRRLLLRLSRDPAPAAGRYAYA

SEQ ID NO: 14120 - protein, 265 aa, Zea mays
  VARIANT 40: note = Ancestral polymorphism is L, Derived polymorphism is S
  VARIANT 138: note = Ancestral polymorphism is A, Derived polymorphism is V
  VARIANT 200: note = Ancestral polymorphism is V, Derived polymorphism is M
  VARIANT 201: note = Ancestral polymorphism is L, Derived polymorphism is R
  VARIANT 204: note = Ancestral polymorphism is A, Derived polymorphism is V
  VARIANT 214: note = Ancestral polymorphism is A, Derived polymorphism is V
  VARIANT 242: note = Ancestral polymorphism is S, Derived polymorphism is L
MEPGSPAPKKSRLVHSADCEMEEAQAPSSSNAAGGVNQSLHWTQWQILDSILPTGGFAHSYGLEAAMQSRVVNDQEDLRSFVVQVLDSAGSLLLPFVHCACAGKSPGDAAAWAKLDRLLDATLTNEVARKASAAQGSALLRVAASVFAEVPALQELRRTLLGSKSVSFHHAPVFGLVCGLVGFDGETAQRAYMFVTMRDVLSAATRLNLIGPLAASVLQHQLAPDAERMVRKWRDRDVSEASQTAPLLDAVQGCHAYMFSRLFCS

SEQ ID NO: 14121 - protein, 217 aa, Zea mays
  VARIANT 50: note = Ancestral polymorphism is P, Derived polymorphism is L
  VARIANT 41: note = Ancestral polymorphism is N, Derived polymorphism is T
  VARIANT 7: note = Ancestral polymorphism is A, Derived polymorphism is G
  VARIANT 2: note = Ancestral polymorphism is A, Derived polymorphism is P
MACMRRAPCVPACGWEPVVYFPQGHSEQIINLVQRLLSHDNQVQEVSRIPNGSNPGNCISLLREQLQKVLDAGISIKVWSISAYGIGFLLLSGHCIAIALVDKLKLKLRYWQNIIITIISKEVYHVGVIMMYNSTMRSQTTWPSDPAHTRRSLSHPVFRRQLATVRRKQRAPVPLPRSPSPSLCPHIPSHDTETMTTHTAEELATQIEQQKLEEQKT

SEQ ID NO: 14122 - protein, 574 aa, Zea mays
  VARIANT 476..574: note = Derived polymorphism lacks residues 476 to 574
  VARIANT 224..574: note = Derived polymorphism lacks residues 224 to 574
  VARIANT 137..574: note = Derived polymorphism lacks residues 137 to 574
  VARIANT 15: note = Ancestral polymorphism is F, Derived polymorphism is L
  VARIANT 12: note = Ancestral polymorphism is H, Derived polymorphism is D
MVAEPEPQPLVHKVFSMAATSPSFSSSKKVRPAASAKGGGAAGGDGRVGILSFEVANAMSRAASLYRSLSDAEAARLLGPQCLGSHAVRALVPGDDARLLALALAEKLDALNRVAAVASRLGRRCAAPALAGFGHVYADLLAGRADAGALAAVASRSDAAPLVRRLDRVAAATAALYAELDALAELEQSARRPPTDQARRALEQRARWRRHDVRRLRDASLWNWTYDRAVLLLARAVCAIYGRIRLVFGDPVLGLDLLAMTGVGESGQCEQIPQLSGMVAADSGPVLQSSLSDGRSAPICRVDHPDMSRPVSFRSSCGASPGKMFMHCLSLSSSAPWTDMLEDEFSEDSSCISSTIRSGMLAPFSSEQGVPTTTTTTPPAPNSGSIGRKARRFGPKSTVTSLAPASTVGGSALALHYANIVIVVEKLLRYPHLVGEEARDELYQMLPRSLKLALRKSLRARARSTAIYDAFLAHDWRETLEKTTLAWLAPMAHNTVRWQAERSFEFEQQQQRVVSERSVLLLQTLYFADREKTEAAVCELLVGLNYICRYERQQNALLDCSSSDFDDCVEWQVQ

SEQ ID NO: 14123 - protein, 421 aa, Zea mays
  VARIANT 329: note = Ancestral polymorphism is S, Derived polymorphism is L
MHAEYASLWLANPDTLSSHPSRERDQLTQIRIQTSSESIPLCISASPSSLPRPPSPLTIFSKRPEMVSLRCTTAHHSLLGSPTCLARPRRRPCPVVRAAVAVEAGAQAKVSLIRIGTRGSPLALAQAHETREKLKAAHSELAEEGAIEIVIIKTTGDMILDKPLADIGGKGLFTKEIDDALLQGRIDIAVHSMKDVPTYLPEGTILPCNLPREDVRDAFICLTANSLAELPAGSVVGSASLRRQSQILYRYPSLKVVNFRGNVQTRLRKLKEGDVSATLLALAGLRRLKMAENATAVLSVEEMLPAVAQGAIGIACRSNDDKMMEYLSSLNHEDTRLAVTCEREFLAVLDGNCRTPIAAYAYRDKDGNCSFRGLLSSPDGSKVFETARSGPYSFDDMVEMGKDAGHELKAKAGPGFFDSLQ

SEQ ID NO: 14124 - protein, 160 aa, Zea mays
  VARIANT 93: note = Ancestral polymorphism is G, Derived polymorphism is R
MEPATPPAPAAGVTATVDLSSVAADLGGAHLLPCGIRQNGGAPVSDYFKPRDTGVEVEGVKMEEAFFRGRKLQGTTLALPDGYRGYVLEKSRGQNSDAEVSNFTSRAEFQSITYWNHDTAPSAEDSLPRCFHWLTVANAMHRAVTAEDLTNMAAMQNQDK

SEQ ID NO: 14125 - protein, 152 aa, Zea mays
  VARIANT 79: note = Ancestral polymorphism is R, Derived polymorphism is H
  VARIANT 53: note = Ancestral polymorphism is S, Derived polymorphism is F
MVGSNSSVHGSELHQIADSLVAAMERMLNERLSTIGGRRLHHCDPEELNHEESGDENSGFSHEFDPFGDGRRGYGDGRHTNFDNLCGRRHAHGHRVRFEDEEFEDRDREASDENPFANDGMFGWHHHHQHANFEDSESYHGHRHRNDPNNIA

SEQ ID NO: 14126 - protein, 168 aa, Zea mays
  VARIANT 106: note = Ancestral polymorphism is N, Derived polymorphism is T
  VARIANT 48..168: note = Derived polymorphism lacks residues 48 to 168
  VARIANT 43: note = Ancestral polymorphism is S, Derived polymorphism is P
  VARIANT 27: note = Ancestral polymorphism is S, Derived polymorphism is P
  VARIANT 23..168: note = Derived polymorphism lacks residues 23 to 168
MSVLCTSKLLLDQVWTSVMEETQLLHPGFTACIAYQNTDLTVSCGTLQVMYDAFGVRLHAGKQAEVQSFVPVVLLLPNHAGKQAEDQKVDEAILEVLDLRWYGSTNDAKQADLYTMLNKQSSRGQNGSGVTGSSSQGFMAYVQTDSGKTTTFYFPITGIIMQPARMPQ

SEQ ID NO: 14127 - protein, 159 aa, Zea mays
  VARIANT 114..159: note = Derived polymorphism lacks residues 114 to 159
  VARIANT 109..159: note = Derived polymorphism lacks residues 109 to 159
MEPATPPAPAAGVTATIDLSLVAADLGGAHLLPCGIRQNGGAPVSDYFKPRATGPDGYRVIQQQQQQQQYQSFSPNRNCEFDRSFVLEKRHGHNSNAEVNNFTSQAEFQSITYWNHDTTSSTEDSLPRCFHWLTVANAFCQTVRRNPNSHDICTSSRTL

SEQ ID NO: 14128 - protein, 38 aa, Zea mays
  VARIANT 18: note = Ancestral polymorphism is D, Derived polymorphism is N
  VARIANT 4: note = Ancestral polymorphism is P, Derived polymorphism is L
MLSPDTEKKRKGMWIQIDGVHEVNRLLHLGERRARRRA

SEQ ID NO: 14129 - protein, 314 aa, Zea mays
  VARIANT 27: note = Ancestral polymorphism is G, Derived polymorphism is A
MNDLMTKSFMSYVDLKKAAMKDLEAGGDGIELPESGAGGVTDERLRGFFQEAEAVKAEMAAIRDALDRLHAANEEGKSLHQVDALRAHRGRVNADIVAVLRRARDIRARLESLDRANAAQRRLSAGCREGTPLDRTRTAVTSGLRKKLKDLMLDFQALRQRMMSEYKDTVQRRYYTLTGEVPEEEVIERIISDGRGEELLGAAVAEHGKGAVLAAVHEIQDRHDAAREVERSLLELHQVFLDMAVMVEMQGEKLDDIESHVASASHYVQGGNKELGKAKEYQRSSRKCLCIGIIILLLLVLLVIVPIATSLRKS

SEQ ID NO: 14130 - protein, 166 aa, Zea mays
  VARIANT 43: note = Ancestral polymorphism is A, Derived polymorphism is D
  VARIANT 102: note = Ancestral polymorphism is R, Derived polymorphism is C
MKILNQPISPGGHLVPAQPSTTAAAGRSHAHCPRWQAQTLRRDSSYVGVEHIDGTTASVPVPVPVPVAAPPPPQMVALRVLVTSAVELDARQAERIARKMRRLTGFVDLKVETAVDASLIAGFVVCYGTDDSHVIDLSVRGQLAALKSRVDSIDQTAHAHGHPHHH

SEQ ID NO: 14131 - protein, 284 aa, Zea mays
  VARIANT 270: note = Ancestral polymorphism is Y, Derived polymorphism is N
MASQWAAPPPGYPAGHGQAYGDQQLATPPPQAATAVAVTAASNGVGNPYVVVTPASAAPSTCQTVRKALGRYGKLLEDGTRKAADATGNIWHHLRTAPNMADAAVARLTQGTKVYAEGGHDRVFYQTFGAMPGEQLRKAYACYLSTSSGPVIGTLYLSTARLAFCSDSPLCYQGPAGQPHECMYYKASSSLPFSRIQKFSSVACIFFSSLVTICEVYLQVVLPLSQVTSVNPSSSMRNRAERYIQIRTMDNHEFWFMGFVNYDKALKNLYEALQHRDVSAHQRC

SEQ ID NO: 14132 - protein, 240 aa, Zea mays
  VARIANT 146: note = Ancestral polymorphism is G, Derived polymorphism is R
MAAAPTVRGYGPASPSSSSVALPRPRSRVPAPLVPVTTRRGAPSVRLRAAGADTPPRGGLQLQRREEDEGLPGTVLGRGEDDEVSEKVGEEKVERWMRDSIAEIVRHVGEAPFLVHLFSSGEGERVTVRREPAAPESWPDVRRRWGPGGARRPDGIILVEQVASDGGGASAASEAARQVWGLVVQARGMERASCYVLSTCRVRSSAGFCTHFCLARAQCFGDPVELQLRNAWLNRLAGRR

SEQ ID NO: 14133 - protein, 146 aa, Zea mays
  VARIANT 44: note = Ancestral polymorphism is L, Derived polymorphism is I
MTTSLKKNRKKRGHVSAGHGRIGKHRKHPGGRGNAGGMHHHRILFDKYHPGYFGKVGMRYFHRLRNKFHCPSVNVERLWSMVPAGKAAEAAGADQAPLVDVTQFGYFKVLGKGMLPSRPIVVKAKLISKVAEKKIKAAGGAVLLTA

SEQ ID NO: 14134 - protein, 597 aa, Zea mays
  VARIANT 221: note = Ancestral polymorphism is G, Derived polymorphism is V
MLSVEAHTYYYYPTARPRRKLCACRNVLQETAPRDAEADPCRHGERKSRRRGDGAYYIDKDGGGVARTFDRKKISRKRGGAIKGRGWKYGSGFVDGVFPVLSPMAQDVLELVQTRGTDAASVWESLDKIPQAHDLWDDIVNVAVQLRLNRQWEPIITVCEWVLRRSSFRPDIICYNLLIDAYGQKRQLSEAEAAYMALLEARCVPTEDTYALLLRAYCGSGQLHRAEGVISEMQRNGIPPTATVYNAYLDGLLKARCSEKAVEVYQRMKKERCRTNTETYTLMINVYGKANQPMSSLRVFREMKSVGCKPNICTYTALVNAFAREGLCEKAEEVFEEMQQAGHEPDVYAYNALMEAYSRAGLPQGASEIFSLMEHMGCEPDRASYNILVDAFGRAGLHQEAEAAFQELKQQGMRPTMKSHMLLLSAHARSGNVARCEEVMAQLHKSGLRPDTFALNAMLNAYGRAGRLDDMERLFAAMERGDGAIAGAPDTSTYNVMVNAYGRAGYLDRMEAAFRSLAARGLAADVVTWTSRIGAYARKKEYGQCLRVFEEMVDAGCYPDAGTAKVLLAACSDERQVEQVKAIVRSMHKDAKTLFAL

SEQ ID NO: 14135 - protein, 55 aa, Zea mays
  VARIANT 8: note = Ancestral polymorphism is E, Derived polymorphism is G
MRYCALVEMYISSHHICIPFATVVTSHGTIYESNCYNIGNPCNYTISIGISCFCQ

SEQ ID NO: 14136 - protein, 419 aa, Zea mays
  VARIANT 103: note = Ancestral polymorphism is V, Derived polymorphism is E
MAALSAPLRAVAAGSRVAASDPVKVSCVRSTGSAHFGCAFPYIRASSSAARNLEPLRAIATQAPPAMPQYSSGEKTKIGINGFGRIGRLVLRIATSRDDIEVVAVNDPFIDAKYMVRKLILILAYMFKYDSTHGPFKGSIRVVDDSTLEINGKKVTITSKRDPAEIPWGNFGAEYVVESSGVFTTTDKASAHLKGGAKKVVISAPSADAPMFVVGVNENSYDPKMNVVSNASCTTNCLAPLAKVVHEEFGIVEGLMTTVHATTATQKTVDGPSMKDWRGGRGAAQNIIPSSTGAAKAVGKVLPELNGKLTGMAFRVPTPNVSVVDLTCRIEKSASYDDVKAAIKTASEGALKGILGYTDEDVVSNDFVGDSRSSIFDAKAGIGLSSSFMKLVSWYDNEWGYSNRVLDLIAHMALVSAKH

SEQ ID NO: 14137 - protein, 109 aa, Zea mays
  VARIANT 4: note = Ancestral polymorphism is G, Derived polymorphism is R
  VARIANT 39: note = Ancestral polymorphism is R, Derived polymorphism is C
  VARIANT 60: note = Ancestral polymorphism is R, Derived polymorphism is Q
MASRTSAAALLLPLLVLVLFAAAGARADGATEFSPPRARRTGQVPGDGVVRAEKNCPLVRVPSIVDACRSAPGLPACAAQCIVYHYRGGYCDMLPHGRPGDCYCTNCLA

SEQ ID NO: 14138 - protein, 332 aa, Zea mays
  VARIANT 163: note = Ancestral polymorphism is R, Derived polymorphism is W
MDRYQRVERPRNESTIEENEIRITAQGLIRNYVSYATSLLQERRIKEIVLKAMGQAISKSVAVAEIIKKRIPGLHQDTNISSVSITDVWEPIEEGLVPLEMTRHVSMISITLSPRELDKHTPGYQAPVYIEQPRQQQVPPPQRQPRRPPAQFQQLEYEDSYARGRGRGRGRGRGWGRGGYGGYGGYGNNQGGYHQGGGYYDNQGGYNGYDNQGGYSGYDNQGGYGGGYGYNQGRYGNYQENGGYNRGRGSGMRGRGNWGYRGGSMKVAGEGAMKEAGEAAMKVAGVAVLRVEGVTVAVEGVEWVVADEGTSAVLAFPSKCMPHLYQGKRQVI

SEQ ID NO: 14139 - protein, 245 aa, Zea mays
  VARIANT 138: note = Ancestral polymorphism is T, Derived polymorphism is K
MVMASSSGLRSCSAVGVPSLLAPSSRSGRLAPFCANATTSGRVTMSAEWMPGQPRPAHLDGSSPGDFGFDPLGLATVPENFERFKESEVYHCRWAMLAVPGILVPEALGLGNWVKAQEWAAVPGGQATYLGAPVPWGTLPTILVIEFVAIAFAEHQRTMEKDPEKKKYPGGAFDPLGFSKDPAKFEEYKLKEIKNGRLAMLAFVGFCVQQSAYPGTGPLENLASHLADPWHNNIGDIIIPRSISP

SEQ ID NO: 14140 - protein, 60 aa, Zea mays
  VARIANT 19: note = Ancestral polymorphism is P, Derived polymorphism is S
  VARIANT 20: note = Ancestral polymorphism is R, Derived polymorphism is W
  VARIANT 37..60: note = Derived polymorphism lacks residues 37 to 60
MNLASVGQGASDKQFGTLSRWRFKEPDVATNRERDDQSRIKAQNPIIEMDEDEMTGSSRR

SEQ ID NO: 14141 - protein, 155 aa, Zea mays
  VARIANT 3: note = Ancestral polymorphism is R, Derived polymorphism is I
  VARIANT 7: note = Ancestral polymorphism is R, Derived polymorphism is C
  VARIANT 56: note = Ancestral polymorphism is A, Derived polymorphism is S
  VARIANT 60: note = Ancestral polymorphism is A, Derived polymorphism is T
  VARIANT 67..155: note = Derived polymorphism lacks residues 67 to 155
  VARIANT 126: note = Ancestral polymorphism is T, Derived polymorphism is I
MPRKKMCILLMPFFATSHIAPFTDLAFHLVAARPDDVEAAVAVTLANALVVQSALARRGASHLATVKVATYPFPSVDGLPSGVENHSMVKAATDVWRIDVVATDEKLMRPEHESLIREHAPDLIITDIHFWWNTYKIPPASVEMVWLFSGRRAEG

SEQ ID NO: 14142 - protein, 278 aa, Zea mays
  VARIANT 176: note = Ancestral polymorphism is N, Derived polymorphism is S
MAAEPAAADHDLRPPLADGAAAAGVGAASLAAAAGAAEALMSATSEQLTLVYQGDVYVFDPVPPQKVQAVLLVLGGYEVPPGLVNMAVSSANDEKNTTVAARRVASLMRFREKRKERCFDKRIRYSVRKEVAQKMKRRKGQFAGRSDFGDGACSSAACGSPANGEDDHFRETHCQNCGISSRLTPAMRRGPAGPRSLCNACGLMWANKGTLRSPLNAPKMTQQLLANPCNMVDTDDKNSNVLPVEHNQATPKTDSMMPKEEQKLDIRLPTEEDTKAVS

SEQ ID NO: 14143 - protein, 167 aa, Zea mays
  VARIANT 7: note = Ancestral polymorphism is H, Derived polymorphism is R
MASRLLHLRRLITPPSTVPAASFSTAVSATPRVSALVDEICGLTLLEASSLADALRGRLGVDQLPPLAILTGGGAPLVGGGVGPGAAGEEAKAKEEKMAFDVKLEGFDAAAKLKIIKELRAFTNLGLKEAKDLVEKAPAVLKAGVPKEEAESIAEKMRALGAKIVLE

SEQ ID NO: 14144 - protein, 104 aa, Zea mays
  VARIANT 65: note = Ancestral polymorphism is S, Derived polymorphism is L
  VARIANT 8: note = Ancestral polymorphism is L, Derived polymorphism is V
MARYVEMLDMGVRIAARFHSHCPQTARMYYKPPQTQTQTQSQSSSSSSADDSKAATASSALDAPSVRRPFALAAAAAEFRAGDRSGHHQLHGLDTALVVVYEVM

SEQ ID NO: 14145 - protein, 220 aa, Zea mays
  VARIANT 165: note = Ancestral polymorphism is R, Derived polymorphism is P
  VARIANT 156..220: note = Derived polymorphism lacks residues 156 to 220
MATPTPMGAVRVERVRGRSALTRCFARYPLKLIAPSRVGPSSCDAVWLYALTYGGGIVSGDTVSCTVSVGDGCTAAITTQASTKVYKAVGSKCSEQLLETLLEQSSSYSIAERMREYNVVAMVVLLGPKLRDIQDKMQDEVRKLMSGQLRPPTAGGSLYTTRSQRPRRPPLVASCSPFGRTGTGMVARVAAVSTELAYIFLRHHLAALEPFLGAPPYAAS

SEQ ID NO: 14146 - protein, 361 aa, Zea mays
  VARIANT 241..361: note = Derived polymorphism lacks residues 241 to 361
  VARIANT 152: note = Ancestral polymorphism is R, Derived polymorphism is C
  VARIANT 137: note = Ancestral polymorphism is P, Derived polymorphism is L
  VARIANT 119: note = Ancestral polymorphism is T, Derived polymorphism is I
  VARIANT 118: note = Ancestral polymorphism is T, Derived polymorphism is I
  VARIANT 116..361: note = Derived polymorphism lacks residues 116 to 361
  VARIANT 100..361: note = Derived polymorphism lacks residues 100 to 361
  VARIANT 96: note = Ancestral polymorphism is C, Derived polymorphism is R
  VARIANT 95..361: note = Derived polymorphism lacks residues 95 to 361
MLASLALQRRSMPHSRSSTSFNRPLDRSDEDALVPDHQIAAMEPDLVAAGASSSPARLALHLIYSSSFFPAGFLLCEKKQVTQLAWCASSPQTTWRLVEWDFFLNLIAPVASRVPYMTTIGNHERDYAETGSVYVTPDSGGECEVAYESYFCMPAVSKDKPWYSIEQGSVHFVVMSTEHKWSEMSEQYKWMNQDLSSVNRSRTPWIIFIGHRPMYSSHVGIPVNVDLTFVASVEPLLLKHQVDLVFFGHVHNYERTCAVYKNRCKGKPKKDASGIDTYDKCKYTAPVHATVRAGGFSLDKFPRIVLNKWSLSRVSEFGYARVHATRGDMLVQFVSSRTMEVLDQFRIVKPDPARRLRNKPV

SEQ ID NO: 14147 - protein, 142 aa, Zea mays
  VARIANT 112: note = Ancestral polymorphism is G, Derived polymorphism is R
  VARIANT 43: note = Ancestral polymorphism is A, Derived polymorphism is D
  VARIANT 34: note = Ancestral polymorphism is H, Derived polymorphism is N
  VARIANT 12: note = Ancestral polymorphism is G, Derived polymorphism is D
MIQGGDIVRGDDKGSESIYGGIFPDENFTVKHTHPATPDFKKALYRDLLSCLSATSPNILGLLLWRILDLILMDLSLHNYYQDKLLCRLDGEHVVFGRVIQGMDTVYAIEGGAGIYNGKPRKKAMITDAGEIPKEKWGDQEA

SEQ ID NO: 14148 - protein, 425 aa, Zea mays
  VARIANT 127..425: note = Derived polymorphism lacks residues 127 to 425
MLRLRACGGTAPASVPALVRSRLSRRSSSAAYAAATVASASSSSSTLEDLAAEHRGLAKVILKKGKTQIFRDGSPMVYSGAVNRIIGRPPPKSGDIVLVADGTEKPIGWGLYNSVSMFCVRLMQLEEEARRDPTCALNMERLLEARISSAVGLRHSLGLPSADTNAYRLINSEGDRLSGLIVDIFADVAVIASSAAWVEKYRQEIQFLVSKVNGVSHIKWRPSTDILKEEGLDISEHKEPASTCSTVKDQRVLDLCCYSGGFALNAAKGGADNVIGIDSSGSALDLANENIVLNELNQGKVSFVKGDATTFMKGAISENELWDLVILDPPKLAPRKKVLQSASGMYRSLNALAMQVVKPGGLLMTCSCSGAMTQSGMFLKTIQGAASMAGRKVTVLRQAGAACDHPIDPAYPEGQYLSNYLLRVA

SEQ ID NO: 14149 - protein, 184 aa, Zea mays
  VARIANT 3: note = Ancestral polymorphism is L, Derived polymorphism is R
  VARIANT 51: note = Ancestral polymorphism is P, Derived polymorphism is L
MFLSFFFALQPVGVVGAITPWNFPLAMITRKVGPALACGCTVVVKPSEFTPLTSLAAADLALQAGIPAGALNVVMGNAPEIGDALLQSTQVRKITFTGSTAVGKKLMAESANTVKKVSLELGGNAPCIVFDDADIDVAVKGSMPVLPVSHSQIVEVVNDERIGELARKEVEEMDLSSGKWWYGL

SEQ ID NO: 14150 - protein, 312 aa, Zea mays
  VARIANT 131: note = Ancestral polymorphism is S, Derived polymorphism is P
  VARIANT 195: note = Ancestral polymorphism is A, Derived polymorphism is V
  VARIANT 209: note = Ancestral polymorphism is T, Derived polymorphism is A
  VARIANT 213: note = Ancestral polymorphism is T, Derived polymorphism is A
  VARIANT 214: note = Ancestral polymorphism is D, Derived polymorphism is Y
  VARIANT 219: note = Ancestral polymorphism is G, Derived polymorphism is W
  VARIANT 234: note = Ancestral polymorphism is N, Derived polymorphism is K
MPLGTSPVVAEAEAWTWENAAAGAAAGFATVAALHPLDVVRTRFQVSGGRGWSEVPPYRNTAHAVYTITRSEGLRGLYAGFYPAVLGSTVSWGLYFFFYNRAKQRYLQRKNDQLHPVHHLISAAEAGALVSLFTNPIWLVKTRLQLQTAKHHTSQYSGFSDALKTILREEGFLALYRGIGPGLLLVTHGAIQFTAYEELRKAMIFFKSAQSRADDAGGGESLVVTDQMCVWVLNIDFSMVIRARLQQRPGTDGTPKYSNSWHVVKETAKYEGVRGFYRGITSNLLKNLPAASLTFVVYENVIKLFKATKEKT

SEQ ID NO: 14151 - protein, 376 aa, Zea mays
  VARIANT 78: note = Ancestral polymorphism is R, Derived polymorphism is M
MFPSKKATSSAAAAAAAVSSNDSRQQAMCVQADSGSGLVLTTDPKPRLRWTVELHERFVDAVTQLGGPDKATPKTIMRVMGVKGLTLYHLKSHLQKFRLGKQPHKEFNEHSVKDAAAAMEMQRNAASSSGMMGRSMNDRSVHMNEAIRMQMEVQRRLHEQLEVQRHLQMRIEAQGKYMQSILEKAYQTIATGDLAACSPVAAGYKSLLGNPQAMLDVCSLKDMAPSMGFPSLQDLHMYGGGGGHCLDLQQQMERPMEAFFASCDIGSLAKKRPVSPYADDDGGKSPMLWGEDDEGKGIVDHFQMAPPMMDAAGIDVMDSIADVYGDAKHMTMSSDSTGSKGGGFDVRLERPSLRRPHMGGSPSVLGGGQTRNLSYG

SEQ ID NO: 14152 - protein, 228 aa, Zea mays
  VARIANT 86: note = Ancestral polymorphism is D, Derived polymorphism is V
  VARIANT 39: note = Ancestral polymorphism is C, Derived polymorphism is Y
MPPAVVPVEDGGAGDAAGGEVTHDSCHVAWLAWWKNVRCFLASTFLPCHPAPNTKPAIVRGTLIVPSAGDRRVRLFLQEHGPAATDQPVDHEQHLLVLDLPAGLGGADIAAAGRIVLEYQRRWTPPVDDPSALLDSPKWLVYCKGTRVGYAARRERPSDAEGWFLEKLRAVTAGAGRLPGGGVEYLRGRFERIVASPDAESFHLTGWPGGGVNGGGFDGGLSIFFHRV

SEQ ID NO: 14153 - protein, 343 aa, Zea mays
  VARIANT 149: note = Ancestral polymorphism is E, Derived polymorphism is A
  VARIANT 27: note = Ancestral polymorphism is I, Derived polymorphism is V
MGLLIPARPEQCTLSRIVSLITVGVVIVVCTYVTSSPAGGDAGKEEFFSIWHRRSSDFVPDDLEVALRGAAYANRTLILTMLNKAYSEEGGLLDLFLESLREGDGTEQLIDHVLFVAMDQQAFRRCRSLGGLKCYLLRPTDSADDLSSEQIYMSDGFIRMMWRRIRFLGDVLKHGYSFVFTDMDVMWLRNPFPKLDRGEGEDLLISADKFNGMPHDYAGNELNTGFFFVVSNDRTVALFDEWHAARQVSAGMKEQDVLNRMKRRGAFRRLRVGARVLDTARFSGFCQDSRDAAQVATVHANCCRTKRAKVADLKAVLRAAEGLNRTRMEIKWPAHSECVKSWL

SEQ ID NO: 14154 - protein, 172 aa, Zea mays
  VARIANT 109..172: note = Derived polymorphism lacks residues 109 to 172
  VARIANT 107..172: note = Derived polymorphism lacks residues 107 to 172
  VARIANT 96: note = Ancestral polymorphism is E, Derived polymorphism is G
  VARIANT 88..172: note = Derived polymorphism lacks residues 88 to 172
  VARIANT 53..172: note = Derived polymorphism lacks residues 53 to 172
MLETSLGVRKGSGSSSRLADRKGSKEFEQEQAVQKAPSAVRPATSYRSGRNGEGAAGVAATGGTRSKADEWEKAKLGRVREEYEKMMETIAEWETEKKVKARRQKEQKETELDKKREKALEEYNLEMTRISKISGGARAMAEERKYNDGKKIREKAHKMRSTGKPPRTCACF

SEQ ID NO: 14155 - protein, 301 aa, Zea mays
  VARIANT 124: note = Ancestral polymorphism is L, Derived polymorphism is I
  VARIANT 172: note = Ancestral polymorphism is G, Derived polymorphism is E
  VARIANT 203: note = Ancestral polymorphism is L, Derived polymorphism is H
MDPAAADRPCVIQSLPANCNTLPPPLVQALPANCNTLPPPLVQALPAKTNPSQPSSPTAKRRHAPPAPGSGPAPPSPRRTRSGGAPEWTPAETLALVAEVAAVDDGWSRSVSAFQKWAMVAENLAASEALLSGPGSRRRGRGSKRTAGECRRRWEALAAEYGAVRRWEVRTGATYWEMGAAARRKAGLPAEFDDEVYGAMDALIRVEEALLADAAGGGAGGEDVEGLVGGGAGCVGVEVGKQDGGDSVEAEVGEEQVQQDASAGEEEEQDVDEDVEEMQEDGGNAGASNDLGMCKSSTFRF

SEQ ID NO: 14156 - protein, 288 aa, Zea mays
  VARIANT 112: note = Ancestral polymorphism is D, Derived polymorphism is V
  VARIANT 46..288: note = Derived polymorphism lacks residues 46 to 288
  VARIANT 35: note = Ancestral polymorphism is S, Derived polymorphism is F
  VARIANT 24: note = Ancestral polymorphism is S, Derived polymorphism is Y
MEEQFILRVPPSVAERIERLMNESAASSSNPDEASLDLSFSACTRQEAPSETAVHEFAARELRACRLLNGIKKSGQVQWGFQAPGTREAGNPWFMCGARLLVYYAIGVGIIDLAWISLLIAVGSLRNNSRSVTKYDSKQLNLFHVGHEDGRNGTFMIGNESFPASLLDLPAVVESYKTYDDSVLIKTADVGQMIMVREENDPAPEGVEYKHGLTPPMRDARRRRFRREPDLNLGKNVDQNASATGGEEGGDRKKPPVARAAKQPGVQEPAANGEEADPERSDSDDSDN

SEQ ID NO: 14157 - protein, 53 aa, Zea mays
  VARIANT 20: note = Ancestral polymorphism is G, Derived polymorphism is W
  VARIANT 33: note = Ancestral polymorphism is V, Derived polymorphism is I
  VARIANT 35: note = Ancestral polymorphism is P, Derived polymorphism is L
  VARIANT 43: note = Ancestral polymorphism is E, Derived polymorphism is K
  VARIANT 47: note = Ancestral polymorphism is Q, Derived polymorphism is E
MADGRLCVVSKEIAPAKREGLPLSHLEILDAVVIPSPETSLTEVDVQKFIEKQ

SEQ ID NO: 14158 - protein, 165 aa, Zea mays
  VARIANT 94: note = Ancestral polymorphism is R, Derived polymorphism is W
  VARIANT 49..165: note = Derived polymorphism lacks residues 49 to 165
MPDPVAPLLPPKRINSGDLSRCPWEELVFEDESERGSNALLARAWSPGWQNADKALTAFLNGPLMDYSVNHKKADSASTSLLSPYLHFDELSVRKVFHQVRMKRLMWSNDGNHAGEESCTMFLCSIGLWEYSRYLTFNHPCSHEKPLLSHLRFIPWVVNEVYFKV

SEQ ID NO: 14159 - protein, 218 aa, Zea mays
  VARIANT 139: note = Ancestral polymorphism is A, Derived polymorphism is T
MMWSHEPAAEQKAAASAPPTRQRSSVAKLTTASSSLANLLSAFVNTNNSPDPRPPPPRRSFDERGAVGLGIVAAMGHGAEPIAIGAAARRRAREDDESYTCVIKHVAGAGGASVRKRVYFGFGDGGGGWLVEADDAAPAPAPDFLSRCCLCDKRLDGLDIYMYRGEKAFCSSECRCQQMLLDDRAAKCGSSEALIRSGDYSVSPHSAPMAFSPSVAAA

SEQ ID NO: 14160 - protein, 158 aa, Zea mays
  VARIANT 85: note = Ancestral polymorphism is G, Derived polymorphism is A
  VARIANT 59: note = Ancestral polymorphism is R, Derived polymorphism is C
  VARIANT 50..158: note = Derived polymorphism lacks residues 50 to 158
  VARIANT 25: note = Ancestral polymorphism is Q, Derived polymorphism is P
MAENLAPEKRHTFVHNGQKVFEWDQTLEEVNMYIELPKGVPTKLFHCTIQASHVEVGIRGNPPYLNHDLMHPVKTDSSFWTIEDAEMHITLQKREKGKTWSSPIQGQGILDPYAADQEQKRLMLQRFQEENPGFDFSQAQFSGTCPDPRTFMGGIRSE

SEQ ID NO: 14161 - protein, 174 aa, Zea mays
  VARIANT 142: note = Ancestral polymorphism is P, Derived polymorphism is L
  VARIANT 140: note = Ancestral polymorphism is I, Derived polymorphism is V
  VARIANT 132: note = Ancestral polymorphism is G, Derived polymorphism is D
  VARIANT 127: note = Ancestral polymorphism is G, Derived polymorphism is E
  VARIANT 117: note = Ancestral polymorphism is W, Derived polymorphism is L
  VARIANT 116: note = Ancestral polymorphism is Q, Derived polymorphism is H
  VARIANT 114: note = Ancestral polymorphism is F, Derived polymorphism is S
  VARIANT 105: note = Ancestral polymorphism is T, Derived polymorphism is P
  VARIANT 95: note = Ancestral polymorphism is L, Derived polymorphism is H
  VARIANT 90: note = Ancestral polymorphism is F, Derived polymorphism is L
  VARIANT 88: note = Ancestral polymorphism is H, Derived polymorphism is R
  VARIANT 79: note = Ancestral polymorphism is D, Derived polymorphism is V
  VARIANT 69..174: note = Derived polymorphism lacks residues 69 to 174
  VARIANT 47: note = Ancestral polymorphism is N, Derived polymorphism is K
  VARIANT 40: note = Ancestral polymorphism is A, Derived polymorphism is V
  VARIANT 15: note = Ancestral polymorphism is I, Derived polymorphism is T
  VARIANT 9: note = Ancestral polymorphism is S, Derived polymorphism is N
MWRLCNITSRSMRTISFKAHVCQGLSIVETPMMNMIAGGAAIRPFVNDKLFYLVSGVLNHGYRQGLLFWSVFLSRGNIDPSGEIMVLHRFCPWKLHLFELEEVLTTDPLTKYVFYQWLHFGQQDLSGSIGNGKSCSEILIQPPPISNRLTHVAIVSIEAHDAIATLVHGIIDLS

SEQ ID NO: 14162 - protein, 503 aa, Zea mays
  VARIANT 158..503: note = Derived polymorphism lacks residues 158 to 503
  VARIANT 231..503: note = Derived polymorphism lacks residues 231 to 503
  VARIANT 331..503: note = Derived polymorphism lacks residues 331 to 503
  VARIANT 339: note = Ancestral polymorphism is R, Derived polymorphism is C
  VARIANT 345: note = Ancestral polymorphism is V, Derived polymorphism is A
  VARIANT 354..503: note = Derived polymorphism lacks residues 354 to 503
  VARIANT 444..503: note = Derived polymorphism lacks residues 444 to 503
MAYGDRVTTFEDSEKESEYGYVRKVSGPVVVADGMGGAAMYELVRVGHDNLIGEIIRLEGDSATIQVYEETAGLMVNDPVLRTRKPLSVELGPGILGNIFDGIQRPLKTIAIKSGDVYIPRGVSVPALDKDALWEFQPKKLGVGDVITGGDLYATVFENTLMQHHVALPPGSMGKISYIAPAGQYNLQDTVLELEFQGIKKNFTMLQTWPVRSPRPVASKLAADTPLLTGQRVLDALFPSVLGGTCAIPGAFGCGKTVISQALSKYSNSEAVVYVGCGERGNEMAEVLMDFPQLTMTLPDGREESVMKRTTLVANTSNMPVAAREASIYTGITIAEYFRDMGYNVSMMADSTSRWAEALREISGRLAEMPADSGYPAYLAARLASFYERAGKVKCLGSPDRTGSVTIVGAVSPPGGDFSDPVTSATLSIVQVFWGLDKKLAQRKHFPSVNWLISYSKYSKALESFYEKFDPDFIDIRTKAREVLQREDDLNEIVQHSNENFYQ

SEQ ID NO: 14163 - protein, 377 aa, Zea mays
  VARIANT 91: note = Ancestral polymorphism is P, Derived polymorphism is L
MTAMPHPRHRGAAKKPMWIIVLLSLVCVALMGAYVYPPRRYSACYFFASSVCTPFKDWLPAVARERTDEEIVSSVVIRDLLSMPMAMSKNPKIAFMFLTPGSLPFEKLWEKFLQGHDGRYSIYIHASREKPVHSSSLFVGREIHSEKVVWGRISMVDAEKRLLGNALEDVDNQFFVLLSDSCVPLHTFDYIYNYLMGTNVSFIDCFFDPGPHGTGRYTMEMLPEIEQRDFRKGAQWFAITRRHALLILADNLYYNKFKLYCKPAEGRNCIADEHYLPTLFNMVDPGGIANWSVTHVDWSEGKWHPRSYRAADVTYQLLKNITSVNENVHITSDDKKVVTQTPCMWNGTKRPCYLFARKFYPESLNNLLKLFSSYTSA

SEQ ID NO: 14164 - protein, 577 aa, Zea mays
  VARIANT 197: note = Ancestral polymorphism is F, Derived polymorphism is S
MGSWRKAYGALKDSTKVGLAKVNSEFKELDIAIVKATNHVECPPKERHVRKILLATSANRPRADLSYCIYALSRRLSKTKNWIVALKTLIVVHRLLREGDPMFKEEFLAYSSRGNILHIANFKDDSSQSAWDCSAWIRAYGCFLEERLECLRVLRYDIETERLVRYPQTSSKVHSKTRTLPSPELLEQLPALQQLLFRVVGVQPEGAACSNYLIQYALALVLKESFKIYCSINDGIINLVDMFFEMPKYDAINALAIYKRAGLQAENLAEFYDFCKQLELARTFQFPTLRQPPASFLATMEEYIREAPRPSIKSEESEEPKLLTYEQEAPEEPENAVEEEKEEPSQKPEPQPVPDPEPHPQQTTGDLLNLEAEVNPSALELEQSNALALAIVAPGDYKPPASQSMFDVNSSGWELALVNAPSTHTSQAVETNLAGGFDKLLLDSLYEDEARRQQIAGATYTGSLGAANPFCTNASDPFTMSSRFAPPANVQLALMAQNQQQYYQAQQYYQAQLYFQPQQQQYFQQHQQTLAMPMPNMYHHQYQYSVPTSGASNPFGDPFSDLAPMGAPAKQSNSVFL

SEQ ID NO: 14165 - protein, 91 aa, Zea mays
  VARIANT 67: note = Ancestral polymorphism is Y, Derived polymorphism is S
MALRALYNEIRSMKVRDVPAYLKPRLTWDNVKKSADQAVDRYIEKYIDTSSPDPLYHVCIGGMIFSYFVNLPWERAHLAHLEEMERTGGKH

SEQ ID NO: 14166 - protein, 506 aa, Zea mays
  VARIANT 325: note = Ancestral polymorphism is F, Derived polymorphism is C
  VARIANT 308: note = Ancestral polymorphism is R, Derived polymorphism is S
  VARIANT 297: note = Ancestral polymorphism is A, Derived polymorphism is V
  VARIANT 223: note = Ancestral polymorphism is W, Derived polymorphism is C
  VARIANT 172..506: note = Derived polymorphism lacks residues 172 to 506
  VARIANT 94: note = Ancestral polymorphism is A, Derived polymorphism is V
MKCVSGAYFEPDFDPLLDRLGTPGVVVDNETREDCTLVKVDSVNRDGVLLDMVQLLTDLDLVISKSYICSDGGWLMDGKDCLLLLFLVNFFLNAMASWRKLTDPSLPEFIQRALVRFHRTVNCASPRFTTCLGNVVGPAGPDVSGCAALEFTVNDRPGLLSSITSVLADSGCHVASGQAWTHNGRAAGVLYVTPPLPSRWARVERLVEAVVGARENVAGERHWTRVSGPARGRVHTERRLHQLMRDDRDYESGPAPTPVDEGLFGVGDKAATTARTARRARAATRVSVDSWEERGYVVVKMTSRDRPSLLFDTVCALTDMQYVVFHATVGSQGVLAIQEYYIRHKDGGTVDSSAERQKVSRCLVAAVERRATHGVRVEVHAADRSGLLSDFTRVLREHGLSLLRVELKRHRDEAFGVFYLDTDTGGEVRTEALRAVQMRVAEMGISLDVVKETKAPGWPPVRKTSVPAPPVAGQQPQEKPRPSLGSLLWSNLEKLSNNFNYIRSPA

SEQ ID NO: 14167 - protein, 262 aa, Zea mays
  VARIANT 250: note = Ancestral polymorphism is I, Derived polymorphism is V
  VARIANT 156..262: note = Derived polymorphism lacks residues 156 to 262
  VARIANT 153..262: note = Derived polymorphism lacks residues 153 to 262
  VARIANT 149: note = Ancestral polymorphism is G, Derived polymorphism is R
  VARIANT 139: note = Ancestral polymorphism is V, Derived polymorphism is A
  VARIANT 137: note = Ancestral polymorphism is W, Derived polymorphism is R
  VARIANT 136..262: note = Derived polymorphism lacks residues 136 to 262
MLSSAAFSSSPLLRGAPLRTRHLLLAPPARAHGGAASRARGGLPRFHAPSLPSSKFRGNISPVTEMDVTLQGEVIRIQGDEFWHMTRVLRLGVNDKVELFNGVGSLAEGFIHKVDKGGSGVELLEDARIIAPQGIQWHVFAAFGTLKGGRADWLIEKCTELGASSVTPLLTERCHTIAENRVDRLQRLVLAAVKQCQRIHEMSLKSPIQIRHLLPVVSQSKLAFLASAEAPPLFSVLPESSIEQSGLLIIGPEGGNANPELH

SEQ ID NO: 14168 - protein, 790 aa, Zea mays
  VARIANT 578: note = Ancestral polymorphism is Y, Derived polymorphism is H
MGAAGGGRCVRLGAAPVLVLLLIAAATLPRLARAVTDAGDVSAINGLYVALGSPKLPGWSASAGDPCGESWQGVTCTGSSITSMYARVFNAANLGGQLGSLGNFTSITEINLSNNNIGGTIPEDLPVTLQNLFLSDNQLTGSIPMSLSELHSLTAMSLNDNHLDGKLPDAFDSLTGLVNLDISSNNFSGPLPPSLGSLTSLTTLHMQDNQLSGTLNVLQDLPLKDLNVENNMFSGPVPPKLLNIPNFKNDGNPFNTSIAPSTSPSSTPTGSRPTQTPSSSSSPSGSPPPSSAASNSSSGSTARNSNSPSSKKNKSSPLRTVGYVLLAIVLFIVLVLLVIFCLSKYQERQSRRDYSTSQLGRVHQRVEEPKSKQASVQSKHEAKKGSSEVPERKKPREINLAVPVAIEKPPEKRKERVINLERTESEIFAAAPPPPPPPPPPPPPPTPPPPPPPPRLPSPPPVEKVTVNPIVLPEKRVSTPPRTGPSTSATSFSVASLQQYTNSFQEQNLIRESRLGKVYLAELPEGKLLEVMKIDNANGRIPVDDFLELVARISDIRHPNILELVGYCAEYEQRLLVYNYFSRKTLHDVLHEGEDLDEPLSWNARLHIVLHAAKALEYLHDTCEPPVVHQNFEPANVLLDNRCSVRVAECGLAQLMASGSVTQLSGRMRALLNYEAPEIHESEPFTRQSDVYSLGVVMLELLTGRKPYDSSRPRDEQHLVRWANSQLHDMESLSKMVDPSIRGECSVILLSRFADIISQCIQPGPEFRPAMSQIVQDLARIVGASGAVSE

SEQ ID NO: 14169 - protein, 656 aa, Zea mays
  VARIANT 40..656: note = Derived polymorphism lacks residues 40 to 656
MVFCCLPVWLWQPSALPGAAVSRDGVKHTQFYSAQVSIKEMEQRNVLALGEHVLKATVWKRKHKTAMEHPEGNDVMVFSQHDQRKHPVIFDDRAKCKKSKLISCGSGVILESYWNFKTSGLPVRVLFYQHGDWSDFPEDVVNLAQQDFQLKKPITTAVFQNKHILLDFIHMICIDYEMTIDKPLAWVDDNGKRFFPDLSAGLYTSKPSQHENGEADECDGTPTSVAESSSSVSVGEVVSHGKRINDIAEDNMRAHNILYEAVGENISGPSFHLNEYSSGTIQATGKPNDCRRIDSAVRNLLLKGLGQPFSEEDIIGIYRTPLLDQRGQVRCGLFQKEIEETRSRRGNANVRYAWLPCSRYTMEQMAMRGALEIAKPHKGSICGVGTCLAPANCTNSCARYSDFHEDGIIRMMLCRVIMGNVEVVLPGSKQFQPSNGSFDNGVDDLQNPQNYIVWDANVHKHIYAEYAVIVQAPLVTNECSGLKDSVPNISEIISSGSRDNLTKVYLLGLMRTIGMMDPLFLVCFDQEDRFAPCGVEQEAPRLGRAPRAPSSPWMPFSMLFAAISTKVPRSDMELVIRYYEEFKRKRMSRSDLVVRMRQIVGDKILVSTIMRLHHQKKKEANRGGDDGFLQPPSMAAAAAGLARALARGEEGGGVAE

SEQ ID NO: 14170 - protein, 163 aa, Zea mays
  VARIANT 140: note = Ancestral polymorphism is L, Derived polymorphism is F
  VARIANT 107: note = Ancestral polymorphism is S, Derived polymorphism is F
  VARIANT 90: note = Ancestral polymorphism is G, Derived polymorphism is R
  VARIANT 86: note = Ancestral polymorphism is G, Derived polymorphism is D
  VARIANT 84: note = Ancestral polymorphism is A, Derived polymorphism is T
  VARIANT 83: note = Ancestral polymorphism is G, Derived polymorphism is R
  VARIANT 81: note = Ancestral polymorphism is A, Derived polymorphism is S
  VARIANT 78: note = Ancestral polymorphism is A, Derived polymorphism is V
  VARIANT 77: note = Ancestral polymorphism is V, Derived polymorphism is I
  VARIANT 76: note = Ancestral polymorphism is A, Derived polymorphism is T
  VARIANT 74: note = Ancestral polymorphism is A, Derived polymorphism is P
  VARIANT 73: note = Ancestral polymorphism is I, Derived polymorphism is T
  VARIANT 67: note = Ancestral polymorphism is G, Derived polymorphism is R
  VARIANT 66: note = Ancestral polymorphism is R, Derived polymorphism is H
  VARIANT 65: note = Ancestral polymorphism is P, Derived polymorphism is S
  VARIANT 63: note = Ancestral polymorphism is G, Derived polymorphism is R
  VARIANT 56: note = Ancestral polymorphism is D, Derived polymorphism is G
  VARIANT 54: note = Ancestral polymorphism is E, Derived polymorphism is K
  VARIANT 46: note = Ancestral polymorphism is D, Derived polymorphism is H
  VARIANT 43: note = Ancestral polymorphism is A, Derived polymorphism is V
  VARIANT 41: note = Ancestral polymorphism is G, Derived polymorphism is S
  VARIANT 40: note = Ancestral polymorphism is S, Derived polymorphism is L
  VARIANT 37: note = Ancestral polymorphism is G, Derived polymorphism is V
  VARIANT 36: note = Ancestral polymorphism is F, Derived polymorphism is Y
  VARIANT 32: note = Ancestral polymorphism is T, Derived polymorphism is I
  VARIANT 5: note = Ancestral polymorphism is P, Derived polymorphism is R
MSCPPLPYLSAFITHPPPTPPNLTTKVQNLLTHLGYGLALGIAYVDHAFSICDEDDLVVSVIRSSRGAHVKEIPFAIVLLAFGALDAIGRLLMAVNRVGGDRTHSQSKLSHVFLMYTPLCCIMNFLHDVGRCHVHPWVLLHKNRAYYAYKGYKGFSFSNIPPI

SEQ ID NO: 14171 - protein, 585 aa, Zea mays
  VARIANT 235..585: note = Derived polymorphism lacks residues 235 to 585
MEAGGGASELGLLGAGSGRLLKHGRGDAAGGEDHGWVVVVGGGGRAKQARTASVGTGDAAATAAVPFLLGSCGGPGHGGERMLSFSSAAAAAPDDGGAMPPLYYGTPASCSGLMSSARVRGPFTPPQWIELEHQALIYKYLSANSPVPHSLLVPIRRSGSLASSPYPPPYFGTSTFGWGSFQLGYSGNADLEPGRCRRTDGKKWRCSRDAVADQKYCERHMNRGRHRSRKHVEDQPGHAAKAMSAVAVAAAAAAATQHAAALAGAGATAAAGLAVNRHRQPGKSYATGATDPCSLQYSRELANKLSNESENMQDSDNVSMLTSMNTGNTAGSVFPFSKQNTALFEVSSSRPEFGLVPSDSLTSSPHSSLKSVKNLLSSRSLSEHQSSASLQHFVDWPRTPPAQGGLSWPEAEDMPRAQRSQLSVSAPMASSELSSASTSPIHDHEKLILSPLKLGREYTPSGVVSAAANRYEVSQLEATWATMFRDSSTGGPLGEVLAKNNSNAEARGCPSAAPPLTDYYCWDSGHGMQSSPVGVLQRTTAFGSVSSSTGSSPRVENHGACCDGTSNLMDDLGSVVVRHPSIRLL

SEQ ID NO: 14172 - protein, 99 aa, Zea mays
  VARIANT 12: note = Ancestral polymorphism is A, Derived polymorphism is T
  VARIANT 14: note = Ancestral polymorphism is R, Derived polymorphism is H
MAWWRARVVAPARHAWLAVVVAARVRGRKRRTERAGIVDLHKDVQTCGYHDVQVMWGMLGLEAGAPSAPERRKRSPFWTWTPSFWHFASSRRTGTAAAR

SEQ ID NO: 14173 - protein, 129 aa, Zea mays
  VARIANT 123..129: note = Derived polymorphism lacks residues 123 to 129
  VARIANT 122: note = Ancestral polymorphism is C, Derived polymorphism is S
  VARIANT 77: note = Ancestral polymorphism is L, Derived polymorphism is P
  VARIANT 32..129: note = Derived polymorphism lacks residues 32 to 129
MFHNLIGEGDSHRHITMEGITEVLAALERIEQQAELTYDQLLMLEANLFFGAFASYDRHRDMRMDIDDMSYEELLALEERIGSVSTALSEEQFTKCLKRSIYSQVALEVNKSTVDDMKCSICQVSGNLT

SEQ ID NO: 14174 - protein, 146 aa, Zea mays
  VARIANT 57: note = Ancestral polymorphism is T, Derived polymorphism is I
MTAIHDESNLKETIILRPLGHTSHLRLRSRVRSGHPKQGPSSGTCRPAGPANRYFSTVFSSSPAGSTNDAKQADLYTMLNKQSSRGQNGNGVTGSSGWQIPRPPTYKDGKHAYPNESSESPYFVSSMHYGGREFYSNTLEWSITQQ

SEQ ID NO: 14175 - protein, 198 aa, Zea mays
  VARIANT 3: note = Ancestral polymorphism is A, Derived polymorphism is S
  VARIANT 33: note = Ancestral polymorphism is P, Derived polymorphism is S
  VARIANT 42: note = Ancestral polymorphism is I, Derived polymorphism is V
  VARIANT 70: note = Ancestral polymorphism is D, Derived polymorphism is N
  VARIANT 80: note = Ancestral polymorphism is L, Derived polymorphism is S
MAAFLSLFMDVTASDLSHTYQKFRPVVSPLPVPLKYHIIAAVVSANLIQRSFVSLQNAGVRLASVIPYPNPTGSVLPFQLMAESYHLVDQWTSVIISYRDPKNEMSLVISRFVQTVPVNPKPFLNNLTGKPVIVKLKWGMEYKGYLASVDSYMNLQLANTEEYIDGQFSGNLGEILIRCNNVMYLRGVPEDAEIEDAE

SEQ ID NO: 14176 - protein, 407 aa, Zea mays
  VARIANT 3..407: note = Derived polymorphism lacks residues 3 to 407
  VARIANT 77..407: note = Derived polymorphism lacks residues 77 to 407
  VARIANT 363..407: note = Derived polymorphism lacks residues 363 to 407
MGQCYARNVHGVDADGGGMEATTITVSAAGGPEDAASVGGGRGRGGRWSARPSPAGKPRGGRAGATPARLSAAGSPWTGSPLGLPDGIAPSPATSASTPRRFFRRPFAPPSPAKHIKASLACRLGHRSPPSTSQVPRPPIEVPIPEQGAGGAGEVGRELDKSFGYDHHFTAMYELGKEVGLGHFGHTCLARPCKGDMRGQVMAVKVISKAKMTMVISIEDVRKEVKILKALSGHSNLVKFYDACEDALNVYIIMELCEGGELLDRILSRGGRYNEGDAKIIVEQILKVVAFCHLQGVVHRDLKPENFLFSTREEHSPMKIIDFGLLDFIRPDVESEKEVDNKLEDEMHEDEDDKQYSPEPIPQQIDNQFEEEDGSFSPQLMHGNEDEDAIDPEEDKAELVEFYVSIF

SEQ ID NO: 14177 - protein, 261 aa, Zea mays
  VARIANT 47: note = Ancestral polymorphism is P, Derived polymorphism is L
  VARIANT 99: note = Ancestral polymorphism is Q, Derived polymorphism is L
  VARIANT 118..261: note = Derived polymorphism lacks residues 118 to 261
  VARIANT 122: note = Ancestral polymorphism is S, Derived polymorphism is Y
  VARIANT 138: note = Ancestral polymorphism is L, Derived polymorphism is P
  VARIANT 140: note = Ancestral polymorphism is A, Derived polymorphism is V
  VARIANT 170..261: note = Derived polymorphism lacks residues 170 to 261
MAAPPAASLVARAALPPRLRPTTASPLGPAVLGPSSRRRYLRLRRSPSLAGTAAAAASSPSVPSSFPGPGPGIGDALGDVEIYSAATGEPVLFRDLWDQDEGVSVVALLRHFGCPCCWELASVLRDTKERFDSAGVKLIAVGVGTPAKARILAERLPFPLEYLYADPDRKAYNLLGLYFGVGRTFFNPASAKVFSRFDSLKEAVKNYTIEATPDDRAGVLQQGGMFVFKGKELLYARKDEGTGDHAPLDDVLNICCKVPVT

SEQ ID NO: 14178 - protein, 337 aa, Zea mays
  VARIANT 202..337: note = Derived polymorphism lacks residues 202 to 337
  VARIANT 149..337: note = Derived polymorphism lacks residues 149 to 337
  VARIANT 134..337: note = Derived polymorphism lacks residues 134 to 337
  VARIANT 92: note = Ancestral polymorphism is I, Derived polymorphism is R
  VARIANT 78..337: note = Derived polymorphism lacks residues 78 to 337
  VARIANT 77..337: note = Derived polymorphism lacks residues 77 to 337
  VARIANT 66: note = Ancestral polymorphism is G, Derived polymorphism is R
  VARIANT 52: note = Ancestral polymorphism is P, Derived polymorphism is L
MKILMYQLCNSVAFVHDPKVLHRELKLHILLKDHKTMVLKIADFSLSHAIRPEMVVGWYHSHPGFGCWLSGVDINTQQSFEALNPRAVAVVIDPIQKRTIDFRFCRRAVKPLRLRHFRFRLLNPYGLWSPRHSQSDMSSSEMEFGTARQYDTTDLFFQEDWLYDDHLFPSKLDDEDDERKEDKFVLDAHGGASAQTEIGKLEGLKNDGLDVARSSSSTVYGRYQIMDDRTEIMDDCAQDGFQLKQSGDIMFECGMQRDPGRGDDDSDLSVVEKELQMLSSFDTDAVTNHGVHDFTDNGELNGICDKNLKSNIDKEYLKGHRIQPFPEIGDPDEAYEF

SEQ ID NO: 14179 - protein, 649 aa, Zea mays
  VARIANT 142: note = Ancestral polymorphism is G, Derived polymorphism is D
  VARIANT 84: note = Ancestral polymorphism is P, Derived polymorphism is L
MGGSHSREDLDLSDSDSDDAESRASDNSSDYGTPTPASASSKLASGAGAAATPASIDAIDRHLRQLHLKYNEPISPNPSPGLTLSANPAALNAVKLYLHIGGSSPSAKWIVSDSLAAASFVRTGDDEDDDAPAGGPWCLVVGSKIQARVGPELQLKTFPAQRRVDFVADGVWALKFRHADGFGDFCAKYHSCMFENSYGVAATDEGRAKVFGKDFAAWARPEDGDESIWEDATDGFFSPGPKGSPMPPRTPVLKPLLEDLREFEEPVEEGSGINSLALGALDNSFLVGDKGIEVVRNFEHGIHGKGMSVKFSGGSTNFSTPKKALLMRAETNMLLMSPATDGKPHAKGVHQFDIETGKVVSEWKFEKDGADINMRDITNDSKGAQLDPSESTFLGLDDNRLCRWDMRDRRGIVQNLASATESPVLQWTQGHQFSRGTNFQCFASTGDGSIVVGSLDGKIRLYSKSSMRMAKTAFPGLGSPITHVDVTYDGKWILGTTDTYLILICTIFIDKDGKEKTGFSGRMGNRIAAPRLLKLNPLDSHLAGANSRFREGRFSWVTENGKQERHLVATVGKYSVVWNFLQVKNSHHECYQYQEGLKTCYCYKVIPKDESIVASRFMHDRYSVSDSPEAPLVVATPMMVTSFSISSGH

SEQ ID NO: 14180 - protein, 212 aa, Zea mays
  VARIANT 49: note = Ancestral polymorphism is A, Derived polymorphism is T
MRGPNTKAFQQGFVLKNMISSLQACCNISSSGSAGGATATMSLQQRKRAIKASVDIAMAASARGGGARWPQAVLAPSSSSSSSPSARTPSPSSPGKKKKNTRGVCKKKVVRRSCLHHTRTRRRRDGSIAGTTSSSLARTTAAAGTTLGSCREIARRLVRKRTMVLRKMIPGGELLHDEISLLHEAVDYVTHLHAQVDALRRISNAVQRARLS

SEQ ID NO: 14181 - protein, 556 aa, Zea mays
  VARIANT 196..556: note = Derived polymorphism lacks residues 196 to 556
  VARIANT 37: note = Ancestral polymorphism is Y, Derived polymorphism is H
MQGGGVAAAAVPVHAAVGGDGGGAAAAPPPPFLMKTYEMVDDPATDGVVSWGPGNNSFIVWNTPEFARDLLPKYFKHSNFSSFVRQLNTYVSHRIPADATLALLFVISGCAQMGCHKSGRIYEMPMHRDMETETVSVARLLPLTFKLFLGFRKVDPDRWEFANEGFLRGQKHLLKTINRRKPSLQGNSQPQQPQLQNAPVPSCVEVGKFGLEEEIERLKRDKNVLMQELVRLRQQQQTTDHQLQTLGKRLQGMESRQQQMMSFLAKAMQSPGFLAQFVQRNENSRRRIVAANKKRRLPKQDGGLESESSAASLDGQIIKYQPSINEAAKAMLRKILNVDSSHRFESMGNSDNSNNNNILLEDYMPAAQAFESSSSTRNSGVTLAEVPANSGLAYVGTSSAICSPPAAPEMQCPVVLDNKAYKQVASMSAVPPVSSDMGIIPEFSDLADLVSVDILGGAFEMMPGPEFPLPEEGDDGTTMYNNNDEEAQSLPGIINSIWEQFLVGSPLSTDNEEVDSAGGLYAQEDGWSKVGNIANLTEQMGLVSSTNHRDSGNGLY

SEQ ID NO: 14182 - protein, 627 aa, Zea mays
  VARIANT 256: note = Ancestral polymorphism is R, Derived polymorphism is C
  VARIANT 285..627: note = Derived polymorphism lacks residues 285 to 627
MAPPPLSSWPWASLGQYKYVLLGPLVWKVLQEWREQAGLPLGSWWLHLLLLFAARGLTYQFWFSYGNMLFFTRRRRVVADGVDFRQIDAEWDWDNFLVLQTLIGATVVNSPLLPGLRQLCLWDPRGWAVALLLHVGFSEPVFYLAHRALHRAPLFARYHAAHHSSGVTQPLTAGFGTPLEVLLLTLVMGAPLAGAFLVGAGSIGLVYVHALAFDYLRAMGYSNVEVVSPRVFEAFPLLRYILYTPSYLSLHHRERCRNFCLFMPALDLAGGTLDERAWALQRAAYDGGPGGGALGTPEFVFLAHVVDMMSSMHVPFALRSLSSTPFANHFILLPFWPVAFGFMLLMWCCSKTFVVSFYYLRGHLHQTWSVPRYGFQYFLPAAKKGINQQIELAILRADRMGVKVLSLAALNKNEALNGGGTLFVNKHPDLRVRVVHGNTLTAAVILNEIPSNVREVFLTGATSKLGRAIALYLCRKKIRVLMFTVSSERFVKIQREAPPEYQQYLVQVTKYQAAQNCKTWIVGKWLSPREQRWAPSGTHFHQFVVPPIIGFRRDCTYGKLAAMRLPKDVQGLSSCEYTMERGVVHACHAGGVVHFLEGWGHHEVGAIDVDRIDVVWKAALKHGLAPV

SEQ ID NO: 14183 - protein, 114 aa, Zea mays
  VARIANT 43: note = Ancestral polymorphism is A, Derived polymorphism is G
MAATTTGMQMMQVQQAAALLLCLVVLAASTRVALGNCRDDCMAACNGWTIVCQLSCASACYGEVGITTLGTSAVLAKAEAPASAPQAAQERGAAAGVSALRGFKLSSPTTRGRG

SEQ ID NO: 14184 - protein, 78 aa, Zea mays
  VARIANT 72: note = Ancestral polymorphism is H, Derived polymorphism is Y
  VARIANT 63: note = Ancestral polymorphism is G, Derived polymorphism is R
  VARIANT 56..78: note = Derived polymorphism lacks residues 56 to 78
  VARIANT 49..78: note = Derived polymorphism lacks residues 49 to 78
  VARIANT 45: note = Ancestral polymorphism is R, Derived polymorphism is W
  VARIANT 34: note = Ancestral polymorphism is E, Derived polymorphism is Q
  VARIANT 27: note = Ancestral polymorphism is R, Derived polymorphism is H
  VARIANT 13: note = Ancestral polymorphism is I, Derived polymorphism is L
  VARIANT 11: note = Ancestral polymorphism is R, Derived polymorphism is H
  VARIANT 8: note = Ancestral polymorphism is R, Derived polymorphism is H
MDRKPPERFRRRIAFTVLISTCKKFGRDWKKIEEHVGTKTTVQIRSHAQKYFLKVQKLGLAAGLPPMYPRRHFAMQQQ

SEQ ID NO: 14185 - protein, 140 aa, Zea mays
  VARIANT 43: note = Ancestral polymorphism is L, Derived polymorphism is P
  VARIANT 44: note = Ancestral polymorphism is P, Derived polymorphism is S
  VARIANT 52..140: note = Derived polymorphism lacks residues 52 to 140
MGAATAPTKRRRGPSKTQEEAMARASPEARRRPRPRLVGYEELPEYLKDNEYIRGHYRAEWPVRDALLSAFAWHNETLNVWTHLGGFLFFLALAVAGGRKEAADGAAPGIMRYMHVHRRAVVSALPDASCLFVYLNPMYA

SEQ ID NO: 14186 - protein, 1143 aa, Zea mays
  VARIANT 996..1143: note = Derived polymorphism lacks residues 996 to 1143
  VARIANT 983..1143: note = Derived polymorphism lacks residues 983 to 1143
MSSGSAVTGGGAEEAAAVPLGQKLMVHVAENGHTLEFQCGGDTLVEAIQHSIHHLCVIPPSDQLLLCGNTSLDGANALAYYKLPRDDREVFLYNKARLLADSRPPAPESIYIPEPNIPPPPPRPQDSSPVGASADPALKALVSYETRFRYHFQVANAVYQSSLAKFELCRRLLREGQVQERALDTARSNLEHTFRKLSQRYSEFLRCFTQQHRSHVEMLANFERDVQKLRAVRLHPALQSEGRHCLMDLLKENDLRKLADGCLSSHKKFEVKVSQLKANFLELKKRVEGLFNAMNSGGCKDVEKLIKEHQGVIGDQKIIMQALSKDVDTSKKLVDDCSSCQLSASLRPHDAVSAVGRIYEIHENDNLPSIQNFDHSLTKLLEKCKDKKNEMNTLVHVCMQRVKSSQISIKGMMSELIAFQEVMGHQEDFDNLKIVSGLGYAYRACVAEVARRKSYFKLYTGFAGKHAEKLAIECQNEKTRREDFHRTWSRYIPDGVMCSMGLFDSPSQCDVKVAPFDCDLLPIDVDDVEKLAPQSILGSFLKSERSQIAKPLLSNSSISGNLNKSEQNSLSADDKMDFQDFLGGYDTIDIAGTSKLEVENARLKAELASAIAVLCNISAEYGYESIDEGQIDAALKKAREKTAEALAAKDEFAYQLQSLLTAKQEKCLAYEKRIQDLEERLANQYIKGHMVSGSKDTSGSLLSAFKSNDCNLDVSGGRQTQIRDESSVAMDEASSTSEQPSKQAEGGDENMTDISGALNLQLLDSAACTNLDAFMTELPRDNEHKIVNIDKEGHMLTQLTMADTSDVRIEDPLSILNSRTNEHHTLELRNKELLVSELQSTLDQKSKQLGETEIKLSAMMDEVNSLMKELEQIRGLLDESQMNCAHLENCLHEAREEARTNKCSSDRRAVEYDALRSSALRIHGLFERLNNCVTAPGMTGFAESLRSLALSLASSVKKDEADTTVQFQQCIKILADKVYLLTRQSAELLERYSAMQAVHGDITKELDLKKVLIKNLYNKLQQEKQASKEKISFGRFEVHELAVFFRNSAGHYEAINRNYPNYFLSEESVALFTEHHLRYPAYIIGQIVHIERHIAHPGQMRGAPRPDSSGGRRSPAAMLTPYNLPGGREYFVVTVAMLPNAAR

SEQ ID NO: 14187 - protein, 1005 aa, Zea mays
  VARIANT 7..1005: note = Derived polymorphism lacks residues 7 to 1005
MAVDSQQVVAGFLTLSMFVMLGNMIKHDHFSPVTEELGLEATGVVSNTRKLDNNAEMSSVDTTGVEDLMDAVEEVKPCWTKPKNQSSNGFVTFSLTMGPEYHISQITDVVVIARYVPSFLPPSFAKEPEKKKEGERPKEKEKGKPRVIDRFLEEIKLEQEQREKRHQDRDHRREGRHGDSSMSSSRFDELPDEFDPTGRFPGSFDDGDPQTTNLYVGNLSPKVDENFLLRTFGRFGPIASVKIMWPRTEEERRRQRNCGFVAFMNRTDGQAAKDEMQGVIVYDYELKIGWGKSVALPSQALPAPPPGHMAIRNKEGGTATVILSGPGGPAVASIKPQTSELVLTPNVPDIVVAPPDDGHLRHVIDTMALHVLDGGCAFEQAVMERGRGNPLFDFLFNLKSKEHTYYVWRLYSFAQGDTLQRWRTEPYIMITGSGRWVPPPLSSNRSPEREKESTFAAGRSRRVEVERTLTDSQRDEFEDMLRALTLERSQIKDAMGFALDNADAAGEVYTRSPTLRPVDSLMIVEVLTESLTLKETSIPTKVARLMLVSDILHNSSAPVKNASAFRTKFEASLPDVMESFNDLYRSITGRITAEALKERVMKVLQVWADWFLFSDAFLNGLRATFLRSGNSGVVPFHSLCGDAPEIEKKGSSEDGNDGFKLNEDGALATGKAAATKELLGLPLAELERRCRHNGLSLCGGKEMMVARLLNLEEAEKERIYEKDVDMKYVQGEQHVVGREDSGVNAHSTSRFGEGSNGDELDVSRNSTRAGKGRSGGSASAELESFPSKKPKYDPVLPASKWSREDDISDDEDRKGGRGLGLSYSSGSDIADGLGKVDTTEASTDHTSRHHDTIVDEEHRQKLRQIEISVMQYRESLEEQGLRDLDEIERKVASHRRRLQSEYGLSTPADGANSRRSSERTSSSSERKERHRDAHDHPRKRGRSQSRSLSPPRKSQERDREHNRGRDRSHGNDVGRDRVRGKSASQGRDDHHDRSRDREKDRRKGR

SEQ ID NO: 14188 - protein, 280 aa, Zea mays
  VARIANT 219: note = Ancestral polymorphism is T, Derived polymorphism is M
  VARIANT 218: note = Ancestral polymorphism is H, Derived polymorphism is Y
  VARIANT 217: note = Ancestral polymorphism is R, Derived polymorphism is C
  VARIANT 119: note = Ancestral polymorphism is L, Derived polymorphism is H
MWNNSYIYRQVKPWVKTSLTPGSVVATEYLKHSGLQDYLNQQGFHVAAHGCATCVGNSGDLDGSVSAAIIENGTALSIYRCCCGAVSYYLLNLGDSITTDHISYSGKIPEGTPAAKYLLEYGVEPKNFSSYGGRRGNNEVVMRGAFANMRIVNKLLNGEAGPWTIHVPTGEKLYVYDAAMKWKEMLSVLPNYRVKEYMKKLYKTSVEKMVLLACGWRYTITVCDSSNLYTYGWRKYVQLGHIDFEDDLVPHKLEALKDSTISQEKIEWNSNFGGYTGVET

SEQ ID NO: 14189 - protein, 85 aa, Zea mays
  VARIANT 5: note = Ancestral polymorphism is L, Derived polymorphism is M
  VARIANT 45: note = Ancestral polymorphism is N, Derived polymorphism is H
  VARIANT 50: note = Ancestral polymorphism is P, Derived polymorphism is L
  VARIANT 52: note = Ancestral polymorphism is R, Derived polymorphism is L
  VARIANT 61: note = Ancestral polymorphism is S, Derived polymorphism is P
MIQILLYQLWRKAMLLPWLLFQHMGLPQLVTLHFKIRGLILHDGNSPLLPHRATRLHLRLSVNWFVSLTIVSFFLMYLCFHCMFK

SEQ ID NO: 14190 - protein, 132 aa, Zea mays
  VARIANT 5: note = Ancestral polymorphism is A, Derived polymorphism is T
  VARIANT 16: note = Ancestral polymorphism is R, Derived polymorphism is W
  VARIANT 17: note = Ancestral polymorphism is S, Derived polymorphism is T
  VARIANT 18: note = Ancestral polymorphism is S, Derived polymorphism is L
  VARIANT 21..132: note = Derived polymorphism lacks residues 21 to 132
  VARIANT 32: note = Ancestral polymorphism is P, Derived polymorphism is L
  VARIANT 35: note = Ancestral polymorphism is A, Derived polymorphism is T
  VARIANT 36: note = Ancestral polymorphism is D, Derived polymorphism is N
  VARIANT 39: note = Ancestral polymorphism is S, Derived polymorphism is N
  VARIANT 41: note = Ancestral polymorphism is S, Derived polymorphism is Y
  VARIANT 42: note = Ancestral polymorphism is V, Derived polymorphism is I
  VARIANT 43: note = Ancestral polymorphism is V, Derived polymorphism is A
  VARIANT 44: note = Ancestral polymorphism is A, Derived polymorphism is V
  VARIANT 45: note = Ancestral polymorphism is A, Derived polymorphism is V
  VARIANT 47: note = Ancestral polymorphism is V, Derived polymorphism is M
  VARIANT 49: note = Ancestral polymorphism is A, Derived polymorphism is V
  VARIANT 50..132: note = Derived polymorphism lacks residues 50 to 132
  VARIANT 55: note = Ancestral polymorphism is R, Derived polymorphism is C
  VARIANT 63: note = Ancestral polymorphism is V, Derived polymorphism is I
  VARIANT 64: note = Ancestral polymorphism is V, Derived polymorphism is I
  VARIANT 65: note = Ancestral polymorphism is R, Derived polymorphism is C
  VARIANT 67: note = Ancestral polymorphism is Q, Derived polymorphism is H
  VARIANT 69: note = Ancestral polymorphism is A, Derived polymorphism is T
  VARIANT 74: note = Ancestral polymorphism is L, Derived polymorphism is R
  VARIANT 75: note = Ancestral polymorphism is T, Derived polymorphism is M
  VARIANT 80: note = Ancestral polymorphism is R, Derived polymorphism is H
  VARIANT 81: note = Ancestral polymorphism is R, Derived polymorphism is H
  VARIANT 95: note = Ancestral polymorphism is A, Derived polymorphism is T
  VARIANT 100..132: note = Derived polymorphism lacks residues 100 to 132
  VARIANT 109: note = Ancestral polymorphism is R, Derived polymorphism is W
  VARIANT 111: note = Ancestral polymorphism is S, Derived polymorphism is F
  VARIANT 115: note = Ancestral polymorphism is C, Derived polymorphism is W
  VARIANT 118..132: note = Derived polymorphism lacks residues 118 to 132
  VARIANT 128..132: note = Derived polymorphism lacks residues 128 to 132
MPDTAGNGQKWSRLWWSSSSQRGSNTAASEAPSTTDMLSTSIAVVVVHAQPRDFRIIRQEWTVVRIQFAFLAFLTLVCGRRVHKKLAVTQKCMNALLRVQERGRDCCYRISVDVCHLQDILDDRSGHEGSRA

SEQ ID NO: 14191 - protein, 86 aa, Zea mays
  VARIANT 55..86: note = Derived polymorphism lacks residues 55 to 86
  VARIANT 49..86: note = Derived polymorphism lacks residues 49 to 86
  VARIANT 41..86: note = Derived polymorphism lacks residues 41 to 86
  VARIANT 19: note = Ancestral polymorphism is E, Derived polymorphism is V
  VARIANT 18: note = Ancestral polymorphism is S, Derived polymorphism is L
  VARIANT 10: note = Ancestral polymorphism is M, Derived polymorphism is K
MVHIRHFWFMRELSHISSEFDNVVQVVLENYKPQKMQNDDQGTNDADSQLVQEDQKAEHPPSPFIITVAPSWESIVNIKGEVSLPE

SEQ ID NO: 14192 - protein, 282 aa, Zea mays
  VARIANT 200: note = Ancestral polymorphism is I, Derived polymorphism is K
  VARIANT 75: note = Ancestral polymorphism is A, Derived polymorphism is G
MDAAGGDQLSLAAVRDALVRLEDSVVFALIERARHPRNAPAYAPAATAGEHSLVEFFVREAEALNAKASLFLFRAFLAGHYQKPEDVPFFPQDLPSPLFPTKPSPKVLHPFASLVTVNDAIWKMYFDELLPLFTVDGDDGSYAQTVALDLACLQVLSQRIHIGKYVAEVKFKDAPQEYSRLIKEKVNLLNISISSSNYLKFTGLDSNSLMDMLTFKAVEEKVKKRVEKKARTFGQNVTLDDNATAGDSECKVDPKVLSKLYDQWVMPLTKDVEVEYLLRRLD

SEQ ID NO: 14193 - protein, 115 aa, Zea mays
  VARIANT 91: note = Ancestral polymorphism is A, Derived polymorphism is V
  VARIANT 86: note = Ancestral polymorphism is G, Derived polymorphism is D
  VARIANT 82: note = Ancestral polymorphism is I, Derived polymorphism is T
  VARIANT 79: note = Ancestral polymorphism is P, Derived polymorphism is L
  VARIANT 69: note = Ancestral polymorphism is A, Derived polymorphism is V
  VARIANT 1: note = Ancestral polymorphism is M, Derived polymorphism is T
MCADAALAARMAFRTSDVAHVTRELAAYDVVFLAALVGMAAEEKARVVEHLGRHMVPDAALVVRSAHDARGFLYPVVDPEKIRRGDFDVLAVHSRALGRTQSFQANPPTFLSLPS

SEQ ID NO: 14194 - protein, 348 aa, Zea mays
  VARIANT 45: note = Ancestral polymorphism is G, Derived polymorphism is C
  VARIANT 218: note = Ancestral polymorphism is S, Derived polymorphism is L
MYSGQQSDQGPSANSGREFSDANWNSFAVHQKMAYNGQYGFGSYGMGLEDKLGLYPSSSGTLSQDIQMSEEHSGVVKKRKGVEDCVTLLHDAGDQQTKGSPQPERNSVEEGNRKISPKMQSKEDSSDGDGTKEDYVHIRAKRGQATNSHSLAERLRRKKISERMKLLQDLVPGCSKVTSPLFVIATTSRGSVSASVAELFWNICGILLVYIQYSNTVSSLQFLSMKLATVNPELGFDIEQIISKQMLLSQDRHLAFYGVEPGSSGLTGPFNQGIMQPELMCTIANPVDVLHGAIHDASTMNHIPSMWEGLQNMPQMNFNPGVAADSGTNNSGIYMILSILFPEKYKCP

SEQ ID NO: 14195 - protein, 346 aa, Zea mays
  VARIANT 200: note = Ancestral polymorphism is I, Derived polymorphism is N
  VARIANT 203: note = Ancestral polymorphism is Y, Derived polymorphism is C
  VARIANT 220: note = Ancestral polymorphism is H, Derived polymorphism is L
  VARIANT 221: note = Ancestral polymorphism is V, Derived polymorphism is A
MAAVVCVTGAGGFIGSWIVKILLARGYAVRGTSRREAADPKNAHLWALDGAAERLTMLQVDLLDRASLRAAFRGCDGVIHTASPMHDNPEEIIEPIIAGTRNVVEAAADAGVRRLVLSSTIGTMYMDPRRDPDAPLGDSSWSDLEYCKSTENWYCYAKTVAEQGAWEAARARGLDLAVVIPVVVLGELLQPSMNTSTLHILKYLTGQTKEYVNESHAYVHVRDAAEAHVRVLEAPGAGGRRYVCAERTLHRGELCRILAGLFPEYPIPTRCKDQVNPLKKGYKFTNQPLKDLGVKFTPVHGYLYEAVKSLQDKGFLPKTSGAKVPERRSCLPQTTSQPPPEIVSKL

SEQ ID NO: 14196 - protein, 366 aa, Zea mays
  VARIANT 342: note = Ancestral polymorphism is M, Derived polymorphism is T
MPGGRKRPAPFAGFSPFARSLIFSAATSSCPKSRPLPDASTAAETPRQDDMPRPPSKRVKRAEPSSDEVEDRGSSGSEEESFSTSGSDSDDGEESSEELETVQADFAFFDPKPSDFHGARLLLKTYLDSKPWDLTGFADLILAQTTVGTVVKLADDEEEEGEGNGVQKANSSTNNDDDDLFGLISVLNLGQHAEQKCIKDLKEYLLDVCPDKGTKKQLRSLLEEKASSVGLLVCRRFVNFPYELVPKLYDALFDEVSWATEDEPTQELQDSFRFKHYLLIVRMLERKTPPKHKSKANKDDDEPIIYPKFEDEIFHELSSWSFTFPIRSEESAQQEMKNYKEMGLVMAIKAGTVPKFRKKLGDLVSE

SEQ ID NO: 14197 - protein, 662 aa, Zea mays
  VARIANT 347..662: note = Ancestral polymorphism lacks residues 347 to 662
MDTAEEAGQEVVSAVGEDSIPEAAACSREERKEEEEEEVEVSFDELGLDEQLKRALRKKGILKATPIQREAIPLILEGKDVVAKAKTGSGKTFAYLLPLLHELLKLSSEGRIRKPAPNAFILVPTRDLCHQVYNEALSLLELCTCKLRVVQVTASMSDKDITVALSGPPNILVSTPACVATCISKGIIRGPAVKESLSMMILDEGILCCQADLLLSYRCEVDLKALIPHIPRSCQSILMSATSSSDVDKLTKLLLHNPFVLTLSEVGQAKDDVIPKNVQQFWASIFCFLLPISCDAKDKILHILALLKFELIQKKVLIFVNSIDMAFRLRLILEKVNQTTALCYYPYNFGIRSAVLNAELPQNSRLHIIEAFNARLFDYLIATDDTKTKEKQTNEENKKEATLSRKRKKQTNKENQKEQKVSRKHLQQTLDAEFGVVRGIDFKNVFTVVNFDMPLDATGYVHRIGRTGRANKTGASISLVSPKEDSTFKEIEHMLQDVEKKDMDCISPFPLLTKDAVESLRYRAQDVARSVTTRDVQEARRQDIKNEILNSEKLKSHFEENPTDLDLLKHDKLLCNKEIPAYLRDVPDYLIDPKTKEASNAVKLSRAAMHIDKPQRRKRQGFKGGSGKSRDPLKTFSAEGKRGRRRKEREGEPDRRKKSKKA

SEQ ID NO: 14198 - protein, 216 aa, Zea mays
  VARIANT 2: note = Ancestral polymorphism is A, Derived polymorphism is T
  VARIANT 137: note = Ancestral polymorphism is P, Derived polymorphism is L
MAETVGFASGDAAAWRAALAAYDRRLAALDKPDLVAVDSFYRHDLPALLRCRDPDPFLAKPELVRLLQWKLSRGKWRPRLMDFVKGLDDAVVESASRKAFAALPDLRRAITELTVLKGVGPATASAVLAAYAPDVAPFMSDEAMVAALGNSKEYTLKQYLAFADKLQAKAKELSIGEESFTPSDVERALWSSAIASKSPPSGNPKRESKMHGKRKR

SEQ ID NO: 14199 - protein, 106 aa, Zea mays
  VARIANT 14: note = Ancestral polymorphism is S, Derived polymorphism is I
  VARIANT 53: note = Ancestral polymorphism is G, Derived polymorphism is R
  VARIANT 68: note = Ancestral polymorphism is G, Derived polymorphism is D
MQVTPVHALGAGISPMQGLVMAVILTFSLLFVTYAMILDPRSQVRTIGPLLTGLIVGANSLAGGNFTGASMNPARSFGPAMATGVWTNHWVYWIGPFRFSRGLDAP

SEQ ID NO: 14200 - protein, 168 aa, Zea mays
  VARIANT 105: note = Ancestral polymorphism is A, Derived polymorphism is V
  VARIANT 112: note = Ancestral polymorphism is G, Derived polymorphism is D
  VARIANT 117: note = Ancestral polymorphism is T, Derived polymorphism is M
  VARIANT 140: note = Ancestral polymorphism is G, Derived polymorphism is S
MDSILSSSPLPGGEEEEGFTLNPSDPGVSGVMQFLRGSGGGGGGGGFPGVAWEVLRRHFSKKRSVDVRRINPKVPKEEAVAISGRLLQILSDHGPLTVGNTWNHAKDAGIAGLNSKTHMKILLKWMTGRNVVKLTCVHVGNAKKFLYSPSTESSSSAGASPSSTSASQ

SEQ ID NO: 14201 - protein, 322 aa, Zea mays
  VARIANT 30..322: note = Derived polymorphism lacks residues 30 to 322
  VARIANT 92: note = Ancestral polymorphism is P, Derived polymorphism is L
  VARIANT 95: note = Ancestral polymorphism is Y, Derived polymorphism is C
  VARIANT 96: note = Ancestral polymorphism is P, Derived polymorphism is L
  VARIANT 97: note = Ancestral polymorphism is E, Derived polymorphism is K
  VARIANT 109: note = Ancestral polymorphism is L, Derived polymorphism is P
  VARIANT 124: note = Ancestral polymorphism is I, Derived polymorphism is T
  VARIANT 152: note = Ancestral polymorphism is D, Derived polymorphism is A
  VARIANT 213: note = Ancestral polymorphism is A, Derived polymorphism is T
  VARIANT 225: note = Ancestral polymorphism is L, Derived polymorphism is S
MDSPVPATLARAPARPQARAGEEACADTRQDAPAEAEPPPRRPAAFYSSVFAQIEEIGWKQLVSATGDGVSCLTFRVVDEPGRMHLLEITLPMGYPESPPSISADVPYLPKIHWSKNSRLKDVICQFQAHLKILQEFWNTMDEIDKVLWIVDPTKPSYAMSHRRIALGDDCYILLQVDARKPNSLPECRFLGTDGKLDQLIINWRKNRKKWDTKKKFHENLAAVLDFALPSPPSVGDKAKDDEQADCGICYAKHLPVDDELGAHSGCATDYMCENPSCSRAFHSVCLRDWLRSITTTRQSFDVLFGNCPYCSDPVAVKITGH

SEQ ID NO: 14202 - protein, 175 aa, Zea mays
  VARIANT 21: note = Ancestral polymorphism is L, Derived polymorphism is Q
MYVLYLMEAKVDKERGETSVLNGGDSGHRGHGVSAAPVELNLLAGMVGMGGARPNAAQLPVVVVPDVARRPPSAAAESEPPQLYACHYCRRQFYSSQALGGHQNAHKRERTLARHRGGGGGAPFAVVHGAFVQAAPAPVTEWDDDARSGQAPPVVVVVLGESVRPIIDEGVHIHI

SEQ ID NO: 14203 - protein, 212 aa, Zea mays
  VARIANT 94: note = Ancestral polymorphism is T, Derived polymorphism is A
  VARIANT 85: note = Ancestral polymorphism is R, Derived polymorphism is M
MSIFEYNGSAVVAMVGKNCFAIASDRRLGVQLQTIATDFRRVFKVHDKLYIGLSGLATDAQTLWVSRILDSYQRLVFRHKLYQLMEERDMKPETFASLVSALLYEKRFGPYFCQPVIAGLGDNDEPFICTMDCIGAKELAKDFVVSGTASESLYGACESMYKPNMEPEELFETISQALQASVDRDCLSGWGGYVLVVTHTEVQERVLKGRMD

SEQ ID NO: 14204 - protein, 181 aa, Zea mays
  VARIANT 38: note = Ancestral polymorphism is S, Derived polymorphism is L
  VARIANT 53: note = Ancestral polymorphism is V, Derived polymorphism is I
  VARIANT 54: note = Ancestral polymorphism is G, Derived polymorphism is V
  VARIANT 63: note = Ancestral polymorphism is P, Derived polymorphism is L
  VARIANT 73: note = Ancestral polymorphism is Y, Derived polymorphism is D
  VARIANT 92: note = Ancestral polymorphism is S, Derived polymorphism is L
  VARIANT 94: note = Ancestral polymorphism is G, Derived polymorphism is S
  VARIANT 110..181: note = Derived polymorphism lacks residues 110 to 181
  VARIANT 132..181: note = Derived polymorphism lacks residues 132 to 181
  VARIANT 144: note = Ancestral polymorphism is S, Derived polymorphism is Y
  VARIANT 166: note = Ancestral polymorphism is G, Derived polymorphism is E
MSTSKSLGFGKVLCPRARAMGTTVRVEYGDDAIASDSSGPHVISHVFPHTYGVGIVFYGRQSPGGHNVVWRLDEAIKAHYQNIKLTGFLGGSDGLLAQRTLDITNEVFASYKNQGGYDMLVLNIHCIPLLLQAEDLCMMYRLFSKISHGLVPISNMFKTILVSLAGCLSSLLAHSFYSFEP

SEQ ID NO: 14205 - protein, 249 aa, Zea mays
  VARIANT 4: note = Ancestral polymorphism is A, Derived polymorphism is E
  VARIANT 42: note = Ancestral polymorphism is L, Derived polymorphism is P
MAQAVEEWYRQMPIITRSYLTAAVVTTVGCTLEIISPYHLYLNPKLVVQHYEIWRLVTNFLYFRKMDLDFLFHMFFLARYCKLLEENSFRGRTADFFYMLLFGATVLTSIVLIGGMIPYISETFARILFLSNSLTFMMVYVWSKHNPFIHMSFLGLFTFTAAYLPWVLLGFSILVGSSTWVDLLGMIAGHVYYFLEDVYPRMTGRRPLKTPSFIKALFADDNVVVAQPPNAGIGAGARFGAMGLDPQAQ

SEQ ID NO: 14206 - protein, 80 aa, Zea mays
  VARIANT 26: note = Ancestral polymorphism is A, Derived polymorphism is V
  VARIANT 15: note = Ancestral polymorphism is V, Derived polymorphism is I
  VARIANT 4: note = Ancestral polymorphism is V, Derived polymorphism is I
MLLVFPTLIVGDPSVVGTMAYKDPVATTAQKYKPIQSVIPETTLGPIQIEAFLGGGANDTDVELNNALFVYEQCSVNIRL

SEQ ID NO: 14207 - protein, 228 aa, Zea mays
  VARIANT 15: note = Ancestral polymorphism is P, Derived polymorphism is L
  VARIANT 21..228: note = Derived polymorphism lacks residues 21 to 228
  VARIANT 45..228: note = Derived polymorphism lacks residues 45 to 228
MKRSTGSTRICARIPEMVSGWVRYVKKVLRKMSTTQEPSPSAHARNGSDELARGMMEIREGRTFSTGNVKGTTSTTCWEVRHPRRGTGWRIHDANLWLGARMVGRAGWKGKISGYPPSVELGTARKGEISDDRRERCIAQVEWICVVAGSGIAPFHGGVDRTYLPWRAGFAEAGPRGPVRLLRVRASLPRRPRWSKNGWVGGGRAESALALVMTVSESQRETAQAPSW

SEQ ID NO: 14208 - protein, 83 aa, Zea mays
  VARIANT 58: note = Ancestral polymorphism is T, Derived polymorphism is I
  VARIANT 45: note = Ancestral polymorphism is G, Derived polymorphism is D
  VARIANT 44: note = Ancestral polymorphism is P, Derived polymorphism is S
  VARIANT 34: note = Ancestral polymorphism is S, Derived polymorphism is Y
  VARIANT 31: note = Ancestral polymorphism is R, Derived polymorphism is T
  VARIANT 30..83: note = Derived polymorphism lacks residues 30 to 83
  VARIANT 24: note = Ancestral polymorphism is E, Derived polymorphism is G
  VARIANT 13: note = Ancestral polymorphism is A, Derived polymorphism is T
MLEWSRTSLCFYATSRVDKGLSSELQNQNWRVLSVANECSIEVPGVLNVQRLQQLLLTLATLIKRELCDSSVLVIGYIMKKIL

SEQ ID NO: 14209 - protein, 96 aa, Zea mays
  VARIANT 39: note = Ancestral polymorphism is R, Derived polymorphism is C
  VARIANT 34: note = Ancestral polymorphism is S, Derived polymorphism is F
  VARIANT 30: note = Ancestral polymorphism is S, Derived polymorphism is L
  VARIANT 25: note = Ancestral polymorphism is G, Derived polymorphism is D
  VARIANT 18: note = Ancestral polymorphism is V, Derived polymorphism is L
  VARIANT 16: note = Ancestral polymorphism is R, Derived polymorphism is H
  VARIANT 9: note = Ancestral polymorphism is R, Derived polymorphism is Q
  VARIANT 4: note = Ancestral polymorphism is E, Derived polymorphism is V
MAEEDRQQRRRFANLRSVQWRIDLGILPASPGASVDKLRHATADSRRRYVSLRRRLMVDPHLPKEEDRSSNLVVDNPLSQNPDVYFVCYPFTFDKP

SEQ ID NO: 14210 - protein, 149 aa, Zea mays
  VARIANT 27..149: note = Derived polymorphism lacks residues 27 to 149
  VARIANT 28: note = Ancestral polymorphism is Y, Derived polymorphism is C
  VARIANT 86: note = Ancestral polymorphism is I, Derived polymorphism is V
  VARIANT 96: note = Ancestral polymorphism is I, Derived polymorphism is V
  VARIANT 142: note = Ancestral polymorphism is R, Derived polymorphism is L
MESTYIYFLFQAVADVEREIMKALEKQCMDILMPLRDGIPEKIEKQVQRLTRRQSIAPYVVPNQLGAFMNTVKRMLDVLDCQVEDILKSWATYLTISSGNTVFGEQMNSITVMLKKYKKYLQAIVDKFVSNTQAIRNMSLKRILEETRG

SEQ ID NO: 14211 - protein, 126 aa, Zea mays
  VARIANT 20: note = Ancestral polymorphism is R, Derived polymorphism is H
  VARIANT 12: note = Ancestral polymorphism is P, Derived polymorphism is L
MLSSLLFLGTWPVVLTLLERRGRLPQHMYLDYSFTNLLGTVLVALIFAQLGGTKHSMPNFFTQFSQQDNWPSVLTSVEMVACIGIEAISRLLFFNVSNSMTSEATQALWRHTSISEWCFINEGSIN

SEQ ID NO: 14212 - protein, 47 aa, Zea mays
  VARIANT 13: note = Ancestral polymorphism is R, Derived polymorphism is L
  VARIANT 19: note = Ancestral polymorphism is W, Derived polymorphism is L
MSKDHKPTYDAELQRHQRWLPQHTVYDLGFGGLGHETTSRLTIASYC

SEQ ID NO: 14213 - protein, 237 aa, Zea mays
  VARIANT 16: note = Ancestral polymorphism is G, Derived polymorphism is R
MAADAEADELVAAAAGIICSMRGADLAGWTPPWLRRTEPARDGELVWPAVARGKRSRRRSPSAGSSGKARWGRASPASPLDYSGGSGSGSAASTSGGEDGGFSSLAHRPGPATKVGANERPHATFPTPLPRPTGQRPQKKLRLPEIQQLLQSLAVENESLREEMRDLQRACKALSKENDKLETRLGQSISQNEVTLKEQKGKQQLDQQSVMQSARDSFVLPDLNLPPQDSADVSTVH

SEQ ID NO: 14214 - protein, 98 aa, Zea mays
  VARIANT 78..98: note = Derived polymorphism lacks residues 78 to 98
  VARIANT 61..98: note = Derived polymorphism lacks residues 61 to 98
  VARIANT 55..98: note = Derived polymorphism lacks residues 55 to 98
  VARIANT 50: note = Ancestral polymorphism is R, Derived polymorphism is C
  VARIANT 47..98: note = Derived polymorphism lacks residues 47 to 98
  VARIANT 30: note = Ancestral polymorphism is V, Derived polymorphism is I
MEVEAKETGREHEVGADLRPGDAADDGLRVGAAALVEVVGQARVGLQQPRPRAAQQMSQLQGNHGHPPAATPSPPRHQPVCPLISAPPAGRPPSPLDG

SEQ ID NO: 14215 - protein, 325 aa, Zea mays
  VARIANT 120..325: note = Derived polymorphism lacks residues 120 to 325
  VARIANT 123..325: note = Derived polymorphism lacks residues 123 to 325
  VARIANT 130: note = Ancestral polymorphism is M, Derived polymorphism is L
  VARIANT 140..325: note = Derived polymorphism lacks residues 140 to 325
  VARIANT 141..325: note = Derived polymorphism lacks residues 141 to 325
MSFHYPDHGLSMDAAAAAAAAAAASSPNPSGFSPGVGGEREKAAIAAHPLYERLLEAHVACLRVATPVDQLPRIDAQIAARPPPLAAAAGAAAAGGPSGGEELDLFMTHYVLLLCSFKEQLQQHVRVHAMEAVMGCWELEQSLQSLTDQLIEQYYRNHRRQAKLSEARIGSAGASPGEGTGATMSDDEDNQVDSEANMFDGNDGSDGMGFGPLMLTEGERSLVERVRQELKNELKQGYKEKLVDIREEIMRKRRAGKLPGDTASVLKAWWQAHSKWPYPTEDDKARLVQETGLQLKQINNWFINQRKRNWHSNPTSSGEKTKKKR

SEQ ID NO: 14216 - protein, 76 aa, Zea mays
  VARIANT 53..76: note = Derived polymorphism lacks residues 53 to 76
  VARIANT 35: note = Ancestral polymorphism is T, Derived polymorphism is A
  VARIANT 24: note = Ancestral polymorphism is R, Derived polymorphism is S
  VARIANT 17: note = Ancestral polymorphism is Q, Derived polymorphism is H
  VARIANT 14: note = Ancestral polymorphism is G, Derived polymorphism is S
  VARIANT 11: note = Ancestral polymorphism is S, Derived polymorphism is I
  VARIANT 1: note = Ancestral polymorphism is V, Derived polymorphism is M
MWSKNVNELVSTHGYSHNQIIVWRYPTMSKLATLTGHTYRVIVLYLAISPDGQTIVTGAGDETLRFWNVVPSPKSQ

SEQ ID NO: 14217 - protein, 277 aa, Zea mays
  VARIANT 189: note = Ancestral polymorphism is R, Derived polymorphism is C
MASSEIEVVEDATPAATSGGAGRAVAEVARQEGEGEALKDDVYTGAAYGDLEKLHRLVEREGRSVTVQDALGYHALQWAALNNRVATAQYILEHGANVNAIDHTGQTALHWSAVRGHVQVAELLLKEGAKVDATDLYGYQTTHVAAQYGQTTFLCHIVAKWNADHDVPDNDGRSPLHWAAYKGFADTMRLLLFLGAYSTRQDKEGCTPLHWAAIRGNLESCTVLVQAGKKEDLMVQDNTGLTPAQLAADKNHRQVAFFLVSIIYITINLFLIHIYLE

SEQ ID NO: 14218 - protein, 103 aa, Zea mays
  VARIANT 22..103: note = Derived polymorphism lacks residues 22 to 103
MSTSPPHPCSKTTVGHAPPARYCLCAPTTHPGSFRCRLHRSSSMNAMAAAPSASEAKEAAAAAVARVFLERMTARKPRRQGVSGTTFLPGPSSLGVGGTATDG

SEQ ID NO: 14219 - protein, 150 aa, Zea mays
  VARIANT 97: note = Ancestral polymorphism is L, Derived polymorphism is F
MDVSGAGGKAKKGAAGRKAGGPTKKSVSRSSRAGLQFPVSRVGRYLKKGRYAQRVGTGAPVYLAAVLEYLAAEVLELAGNAARDNKKTRIIPRHVLLAIRNDEELGKLLAGVTIAHGGVLPNIHTVLLPKKVAEKAAKEPKKAAKSPKKA

SEQ ID NO: 14220 - protein, 237 aa, Zea mays
  VARIANT 29: note = Ancestral polymorphism is H, Derived polymorphism is Y
  VARIANT 117: note = Ancestral polymorphism is C, Derived polymorphism is Y
  VARIANT 126: note = Ancestral polymorphism is F, Derived polymorphism is S
MIMQAMWKPGWLEALDTQKFFVACSFHEHAKKNEKNICCLDCCTSICPHCVAAHRAHRLLQVRRYVYHDVVRLEDLEKLIDCSSVQSYTINSSKVVFLKKRPQNRQFKGSGNICTSCDRSLQEPYFHCSLDCKVEYILRQKKKLSAYLRPCKTLQLGPDFFIPHDADDDTTHSTLVDVDEPMGSSDSENLSVPCTNFVRKKRSGPYICARSANRVSEEDMATNMSRRKGVPQRSPLC

SEQ ID NO: 14221 - protein, 145 aa, Zea mays
  VARIANT 12: note = Ancestral polymorphism is P, Derived polymorphism is L
  VARIANT 14: note = Ancestral polymorphism is R, Derived polymorphism is C
  VARIANT 19: note = Ancestral polymorphism is E, Derived polymorphism is K
  VARIANT 23: note = Ancestral polymorphism is E, Derived polymorphism is K
  VARIANT 24: note = Ancestral polymorphism is I, Derived polymorphism is T
MRPPMPDLETVPLRILKRKAEYEIKEVESYFVAETTMPERSGFDFSGSSQSFNVLASYLFGKLQNTASEQMEMTTPVFTRKGELNSQSMDMTPVITKKSAGTNKWKMSFVMPAKYGSNLPRPKDPFVTIKEVPCKIVVVAAFSGS

SEQ ID NO: 14222 - protein, 109 aa, Zea mays
  VARIANT 36..109: note = Derived polymorphism lacks residues 36 to 109
  VARIANT 47..109: note = Derived polymorphism lacks residues 47 to 109
  VARIANT 56: note = Ancestral polymorphism is D, Derived polymorphism is N
  VARIANT 58: note = Ancestral polymorphism is V, Derived polymorphism is G
  VARIANT 61: note = Ancestral polymorphism is Y, Derived polymorphism is H
  VARIANT 66: note = Ancestral polymorphism is T, Derived polymorphism is P
  VARIANT 70: note = Ancestral polymorphism is P, Derived polymorphism is H
  VARIANT 80: note = Ancestral polymorphism is P, Derived polymorphism is T
  VARIANT 89: note = Ancestral polymorphism is K, Derived polymorphism is R
MSKPRRECKLQKAVYLSLEAVTKAKLGYDPLEVNPEDMVRFAMEQPQTMASYSVSDAVATYYLYMTYVHPFIFSLATIIPMSPDEVLRKGSGTLCEMLLMVQAFKAGGT

SEQ ID NO: 14223 - protein, 406 aa, Zea mays
  VARIANT 356: note = Ancestral polymorphism is A, Derived polymorphism is V
MDTWTTCLLSFLPSIPPCLRPLLTPVGRGAAADCWDCPTPSAQVIFGPFAGDEHHQVCQVDRAMDSLWHLGDELRGQPKVVEDRQWSLMTSKLAEITRSKGERMNTVPDAKQWDKTSYQLHDDSRIGHIGLMNLDLKMNEAAAMKLPFRGMPYNMNQMYLKGSNANSNVNAFKMNVGVNKYSNSPNGKDANGKNNGGSGGNNNNGSANGTSVADKRFKTLPTSEMLPRNEVLGGYIFVCNNDTMQEDLKRQLFGLPARYRDSVRAITPGLPLFLYNYTTHQLHGVFEAASFGGSNIDPTAWEDKKCKGESRFPAQVRICIRKLCKPLEEDSFRPVLHHYDGPKFRLELSIAEVYYAVIIEEVMGDGHVNQFSRTEFKSADIVTARPMREGRHLSCRGGGGGCLVSF

SEQ ID NO: 14224 - protein, 191 aa, Zea mays
  VARIANT 38: note = Ancestral polymorphism is A, Derived polymorphism is D
MEALFGCNKHGGDKAADLASFIIVQAALEVPRLLGLLAMNYNISLCSSCVAVFCKILHNEIFTSGGDQNLINRILSKNKNATDFENKDDGESDDDNDEEGDDEDAENQEDDGGDEGSDDNGNEEEDDDDDDNDPAANGEGGSDDDDDGGEDEEEDDDDDDDGDGDNEEDEEEEEEEDDDDDVPQPPTKKRK

SEQ ID NO: 14225 - protein, 277 aa, Zea mays
  VARIANT 144..277: note = Derived polymorphism lacks residues 144 to 277
  VARIANT 180..277: note = Derived polymorphism lacks residues 180 to 277
  VARIANT 217..277: note = Derived polymorphism lacks residues 217 to 277
  VARIANT 229..277: note = Derived polymorphism lacks residues 229 to 277
MSAVVCGKRSSSIFGDELVPSPSSPPSPSHHHHPAKRARCSPSRWREGLLHHLLTLFPDMDPQLLEKALEASGDDLDSAIKRLNELRLESAGAILSATVCESEKDISSAHNLLAEGTTSNGHLDIATENPPAIDNSQTSHHSSEWVDLFVKEMMSSSDIDDARARASRALEVFEKSIMDRVGPEAVQNLHRENVMLKEQLAIILRENAVLKRGVAIQHERQKEFDVRTQEVDSLKQLVLQYQEQIKTLEINNYALRVHLKQAQQGNSMHGRFPPDVF

SEQ ID NO: 14226 - protein, 259 aa, Zea mays
  VARIANT 12: note = Ancestral polymorphism is G, Derived polymorphism is D
MAKSMRGGMRRGARKKTAGSESTSREVSRIPRCTIGCGGERTFAVAVGTVDLRSPRRCRRVSAVRHIFFFLFCFLQQDGSIETLDAFRPVSLETQHASIERTEKKWWLGTVDAGSNNADLKSDVDHLSVDLCVSVYYAFHVDGRRRRRARRARRRGRLCDRTTRDPSVSSASGMAKSMRGGMRRGARKKTAGSESTSREVSRILRCTIGCGGERTFAVAVGTVDLRSPRRCRRVSAVRHIFFSFLFPPAGRIYRNTRRF

SEQ ID NO: 14227 - protein, 217 aa, Zea mays
  VARIANT 146..217: note = Derived polymorphism lacks residues 146 to 217
  VARIANT 104..217: note = Derived polymorphism lacks residues 104 to 217
  VARIANT 93..217: note = Derived polymorphism lacks residues 93 to 217
  VARIANT 91..217: note = Derived polymorphism lacks residues 91 to 217
  VARIANT 28..217: note = Derived polymorphism lacks residues 28 to 217
  VARIANT 9: note = Ancestral polymorphism is M, Derived polymorphism is K
MGSMFLLGMLSAELLLNLLISGTSFVTYFGFEQHGHNIADAKKDDPLGLQHLALCHARYRPNDNAVEYGDNKNYLCRNRFNEYFDDAWVEQTWWADNCDCVIVQHKHPSRDVDYDDEDLAAPVLHANPRTTSTNETKRAATRGRLQASPSFSPPLTHHHHQRRGSERSTASQGLAGQLHCAMAAMADLYDEDKGPSLKSQQSCPGLRLKLAIEIFNY

SEQ ID NO: 14228 - protein, 114 aa, Zea mays
  VARIANT 22: note = Ancestral polymorphism is N, Derived polymorphism is D
  VARIANT 26: note = Ancestral polymorphism is T, Derived polymorphism is M
  VARIANT 34: note = Ancestral polymorphism is D, Derived polymorphism is N
  VARIANT 38..114: note = Derived polymorphism lacks residues 38 to 114
  VARIANT 43..114: note = Derived polymorphism lacks residues 43 to 114
  VARIANT 71: note = Ancestral polymorphism is Q, Derived polymorphism is R
  VARIANT 83: note = Ancestral polymorphism is G, Derived polymorphism is D
  VARIANT 90: note = Ancestral polymorphism is D, Derived polymorphism is A
MGLKATGARSNTMKLDNNAEMNSVDTAGVEDLMDTIEEVKPCWTKPSPKNQPSNGFVTFSLTMGPEYHISRITDAVVVARYLGATFVLLDIRGNELGNKRYASLTRRQFSISLR

SEQ ID NO: 14229 - protein, 145 aa, Zea mays
  VARIANT 108: note = Ancestral polymorphism is E, Derived polymorphism is K
  VARIANT 87..145: note = Derived polymorphism lacks residues 87 to 145
MQMNCAHLENCLHEAREEARTNKCSADRRVVEYDALRSSALRIHGLFERLNNCITAPGVTGFAESLHSLAASLASSVKKDEAHTTVQFQQCIKILADKVYLLTRQSAELLERYSAMQAVHGGITKELDEKKELIKNLYNKLQQEK

SEQ ID NO: 14230 - protein, 402 aa, Zea mays
  VARIANT 230..402: note = Derived polymorphism lacks residues 230 to 402
  VARIANT 189: note = Ancestral polymorphism is G, Derived polymorphism is R
MKIMMQDGLGMVFAPYGDHWRQLRKISILELLSARRVQSFRHVREDEVARLVAAVAATAPGQPVNVSHRIAVLVADSAVRAMIGDRFSRRDEFLVSLEEGLKLVSGFSLGDLFPSSPFMNFLSGTARRAHANHRKNFELMECAIKQHEERRAQAAVNGAAVQEEEAEDLVDVLLRIQKDGGLDMPLTMGIIKAVILDLFSAGSETSATTLNWAMAELMRCPDVMKKAQAELRDSLNGKPKVTEDDLVEMKYLKLIIKETLRLHPAAPLLVPREARDSCKILGYDVPKGTTVFVNAWAIGRDPEYWDDAEEFKPERFECGTVDFKGMDFEYIPFGAGRRICPGMVFAQANIELALAALLYHFDWKLEEGLEPSELDMTEDIGLTVRKKNDMLLHPSVRVPHKY

SEQ ID NO: 14231 - protein, 180 aa, Zea mays
  VARIANT 39: note = Ancestral polymorphism is R, Derived polymorphism is W
MDSGSDSDGAPEELTAVQGVAKHEETSKVEKDSVLRVTREGKERRKRWAQRRTSSKPDKKAPKEVEDEDTKKSEEHEETNTMPGMLPTSVIEILAAREKQTFASDSEEENVKQKVQRRKKRMKTDGPETILLKDVRSTQHVKNALDFLEHRKNRVPRSNAVLKNASKALRLLSSKGNFLS

SEQ ID NO: 14232 - protein, 373 aa, Zea mays
  VARIANT 245: note = Ancestral polymorphism is G, Derived polymorphism is E
  VARIANT 256..373: note = Derived polymorphism lacks residues 256 to 373
  VARIANT 299: note = Ancestral polymorphism is D, Derived polymorphism is G
MATQWFSNMVSPSVTALSPAVPFHGPPAAECALFLACRRAQVVDEPSFFHQWQSDALLEQYTEQQIAVAFGGHGGLDLDLDLDLDHGVATPPPLQRVPAPAADHRPRKAARGNASWDSCVTEQGSPDDYSSPTILSFAGHHAKAPKQELLDAAAAALPSFQQARPAPKRSYDDMMAEAARSPAAAARPASQNQDHILAERKRREKLSQRFIALSKIVPGLKKMDKASVLGDAIKYVKQLQDQVKGLEDDARRRPVEAAVLVKKSQLSADDDEGSSCDDNSVGAEASATLLPEIEARLSGRTVLVRVHCDNRKGVLIAALSEVERLGLSVMNTNVLPFTASSLDITIMAMAGDDFCLSAKDIVKKLNQAFKSPF

SEQ ID NO: 14233 - protein, 528 aa, Zea mays
  VARIANT 368..528: note = Derived polymorphism lacks residues 368 to 528
  VARIANT 299..528: note = Derived polymorphism lacks residues 299 to 528
  VARIANT 91: note = Ancestral polymorphism is V, Derived polymorphism is L
  VARIANT 32: note = Ancestral polymorphism is G, Derived polymorphism is D
MAVAVPGQLNLDEAPSWGSRSVDCFEKLEQIGEGTYGQVYMAKETGTNEIVALKKIRMDNEREGFPITAIREIKILKKLHHQNVIKLKEIVTSPGPERDEQGRPIDGNKYKGSIYMVFEYMDHDLTGLADRPGMRFTVPQIKCYMKQLLTGLHYCHVNQVLHRDIKGSNLLIDNEGNLKLADFGLARSFSSDHNGNLTNRVITLCCYRKVLIVFLDCGCRPPELLLGSTKYSPAVDMWSVGCIFAELLNGKPILPGKNEPEQLTKIFELCGTPDDTIWPGVTKMPWYNNFKPHRPLKRRVKDFFKHFDRHALDLLEKMLTLDPSQRISAKDALDAEYFWTDPLPCDPKSLPKYEASHEFQTKKKRQQQRQAEEAAKRQKLNHPPPHSRLPPIQQPGQAHPQIRPGQGMHNVPPVAAGPGHHYTKPRGPGGPNRYPPGGNQGGGYNPNRGGQGGGYGSGPYPQQGRGPPYPGGGMGGTAGPRGSGGSGYGAGGPNYQQGGPYGASGPGRGSNYSQGGGSRNQQQYGNWQ

SEQ ID NO: 14234 - protein, 407 aa, Zea mays
  VARIANT 77: note = Ancestral polymorphism is P, Derived polymorphism is L
MKIAVEGCMHGELDIVYDTLRRLEEAEGVKIDLLLCCGDFQAVRNENDLQCVSVPQKYRTMNTFWKYYSGEAVAPYPTIFIGGNHEASNYLWELYYGGWAAPNIYFLGFAGVVKFGNIRIGGLSGIHNKHHYHLGHYERPPYNKDTIRSVYHVRHYDVLKLMHLKEPLDVFLSHDWPLGITEYGNWQKLISVKKNFEDEVNNRTLGSKPAAELLNKLKPPYWFSAHLHCKFPAVIQHGKNGPTTKFLALDKCIPGRNFLQVIDIPSNPGPYEIQYDEEWLAITRKFNSVFPLARTQFTMRDEQLDTQEDRQWVRSKLNTRGAKPFDFVQTAPSFNPSSTTSKQSITVCCRNPQTESFLQLLELPYLLDSSKSEMFGRNESTSQTGNTLDNEDIELPDEDEDALEDDE

SEQ ID NO: 14235 - protein, 519 aa, Zea mays
  VARIANT 257: note = Ancestral polymorphism is K, Derived polymorphism is N
MDDHYYVYLGLALVSLLVVVLAKRRRGPVDGHGLRLPPGPWQLPIIGSMHHLAGQLPHRAMRDLARRHGAVMLLRVGEVPTLVVSSREAAREVMKTHDTAFASRPLSATVRVLTNNGRDIIFAPYGEHWRQLRKVAITELLSARRVLSFRAIREEEVAATLRACAAAAAESPPRPVEMRARLSALVADATVRAVMGDRCRDRDVFLRELDRSIGLSAGFNPADLWPSSRLVGLLSGAVRRAEECRDTVFGILDGIIKEHLQRMDSAGAGAGAGEAAGEDLLDVLLKIHKDGSLQIPLDMDVLKAVIFDIFGAGSETSATTLEWAMAELIRNPKAMQRATAEVREAFGARGAVAEHELGELRYLHLVIRETFRLHPPLPLLLPRQSQEPRRVLGYDVPAGTTVLVNVWALGRDGRYWPGDPEEFRPERFEAEASEVEFKGADFELLPFGAGRRMCPGMAFGLANVELALASLLFHFDWEAPGVSDPAEFDMAEAFGITARRKADLLLRPILRVRLPVPGV

SEQ ID NO: 14236 - protein, 358 aa, Zea mays
  VARIANT 86: note = Ancestral polymorphism is R, Derived polymorphism is I
  VARIANT 36: note = Ancestral polymorphism is S, Derived polymorphism is P
MEAAGGGAEDEQVMSEVHLGCPPHFSGLLVSHFSFSSRPLGPYGHKGGGGGGGGSELVAATSGSGDSPDAVAVDEDGDLVLDRRRRNKYARGDRHLFTIQHGVTSSLKSVGLQVWKAALLLSDFILHESFSSPNFDGVTAIEIGAGTGLVGLALARVARRIFVTDRGTDILDNCLANLHINSGMLRFDEAKVCVRELDWKMAWPPPVGTYDPSDPSRYLWSASEVEEAEKATVLFAADVIYSDDLTNLFFNTVKKLMSVGAKKVLYLALEKRYNFSVDELDVVANGYTHFRSFFTAQDEHGDPSNRSGPGFVGKQIDPAEIPQYIREYERGKDLEMWMIMYSPEEKQHSNSTKTVFSF

SEQ ID NO: 14237 - protein, 1085 aa, Zea mays
  VARIANT 141..1085: note = Derived polymorphism lacks residues 141 to 1085
  VARIANT 143..1085: note = Derived polymorphism lacks residues 143 to 1085
MAEIAERAVAGEVPEEPRPPHGEEDDEGEEEGDVCRICRNHGDEDHPLRYPCACSGSIKFVHQDCLLQWLDHSNSRQCEVCKHAFSFSPVYADNAPTRLPFQELMVGVGMKACHVFQFILRLAFVLSVWLMIIPFITYWIWRLTFVRSLSEAQRLFLSHISAQLILSDCLHGFLLSAIIVLIFLGATSLRDYIRHLRELGGHDAERDDGGRERHGARAVRRLAGPNNRVPADGNVDELAEAQGIGAGELLRRNAENVAARLERLEAQVEQMLDGLDDADGAEDVPFDELVGMQGPVFHLVENAITVLASNAIFLIVVIFVPFSLGRIILYYLSWFFSSASTPMLAKVMPFTETAISIANDTLKSALNVVKNFSSDSNNEGVIGHVIEVVTQSLKINATGLSVIQGTGKNSLMKGTTIASSYLSDLTTLAVGYMFIFCLVFLYIGSLALLRYARGERFTIGRLYGIATILEAIPSLCRQFFAGMKHLMTMVKVAFLLVIELGVFPLMCGWWLDVCTLKMLGTTIAQRVEFFTMSPLASSSIHWLVGIVYMLQISIFVSLLRGVLRNGVLYFLRDPADPNYNPFRDLIDDPVHKHARRVLLSVAVYGSLIVMLVFLPVKVAMRVAPSMFPLDITIFDPFTEIPVDVLLFQICIPFAIEHFKPRATIKALLHHWFSVVGWGLGLTDFLLPKSEENGGQENLNARAERRDRGHGGREMVAPQVEQLMIQHVAAEDNGRGDSNEANDVTEDSDVDDQGDSEYGFVLRIVLLLVLAWMTLLIFNAGMIVFPISLGRLVFEAVPRLPITHGIKCNDLFSFSIGCYILWSVAAGTRYAIDYITSRQLGFLVQQICKWCSIVLKSSVLLSIWIFVIPVLIGLLFELLVIVPMRVPIDESPVFLLYQDWALGLIFLKIWTRLVMLDQMAPLVDESWRSKFERVRDDGFSRLKGLWVLHEIIMPIVTKLLTALCVPYVLARGIFPLLGYPLIVNSAVYRFAWLGSLIFSALFFWGKRFHVWFTNLHNSIRDDRYLIGRRLHNFGEDSHSPERSESGASIGSDDQDRDIVLRDQEEEVGLRMRRNNMHANQQPRFAL

SEQ ID NO: 14238 - protein, 213 aa, Zea mays
  VARIANT 4..213: note = Derived polymorphism lacks residues 4 to 213
MPQQQASPTPATLVTVDGDGELKMETLLKASAYILGATSSSMYKAVLADGTALAVRRIGDSGGTEKLKDFEVQVRAIARFRHPNILRLRGFYWGVDEKLLIHDYAPNGSFANIAFSRRLWGRHRAWRRGCGSRAAWRTSTRKHPPGSWRADMEPWIGDVGLDRLVSGEAAPHSRAGASARLFGSKRSMHSTRSLQPPACVSGVRVHPARNRWK

SEQ ID NO: 14239 - protein, 308 aa, Zea mays
  VARIANT 87: note = Ancestral polymorphism is A, Derived polymorphism is S
  VARIANT 88: note = Ancestral polymorphism is A, Derived polymorphism is V
  VARIANT 93: note = Ancestral polymorphism is L, Derived polymorphism is F
  VARIANT 111: note = Ancestral polymorphism is R, Derived polymorphism is L
MGAEAAERDRIRGPWSPEEDEALRRLVERHGARNWTAIGRGVPGRSGKSCRLRWCNQLSPRVARRPFTADEDAAIARAHARLGNRWAAIARLLPGRTDNAVKNHWNCSLKRKLGAAAAASGSAVSADDSAAAAETEARRGKMMMMSISPPDSPSGSGSGSDRSDLSSHGAGSGSGSGSGQIYRPVAARSGGFEPADCAMSRPQEEDPLTALSLSLPGTDQRFHHHSAAADSHFQELPPSPSSPAPSAYPFSPEFAAAMQQLIRTEVQRYMASAGLRAGCGAVGATDLCMPQLVDGVMRAAAEQVGRMQ

SEQ ID NO: 14240 - protein, 404 aa, Zea mays
  VARIANT 238: note = Ancestral polymorphism is P, Derived polymorphism is S
MGGVLGALLHRRSGGRPPPARATRRRALTRQPSAYDAGGGHRRAMLSKKYSYIPDTYTSLDEVAAALREQGLESSNLILGIDFTKSNEWTGRQSFGGQSLHRVGDTPNPYEQAISIIGKTLAPFDEDNLIPCFGFGDATTHDYNVFSFHPDNSPCHGFEEVLACYRKIVPHLKLSGPTSFAPIVEAAVDIVDRSGGQYHVLVVVADGQVTRSVDTGDGDLSPQEKRTVESIVTASSYPLSIVLVGVGDGPWDDMRRFDDKLPARDFDNFQFVNFTAIMARAATAQQKESAFALAALMEVPIQYKATMELGILGRSTGNAKRVAPAPPPLPHAQRQASSLRRGASNVGGAAAAPRDDQVCPICLTNAKDLAFGCGHMCCRECGESLTRCPICRQPIRSKLRLYSG

SEQ ID NO: 14241 - protein, 321 aa, Zea mays
  VARIANT 101: note = Ancestral polymorphism is I, Derived polymorphism is N
MGGTRFIGVFLSRLLVKEGHQVTLFTRGKAPITQQLPGESDAEYADFSSKVLHLKGDRQDFEFVKTSLAANGYDVVYDINGREAVQVEPIIEALPNLQQYIYCSSAGVYLKSDILPHCEVVDAVDPKSRHKGKLETESLLTSRGVNWTSIRPVYIYGPLNYNPVEEWFFHRLKAGRPIPIPGAGNQITQLGHVKDLARAFNLVLGNPKASKQIFNISGAKYVTFDGLARACAKAGGFPEPELVHYNPKEFDFGKKKAFPFRDQHFFASVEKATSELGWTPEFDLVQGLTNSYNLDFGRGTFRKEADFTTDDMILDKKLATV

SEQ ID NO: 14242 - protein, 720 aa, Zea mays
  VARIANT 533..720: note = Derived polymorphism lacks residues 533 to 720
MKSRTATLAVGILLLVALVVVAEADTDAGDVAALGNLYSSWNSPAQLTGWSASGGDPCGAAWAGVSCSGSAVTSIKLSGMELNGTLGYQLSSLQALKTMDLSNNHLHDSIPYQLPSNLTYLNLAKNNFSGNLPYSISNLVSLEYLNLSHNSLFQEIGELFGSLNSLSELDVSFNNLTGNLPFSMGALSKLSSLYMQNNQLSGTVDVLSNISLATLNIADNNFSGMIPQEFSSIPNLIVGGNSFVNMPASPPSTLKPPLEEPQGPVSAPTSPDTPIDQDDRKIQTGPLIGIAVGSIAAASCVLFVLVFCLHNARRRNDDEISEPKDLVGSLAVSIETAASSREVLNNNHENSAVATSDLQHAGKMMMTPDRVLHDTTNGSSTAKRPKVPVTVTSYTVADLQVATNSFCEDSLLGEGSLGRVYKAGFPNGKVLAVKKVDDSALLSLYGGGEDAFLELVSNVSRLRHPNIVPLTGYCVEHGQRLLVYEYVGNGTLRDVLQHCLSDDEGASKKLTWNTRVRIALGTARALEYLHEVCIPPVVHSRTFKASNILLDEEYSPHLSDCGLAALTTVVSPEAVGSFGYSAPELAMSGTYTAKSDVYSFGVVMLELLTGRKPLDSSRERSEQSLVRWAAPQLHDIDLLARMVDPALDGLYPSKSLSRFADIIAICVQPEPEFRPPMSEVVQQLVRLMQRAAIIRRQSDDLGYSYRVPDRDGGAAAGDVL

SEQ ID NO: 14243 - protein, 615 aa, Zea mays
  VARIANT 111..615: note = Derived polymorphism lacks residues 111 to 615
  VARIANT 260: note = Ancestral polymorphism is L, Derived polymorphism is R
  VARIANT 262: note = Ancestral polymorphism is E, Derived polymorphism is K
MDSVRSGPFGQIFCPDNFVFQSGAGNNWAKGHYTEGAGNNRNRTRHPRPSTTYLHPLSASDVGAPTGNRQVSLWGSSTKEITRDTLLQKVSEENQLHRHLCRAAAAALSIQVIFTNDCYVFALCPFAGPQFQMNLKDEETTVETDSTQAPISQVLYTFHSVHHSMPKLEYSSSKMDMEKEIRKQVDDAIAKAKLDEASRALLMKVLEDATQDVVQRQAKLNARALQRGYIIPVYYDNLSTDESSPAELIGDWSCAEMLVLFETPARFTLFKVLDKVEDLWKEFTTSDSARKVVELKAFNKFENTSDALSAATLIIDSKPSKGLRKFLQKHCEGETLAVADSKLGNAIKEKLLMRGLRNQLTELITGLGAQDLGPMSLGLSHSLSRYKLKFSPEKVDTMIIQDIGLLDDLDKELNTYAMRVREWYGWHFPELTKIVTDNIQYAKVVKMMGNRVNAVNLDFSEILSDEELETQLKEAAVISMGTEVSDLDLSNIRELCDQVLALSEYRAQLYDYLRSRMNTIAPNLTALVGELVGAHLIAHGGSLLNLAKQPGSTIQILGAEKALFRALKTKHSTPKYGLIYHASLIGKASQKHKGKISRSLAAKTALAIRYDALGD

SEQ ID NO: 14244 - protein, 369 aa, Zea mays
  VARIANT 268: note = Ancestral polymorphism is R, Derived polymorphism is S
  VARIANT 270: note = Ancestral polymorphism is S, Derived polymorphism is N
MAAHSLSLYLPVVTRSLVPLAFRHLLLPHRLRLRLRLRLVSAVSPSRARPLGLGARPPRPHAAPLGYGVGAGRRPSGGLDHRAMSSSTNSTVATELSVSENSREIEPLPFVNDKHGGVIIEMKTPMDPGVFSAYLKAALAKWREQGIRGVWIKLPITLSNLIPTVVEEGFWYHHAEETYLMLAYWLPNTTHTLPVNATHRVGVGAFIMNDKREVLVVQEKSGVLRGLGVWKFPTGVVEPGEDINVGAIREVKEETGIDAEFVEVLAFRQSHKAFFDKSDLFFVCLLRPLSYDITKQDSEIEACQWMPVEEFAAQPFVQKHELVKYILEVGLAKVDKKYAGFSPISIKSAFTDKLSLFYMNRRDLDKASG

SEQ ID NO: 14245 - protein, 131 aa, Zea mays
  VARIANT 29: note = Ancestral polymorphism is G, Derived polymorphism is W
MARMLLAGKSQKTVLAVSPELLSVTGSKGGADIKLELSVGKIRTGEETARSNVLTGRRLAFGDAVMEQKETENSGIRTDSGAKYAVGKCGHGGGKDLSMNCSKHTPKVYFDGHIPFTADYRSPRKHPPKNN

SEQ ID NO: 14246 - protein, 71 aa, Zea mays
  VARIANT 10: note = Ancestral polymorphism is S, Derived polymorphism is L
MGASLSCFGSGAGGYYYADEPGYEQPRRSSRKVRPSDEDGLWYVGERDVDMKASAFIARFHASASSSASAS

SEQ ID NO: 14247 - protein, 845 aa, Zea mays
  VARIANT 273..845: note = Derived polymorphism lacks residues 273 to 845
  VARIANT 279..845: note = Derived polymorphism lacks residues 279 to 845
  VARIANT 507..845: note = Derived polymorphism lacks residues 507 to 845
  VARIANT 557..845: note = Derived polymorphism lacks residues 557 to 845
MKSPPVMDPEAPPAGTPPDDEEEKRGGRKGVPWRMTLSLAYQSLGVVYGDLSTSPLYVYKAAFAEDIQHTESNEEILGVLSFVFWTLTLVPLLKYVCVVLRADDHGEGGTFALYSLLCRHARAALLPPGRTAAWDEDQFSDGAGGGTNKATAQNGNAVTLGGGAAASVRRLLERHKVLQRVLLVLALVGTCMVIGDGVLTPAISVFSAVSGLELSMAKEHHKYVELPIACIILVCLFALQHYGTHRVGFIFAPVVITWLLCITLIGVYNIIHWEPTVYRALSPYYMYKFLRKTQRGGWMSLGGILLCVTGSEAMFADLGHFNQLSIQKQYMANYSLIKKILGQIAFTCMVYPALILAYMGQAAYLCKHHIMESDYRIGFYVSVPGKLFSSSVLIFRDANHSTISDSVLILNAYNVPFQRKLGGPLWQLVFLQQLWEAKPSSLIIHTSAKVHGQIYIPEINWIMMILCLAVTIGFRNTKHLGNASGLAIITVMLVTTCLMSLVIVLCWHKSIFLAIGFILFFGTIEALYFSAALIKFREGAWVPIVLALIFILIMCVWHYGTIKKYEFDVQSKVSINWLLGLSPNLGIVRVRGIGLIHTELETGIPAIFSHFVTNLPAFHQVLIFMCIKNVPIPHVRPEERFLVGRIGPKQYRIYRCIVRYGYQDFHKDDVEFEKELVCSVAEFIRSGSSKLNGTAEEVDEEEEQRMAVVRSNSVRMLEEEATVQNTVGVGPSSRASREIQSPSPAPATGVGPKNKKRVRFVLPAASPKPDAGAQEELQELSDAREAGMAFILGRSHVKAKSGSGFLRRLVINFCYDFLRRNSRGPRYAVTVPHASTLEVGMVYFI

SEQ ID NO: 14248 - protein, 1037 aa, Zea mays
  VARIANT 93..1037: note = Derived polymorphism lacks residues 93 to 1037
  VARIANT 114..1037: note = Derived polymorphism lacks residues 114 to 1037
  VARIANT 308..1037: note = Derived polymorphism lacks residues 308 to 1037
MEVHVGSIDEEEDEQGIAHMIEHVAFLGSKKREKILGTGARSNAYTDFHHTVFHIHSPTKTKEYGEDLLPFVLDALSEIAFHPKFSSSRVEKERRAILSELQMMNTIEYRVDCQLLQHLHSENKLSNRFPIGLEEQIHKWDPDKIRRFHERWYYPANATLYLVGEIDDIPRAVREIEAVFEHTLSENEGNPVPSANPFGAMASLFAPKLPGGFTSNLTGEKSPATDKIKPAKRERQAVRPPVEHKWSLPGVAQDAKPPAIFQHELIQSFSINMFCKIPVSKVQSYKDLRSVLMKRIFLSALHFRINTRYKSSNPPFTSVELDHSDSGREGCTVTTLTVTAEPQNWRSAIKVAVHEVRRLKEFGVTMGEMTRYMDALIKDSEQLAMMIDSVPSVDNLDFIMESDALGHTVMDQLQGHESLLAVAETVTLEEVNTVGAEVLEFISDFGKLNAPLPAAIVACVPQKVHVDGAGETEFEIYPEEITEAIKAGLEEPIYREPELEVPKELITQSELDDLKSQCNPSFVPLTKEENAVKVFDSETGIAQRRLSNGISINYKITQNEARVGVMRLIVGGGRATEDSESKGSVIVGVRTLSEGGCVGNFSREQVELFCVNNLINCSLESNEEFIFMEFRFALRDNGMRAAFQLLHMVLEHNVWLEDAFNRATQLYLSYYRSIPKSLERSTAHKLMLAMLNHDERFVEPSPHSLQKLTLQSVKNAVMNQFVGGNMEVSIVGDFTEEEVESCVLDYLGTVRASSSLNTEERIEKISFRPFPSDVHFQQVYIKDTDERACAYIAGPAPNRWGFTTEGNDLFNVIRISDADAEVSEPVSLDLTGKRHVDVRSHPLFFGITLSLLAEIINSRLFTTVRDSMGLTYDVSFELNLFDKLGLGWYVIAVTSTPSKVHKAVDACKGVLRGLHSSRIVERELDRAKRTLLMKHEAETKTNAYWLGLLAHLQSSSVPRKDVSCIRELTTLYESATIEDLYLAYEHLKVDDSSLFACIGIAGAESGEDTNDDELDVDLHGMAPMGGRGLSTMTRPTT

SEQ ID NO: 14249 - protein, 217 aa, Zea mays
  VARIANT 47: note = Ancestral polymorphism is P, Derived polymorphism is L
MGSGLSSSHHRSSGASSSLHQPPAAAPALVVAADGSLREFVTPAAAPLLLPVSVSDVLGANADDDGGRYFVCSSSALYFETDVPALGASELLRPGQVYFVLPAAMLGRPLSGADMAALAVRASQALAAGARPPRGGRRPRGSTRARVVPAAAAHHAHAHGDEEAVNEKLNQRTLGGFETAPPRGPARKPAVAARPAPPVTVTVTERRALSTIEEGAE

SEQ ID NO: 14250 - protein, 279 aa, Zea mays
  VARIANT 88: note = Ancestral polymorphism is A, Derived polymorphism is S
MTPHRSPAGTGGSGGGGPPALHYLSGPYGDTTFTKVFVGGLAWETRSEGLRAHFEVYGDILEAVVITDRATGRSKGYGFVTFQDPESARMACMDPYPVIDGRRANCNLAILGRPGPAVPFVAPIRPVIPYNGGVAVPGGMYVQSPTYQQSPYNYPQAFVYSSYGPSAYGPEYLYQQNAYGPYVGQQYIPVYGGPRTVGPAVYPYGQSGQPVPSDHAYSLGYAPSRVLPLSNQNVNAANVVRIPPLQQFPPGAPRPQQQLLAPARAPPFPQNNVSEQATG

SEQ ID NO: 14251 - protein, 115 aa, Zea mays
  VARIANT 16: note = Ancestral polymorphism is T, Derived polymorphism is I
MKTDVAHFRAFMQRLTGKPACCSDVTSTPPPPVGERRRQRRPRRGEADTGSGDRRREERFHGARIGGDKERKIKCEVKVEDRKELGFDGYEYELGRSDLWMDMDLSPGGGFLSFL

SEQ ID NO: 14252 - protein, 262 aa, Zea mays
  VARIANT 30: note = Ancestral polymorphism is L, Derived polymorphism is P
  VARIANT 32..262: note = Derived polymorphism lacks residues 32 to 262
  VARIANT 80: note = Ancestral polymorphism is I, Derived polymorphism is T
  VARIANT 107: note = Ancestral polymorphism is E, Derived polymorphism is K
  VARIANT 117: note = Ancestral polymorphism is R, Derived polymorphism is W
  VARIANT 123: note = Ancestral polymorphism is V, Derived polymorphism is E
  VARIANT 125: note = Ancestral polymorphism is T, Derived polymorphism is M
  VARIANT 126: note = Ancestral polymorphism is T, Derived polymorphism is M
  VARIANT 127: note = Ancestral polymorphism is L, Derived polymorphism is M
  VARIANT 136: note = Ancestral polymorphism is R, Derived polymorphism is C
  VARIANT 157: note = Ancestral polymorphism is L, Derived polymorphism is R
  VARIANT 163: note = Ancestral polymorphism is K, Derived polymorphism is N
  VARIANT 170: note = Ancestral polymorphism is L, Derived polymorphism is P
  VARIANT 181: note = Ancestral polymorphism is R, Derived polymorphism is C
  VARIANT 191: note = Ancestral polymorphism is E, Derived polymorphism is K
  VARIANT 216: note = Ancestral polymorphism is A, Derived polymorphism is T
  VARIANT 219: note = Ancestral polymorphism is R, Derived polymorphism is H
  VARIANT 225: note = Ancestral polymorphism is P, Derived polymorphism is L
MPVKWEPPSSQMLEYSPNDEAMRGGPMKALRRSSTSSAPSPRDAGDGDATTVAASSAGKRSFALCRSFSRAKRSRVTSLIVGGDGGTERLAAVAEELEGLTRDYMREFILLVQGYPRKVHRPERTTMYMDRCVFGRHVEKERVVDFLLQRAPYLSALAVVGAKKVGKTTLVKHACDDERVRGHFVCIEWFETPDVVRAGSLPGQYLWESGGPEYLAGVRRILGEPRFANAAGPSLLVFEDAWPMDESAWAALASSPTPLGDL

SEQ ID NO: 14253 - protein, 384 aa, Zea mays
  VARIANT 14: note = Ancestral polymorphism is G, Derived polymorphism is R
  VARIANT 116: note = Ancestral polymorphism is S, Derived polymorphism is W
  VARIANT 222: note = Ancestral polymorphism is H, Derived polymorphism is N
  VARIANT 224: note = Ancestral polymorphism is R, Derived polymorphism is Q
MLLLDGDLVLSSSGSTGAASRTSDSGRELVAALLESPGIRHAVDRLKVAPERRISAGQEGAPKHVYVFQREYATVDPARVEVRGVALSRLGLIGSVMICAVKVNFVFLSKSSLLLSRQRAQLVGTDEATTCIGVVIRNNKTGMTSVSHMDFPEIVEGGIKQMLELLGDDNAPFDVHLIGGFADASTKVVRSSGKKHIKQEGYSYPLCCKIVEVLHKSQLQFHLRSFCVLENNTKSDSFGNALPIIGGFVVETSSGVVIPATFDMDSRCPDEVVRRIRVSVSSYDPTWQGRLLETYDTQDDVFQIAPACWMPDWADIASSLNQLSDSEVLLRCSTSPAAEPPHFVENERRIWKYLIDNPDWEETFPKHKPRVFHRASDGSWSRYS

SEQ ID NO: 14254 - protein, 301 aa, Zea mays
  VARIANT 33..301: note = Derived polymorphism lacks residues 33 to 301
  VARIANT 40: note = Ancestral polymorphism is F, Derived polymorphism is I
MDTGRKRTAPEGANGAGGPKRARESETTGVGSKSKPCTKFFSTAGCPFGASCHFLHNFPGGYQAVSKMTNLGGPPVPAPPGRMPMGPGGPDGPPSPAVKTRMCNKYNTAEGCKWGSKCHFAHGERELGKPLQMDNPMGPPPMGPGPNGHFMPPPMPFPDMVPPSTFGASATAKISVDASLAGAIIGKGGTNTKHISRVTGAKLAIRDNEADPNHKNIELEGTFDQIKHASAMVTELIVRISGKPPPQAKNNPGRGPGSHAGGPGSNFKTKLCENFNKGSCTFGDRCHFAHGEGELRKPAAA

SEQ ID NO: 14255 - protein, 102 aa, Zea mays
  VARIANT 67..102: note = Derived polymorphism lacks residues 67 to 102
  VARIANT 43: note = Ancestral polymorphism is T, Derived polymorphism is M
MKVNESHLAKDLEQTWEVLAEPIQTVMRIYGIPEPYEKLKELTRGQAVTKDNMQQFINGLDIPEEVRSKLSKLTPHSYTGPAEDLARDIMKWVDLESGFQIK

SEQ ID NO: 14256 - protein, 254 aa, Zea mays
  VARIANT 147: note = Ancestral polymorphism is L, Derived polymorphism is P
  VARIANT 216: note = Ancestral polymorphism is S, Derived polymorphism is I
MAEKENVERIVEESGVETVEEAPGLVKEEKNDDTDGVMQEYYLLAWCWRVFRLFTTVLICYLSCLSSFSHFYSKFGTFCSMRRLDKAIPGMLLYLLVQRCNICFSVCKHECCYAKPNSFSLFFNKALLYRLSGDYNPLHSDLDIAQLAGYASTECYSIIVFIVIFDIKEVFGGRYNLRTRFTHPILHDLCTLGFAARTVIKSFCNGEPTAVKSIFSRFLLHVYPGETLSTEMWLDGQKVHYQTKANDILTFIPF

SEQ ID NO: 14257 - protein, 388 aa, Zea mays
  VARIANT 173: note = Ancestral polymorphism is I, Derived polymorphism is F
  VARIANT 116..388: note = Derived polymorphism lacks residues 116 to 388
  VARIANT 95..388: note = Derived polymorphism lacks residues 95 to 388
MTKGANDYKNSTAGVLSANSETRTIMKGIKHGACDYIVKPVRLEQLRGIWTHVVKNSRTDPRTSIIDSGSDDDVQKLPSGDGGEGDKVGANRRKKKCSKKNKPAVDVAGGHSENTSAQKKPRVQWCGQLHRKFVEAVHQIGIDKAVPKKILEAMNVEGITRENVASHLQKYRIYLRKLIEGTLGNSNSFADETEALWRYLNVPSFITSPSSSNHFTNAGSSSAIRTQTLLPPQPPVHVMSSQKNLSTPRSDMPPLTSNMWFSSSRSCSSYASILRGKILGSSRGIPFEDTPDGEMLAPGNLSSQSPELQSVWAGSASTRSDLQIDNSTQALNGGGASDNSLREGGSTVDQQAVVSDQVNNINAESDGLDDFLAYMVNRVRPFLFLFYA

SEQ ID NO: 14258 - protein, 106 aa, Zea mays
  VARIANT 100: note = Ancestral polymorphism is H, Derived polymorphism is Y
  VARIANT 44: note = Ancestral polymorphism is T, Derived polymorphism is M
MDVKTFPAGLRVLVVDDDRVCLKVLERQLKCCNYNVMVVTDARTALEMLRERKDDGDQFDLVISDVVMPNMDGFELLELIGVEMDLPVISKALALPIFMHGILLII

SEQ ID NO: 14259 - protein, 370 aa, Zea mays
  VARIANT 1: note = Ancestral polymorphism is M, Derived polymorphism is V
MRHASPPQELPAAGREIQAALAPANGNAAGARGGGGSFTALLGLPTPQAMELLLPRTTPPALALAPAAAPAPTPTFPSDPHLVDRAGRFSTFAPPSPPSPSPTQQPPPPPPAAVAGKRKADPVDRASKGKAAKKGKTAEEKPAAAGGEDEKPAYVHVRARRGQATDSHSLAERARREKINARMELLKELVPGCSKVSGTALVLDEIINHVQSLQRQVEYLSMRLATVNPRGDFGGLDSFLTTECGRIASFNCKNGIDLEQVTWPEMGVHGARQLMQLQQQFWHGDLAHPHQVASQWEKRGDGHPPVFSNSSPSLFGYDLTSSGKPCTQSYITFLNEFSCLSLTSHITAWLAPQLLSLSLSRQCSLENKVY

SEQ ID NO: 14260 - protein, 113 aa, Zea mays
  VARIANT 25: note = Ancestral polymorphism is V, Derived polymorphism is I
  VARIANT 30: note = Ancestral polymorphism is P, Derived polymorphism is S
  VARIANT 36: note = Ancestral polymorphism is V, Derived polymorphism is I
  VARIANT 40: note = Ancestral polymorphism is L, Derived polymorphism is F
  VARIANT 41: note = Ancestral polymorphism is G, Derived polymorphism is R
  VARIANT 44: note = Ancestral polymorphism is E, Derived polymorphism is D
  VARIANT 61: note = Ancestral polymorphism is A, Derived polymorphism is V
  VARIANT 63: note = Ancestral polymorphism is V, Derived polymorphism is A
  VARIANT 76: note = Ancestral polymorphism is P, Derived polymorphism is H
  VARIANT 79: note = Ancestral polymorphism is A, Derived polymorphism is S
  VARIANT 87: note = Ancestral polymorphism is G, Derived polymorphism is D
MWLFLSLLIVHFEKDKALARRFQPVLVNEPSQEDAIKILLGLCEKYETYHKCKYTLEGINATVYLSARYIPDRHLPDKAIDLIDEAGSRARMESFKRKKEEQCSILSKSPDEY

SEQ ID NO: 14261 - protein, 312 aa, Zea mays
  VARIANT 1: note = Ancestral polymorphism is L, Derived polymorphism is M
  VARIANT 79: note = Ancestral polymorphism is S, Derived polymorphism is R
  VARIANT 100: note = Ancestral polymorphism is N, Derived polymorphism is D
  VARIANT 108: note = Ancestral polymorphism is R, Derived polymorphism is C
  VARIANT 109: note = Ancestral polymorphism is A, Derived polymorphism is T
  VARIANT 162..312: note = Derived polymorphism lacks residues 162 to 312
  VARIANT 188: note = Ancestral polymorphism is S, Derived polymorphism is L
  VARIANT 204: note = Ancestral polymorphism is G, Derived polymorphism is D
MLVALVSGSEPAPIHSFSSSLGGSGFEYPFHSHIQIHGIVDWTHRGTVLTLPSPGSLPVTSRSDSSSANEVGHNLLDPSAFLSSFVSKGRKKIVKQGSFNTFYAKEYRATLEFYWAPFLVESNSNNPNFHNIKERIISPERIEAHAKHWKDVDYLIFNTYIWWMNNADIKVGSTPTSHPLTGNVRPNLRYWSNNDEVPRIEAYDCVFKTWSDWLNDNIDPTRTSVFMTISPRNLSGNLPILRFLLDHGDDLHEEGSLEGKSMVLIWHVVFSGNLPILRFLLDHGDDLHEEGSLEGHDRFTILHTTTKKDIIV

SEQ ID NO: 14262 - protein, 410 aa, Zea mays
  VARIANT 2: note = Ancestral polymorphism is A, Derived polymorphism is T
  VARIANT 18: note = Ancestral polymorphism is C, Derived polymorphism is Y
  VARIANT 61..410: note = Derived polymorphism lacks residues 61 to 410
MACIDNAMRALFLLALFCTVHGEKAKSKDNDSKASGPGGSFDITKLGASGNGKTDSTKAVQEAWASACGGTGKQTILIPKGDFLVGPLNFTGPCKGDVTIQVNGNLLATTDLSQYKDHGNWIEILRVDNLVITGKGKLDGQGPAVWSKNSCVKKYDCKILPNSLVMDFVNNGEVSGITLLNSKFFHMNMYKCKDMLIKDVNVTAPGDSPNTDGIHMGDSSGVTITNTVIGVGDDCISIGPGTSKVNITGVTCGPGHGISIGSLGRYKDEKDVTDINVKDCTLKKTANGVRIKAYEDAASVLTASKIHYENIKMEDSGYPIIIDMKYCPNKLCTANGASKVTVKDVTFKNITGTSSTPEAVNLLCSAKIPCTGVTMDDVNINYSGTNNKTMAVCKNAKGSAKGCLKALACF

SEQ ID NO: 14263 - protein, 410 aa, Zea mays
  VARIANT 2: note = Ancestral polymorphism is A, Derived polymorphism is V
  VARIANT 9: note = Ancestral polymorphism is R, Derived polymorphism is S
  VARIANT 20: note = Ancestral polymorphism is V, Derived polymorphism is M
MACIDNAMRALFLLALFCVVHGEKAKSKDNDAKASGPGGSFDITKLGASGNGKTDSTKAVQEAWASACGGTGKQTILIPKGDFLVGPLNFTGPCKGDVTIQVNGNLLATTDLSQYKDHGNWIEILRVDNLVITGKGKLDGQGPAVWSKNSCVKKYDCKILPNSLVMDFVNNGEVSGITLLNSKFFHMNMYKCKDMLIKDVNVTAPGDSPNTDGIHMGDSSGVTITNTVIGVGDDCISIGPGTSKVNITGVTCGPGHGISIGSLGRYKDEKDVTDINVKDCTLKKTANGVRIKAYEDAASVLTASKIHYENIKMEDSGYPIIIDMKYCPNKLCTANGASKVTVKDVTFKNITGTSSTPEAVNLLCSAKIPCTGVTMDDVNIKYSGTNNKTMAVCKNAKGSAKGCLKELACF

SEQ ID NO: 14264 - protein, 328 aa, Zea mays
  VARIANT 170: note = Ancestral polymorphism is C, Derived polymorphism is S
  VARIANT 113: note = Ancestral polymorphism is M, Derived polymorphism is T
  VARIANT 32..328: note = Derived polymorphism lacks residues 32 to 328
  VARIANT 29: note = Ancestral polymorphism is D, Derived polymorphism is Y
  VARIANT 28: note = Ancestral polymorphism is T, Derived polymorphism is I
MAYTDNAMRALLRSSTSCMVDGNLLATTYLSQYKEHGNWIEILRVDNLVITGKGNLDGQGPFVWSKNSCTKKYDCKILPNSLVMDFVNNGEVSGVTLLNSKFFHMNMYQCKDMLIKDVTVTAPGDSPNTDGIHMGDTSGITITNTVIGVGDDCISIGPGTSKVNITGVTCGPGHGISIGSLGRYKDEKDVTDINVKDCTLKKTTFGVRIKAYEDAASELTVSKIHYENVKMEDSTNPIFIDMMYCPNKLCTANGASKVTVKDVTFKNITGTSSTPEAISLLCTAKIQCTGVTMDDVNVEYSGTNNKTMDICTNTKGCTKGCLKELACF

SEQ ID NO: 14265 - protein, 348 aa, Zea mays
  VARIANT 195: note = Ancestral polymorphism is G, Derived polymorphism is D
  VARIANT 78: note = Ancestral polymorphism is G, Derived polymorphism is E
  VARIANT 72: note = Ancestral polymorphism is G, Derived polymorphism is D
  VARIANT 61..348: note = Derived polymorphism lacks residues 61 to 348
MAYTDNAMRALFLLALFCVVHGEKEESKGIDAKASGPGGSFEITKLGASGNGPCKGDVTIQILRVDNLVITGKGNLDGQGPAVWSKNSCTKKYDCKILPNSLVMDFVNNGEVSGVTLLNSNFFHMNMYRRKDMLIKDVTVMAPGDSPNTDGIHMGDSSGITITNTVIGVGDDCISIGPGTSKVNITGVTCGPGHGISIGSLGRYKDEKDVTDINVKDSTLKKKIFDVRIKAYEDATSVLTVSKIHYENIKMEDSANPIFIDMKYCPNKLCTANGASKVTVKDVTFKNITDTSSTPEAVSLLCTAKIPCTGVTMDDVNVEYSGTNNKTMAICTNAKGSTKGCLKDLACF

SEQ ID NO: 14266 - protein, 410 aa, Zea mays
  VARIANT 191..410: note = Derived polymorphism lacks residues 191 to 410
MACTDNAMRALFLLVLFCIVHGEKEESKGIDAKASGPGGSFDITKLGASGNGKTDSTKAVQEAWASACGGTGKQTILIPKGDFLVGQLNFTGPCKGDVTIQVDGNLLATTDLSQYKEHGNWIEILRVDNLVITGKGNLDGQGPAVWSKNSCTKKYDCKILPNSLVMDFVNNGEVSGITLLNSKFFHMNMYQCKNMLIKDVTVTAPGDSPNTDGIHMGDSSGITITNTVIGVGDDCISIGPGTSKVNITGVTCGPGHGISIGSLGRYKDEKDVTDINVKDCTLKKTMFGVRIKAYEDAASVLTVSKIHYENIKMEDSANPIFIDMKYCPNKLCTANGASKVTVKDITFKNITGTSSTPEAISLLCTAKVPCTGVTMDDVNVEYSGTNNKTMAICTNAKGSTKGCLKELACF

SEQ ID NO: 14267 - protein, 410 aa, Zea mays
  VARIANT 195: note = Ancestral polymorphism is M, Derived polymorphism is T
MACTNNAMRALFLLVLFCIVHGEKEESKGIDAKASGPGGSFDITKLGASGNGKTDSTKAVQEAWASACGGTGKQTILIPKGDFLVGQLNFTGPCKGDVTIQVDGNLLATTDLSQYKDHGNWIEILRVDNLVITGKGNLDGQGPAVWSKNSCTKKYDCKILPNSLVMDFVNNGEVSGVTLLNSKFFHMNMYRCKDMLIKDVTVTAPGDSPNTDGIHMGDSSGITITNTVIGVGDDCISIGPGTSKVNITGVTCGPGHGISIGSLGRYKDEKDVTDINVKDCTLKKTMFGVRIKAYEDAASVLTVSKIHYENIKMEDSANPIFIDMKYCPNKLCTANGASKVTVKDVTFKNITGTSSTPEAVSLLCTAKVPCTGVTMDDVNVEYSGTNNKTMAICTNAKGSTKGCLKELACF

SEQ ID NO: 14268 - protein, 81 aa, Zea mays
  VARIANT 5..81: note = Derived polymorphism lacks residues 5 to 81
MKLGQSVYHMDWQSSWELPIPYLNTYDGRTIRNPDQLIKANDTTKIDLETNKIMDFFKFDVGNVVMVIGGRNIGRVGVIKN

SEQ ID NO: 14269 - protein, 414 aa, Zea mays
  VARIANT 261: note = Ancestral polymorphism is G, Derived polymorphism is D
  VARIANT 259: note = Ancestral polymorphism is G, Derived polymorphism is D
  VARIANT 141..414: note = Ancestral polymorphism lacks residues 141 to 414
  VARIANT 84: note = Ancestral polymorphism is L, Derived polymorphism is H
  VARIANT 70: note = Ancestral polymorphism is D, Derived polymorphism is Y
  VARIANT 2: note = Ancestral polymorphism is A, Derived polymorphism is V
MACTDNVMRALFLLALFCVMHGEKEESKRIDAKASGPGGSFDITKLGASGNGKIDNTKAVQEAWASACGDTGKQTILIPKGDFLVGQLNFTGPCKGDVTIHVDGNLLSTMDLSQYKEHGNWIEILRVDNLVITGKGNLDGLGPAVWSKNSCAKKYDCKILPNSLVMDFVNNGEVSGVTLLNSKFFHMKALTSRGRCKDMLIKDVTVTALGDSPNTDGIHMGDSSGITITNTVISVSDDCISFGPGTSKVNITGVTYGSGHGISIGSLGRYKDEKDDTNINVKDCTLKKTTFGVRIKAYEDAASVLTVSKIHYENIKMEDSANPIFIDMKYCPNKLCTANDASKVTVKDVTFKNITGTSSTPEAVSLLCSAKIPCTGVTMDDINVEYSGTNNKTMAICTNAKGSTKGCLKELACF

SEQ ID NO: 14270 - protein, 54 aa, Zea mays
  VARIANT 35: note = Ancestral polymorphism is A, Derived polymorphism is V
  VARIANT 27: note = Ancestral polymorphism is A, Derived polymorphism is E
  VARIANT 11..54: note = Derived polymorphism lacks residues 11 to 54
  VARIANT 9: note = Ancestral polymorphism is A, Derived polymorphism is V
  VARIANT 5: note = Ancestral polymorphism is L, Derived polymorphism is F
MSKRLIEEAEQYFQDFSVEWEKVPDTELAIRQGAAVGVGALATIPLQLPLKIDY

SEQ ID NO: 14271 - protein, 589 aa, Zea mays
  VARIANT 231..589: note = Derived polymorphism lacks residues 231 to 589
MVMDAAMARFEGKMGHPFKRHHWWQVVRHEPKWSAKHGLGSGSDSTANKRTRLGVSGEYSSGGTEDTEEEVPRPVGRDRAKAAARKTKTKGKGKEATSSESTSEAFKMKNLWGGLVKAKLLKQWNILKGRSTRDMDPAERPHSHSHRFRPGLRSVVLWLSSKVQRLVNPKGDQTDPPLLCSAHVREPPGKTQRRNSGDRNPGTQLGELHATAGRRLIHFLSLQLLVLVFFQLHPGYLLEGRASRAAKKKSSRETLLTLTEGDMARKLRELLQKSGNRVCADCGAPDPKWASANIGVFICLKCSGVHRSLGTHVSKVLSVTLDQWTDDEINSMIEVGGNSYANAIYEAFLPEGYQKPHPDSSQEERADFIRSKYELQEFLKPSLRLVSSNKGSLEATSSRKHMDNSVSLSASFSSEVTSFASYIFQAGMVEFIGILKVKVIRGTKLAVRDLMSSDPYVVLTLGQQKAKTSVSKRNLNPVWNEELKLSVPQHYGPLKLQVFDHDMLSKDDEMGDAEIDLQPMISAATAFGDPDLLADMQIGKWLRSPDNALARDSAVNVVGGKVKQEVSLRLQNVESGEVELELEWIPLNQ

SEQ ID NO: 14272 - protein, 516 aa, Zea mays
  VARIANT 41: note = Ancestral polymorphism is R, Derived polymorphism is C
MAMLHSWRHLDLVLRYSYGSLIMARSIGLKCKKQSKLDWQRPFCATNYARGQHFATTKMMNRVEGREVTNTDEDAVCPVSIIENTSHRDGSIYRRCNDFLTLYRITDRGETRLEPMALSEPTNCQPNREKCIRHLPKPMMQIFSLTLGKIPIERDSVELYGYMAVRDDQDLLLNYIVNRSRDEAILLQKDSLIEMTGPKRGISMVSSVLVEFDMRIKNGDREEDDLQLIDGMIDYSELRTPCWPPFTYRINGDCGAVDMTVARILCGVEATIEVFISEVHAQEGVRLSLSSFVFVSDSEEEEIQLFNGIVGESSGLRYAVAVFEDTWMHLKFKVGKNNDLKDDAERCIPIEVNTHGCVSKKVNFDLASMSVKVLANLIGFKCFVMESVGLWTEAGESIKNATSPRLGRVGPAMGDRPAPIEKVAVPEKMALFLHAAVTSPGHQQQHGASSHEAPAAANITPRTTTARNKQQHLPVSPGACLCSPTVHEGSFRCRLHRGSGSGSGLHEMKMSKKAGV

SEQ ID NO: 14273 - protein, 321 aa, Zea mays
  VARIANT 296: note = Ancestral polymorphism is G, Derived polymorphism is A
MAASAAAALLALLAAGTSTSSAQLSTGFYSHSCPGVHDAVRSVLQAAIAREQRMGASILRLFFHDCFVQGCDASLLLDDTPSFQGEKMAKPNNGSVRGFEVIDAIKSAVDKACPGVVSCADILAIAARDSVVTLGGPNWDVKLGRRDSRTASFSGANNNIPPPTSGLANLTSLFAAQGLSQKDMVALSGAHTIGQARCTNFRAHVYNDTNIDGAFARARRSVCPAAASSGSGGDNNLAPLDLQTPTVFENDYYRNLVCRKGLLHSDQELFNGAATDAQVQAYVSSQSAFFADFVAGMVKMGDISPLTGSSGEIRKNCRRIN

SEQ ID NO: 14274 - protein, 258 aa, Zea mays
  VARIANT 163: note = Ancestral polymorphism is A, Derived polymorphism is V
  VARIANT 192: note = Ancestral polymorphism is G, Derived polymorphism is D
  VARIANT 203: note = Ancestral polymorphism is E, Derived polymorphism is K
  VARIANT 206: note = Ancestral polymorphism is D, Derived polymorphism is N
  VARIANT 215: note = Ancestral polymorphism is V, Derived polymorphism is I
  VARIANT 217: note = Ancestral polymorphism is R, Derived polymorphism is I
  VARIANT 232..258: note = Derived polymorphism lacks residues 232 to 258
  VARIANT 250: note = Ancestral polymorphism is D, Derived polymorphism is Y
MKSGERRDGGHRCGAAPRPSAAPPALETIHLEEISDLRDGRSQASGGREAGPGRGAAPYRAAAPPPVPLPTTTNRYERAKKDALKSAVRVADLLVDTVDGGVRELFVNEKRIELEARALLVRPRSQSFPAPVLAACSAEMATLGRLSLLLSSTVHRSGGFVRAFSMLAEVADVSDLYLPRDAHCYYNFKTYGLSIPDTDFIKKNLDVLPEFDLLVFRSLNMSRSESEIGNCYKPFAKFFKALVGKYAVRDAIFKLPKS

SEQ ID NO: 14275 - protein, 336 aa, Zea mays
  VARIANT 292..336: note = Derived polymorphism lacks residues 292 to 336
  VARIANT 288..336: note = Derived polymorphism lacks residues 288 to 336
  VARIANT 140: note = Ancestral polymorphism is E, Derived polymorphism is G
  VARIANT 138..336: note = Derived polymorphism lacks residues 138 to 336
  VARIANT 115: note = Ancestral polymorphism is P, Derived polymorphism is S
  VARIANT 104..336: note = Derived polymorphism lacks residues 104 to 336
  VARIANT 91..336: note = Derived polymorphism lacks residues 91 to 336
  VARIANT 71: note = Ancestral polymorphism is E, Derived polymorphism is K
  VARIANT 70: note = Ancestral polymorphism is S, Derived polymorphism is Y
  VARIANT 67: note = Ancestral polymorphism is M, Derived polymorphism is T
  VARIANT 63: note = Ancestral polymorphism is R, Derived polymorphism is I
  VARIANT 24: note = Ancestral polymorphism is M, Derived polymorphism is I
  VARIANT 21: note = Ancestral polymorphism is R, Derived polymorphism is H
  VARIANT 17: note = Ancestral polymorphism is H, Derived polymorphism is Y
  VARIANT 16: note = Ancestral polymorphism is T, Derived polymorphism is I
MNRLIEDIDNDLPFLTHDRVRKLMRSGLLPLYFSKTCGLSIPDTDFIEENLGVLPELDLLVFRSLNMSRSESEIDNCYKSFVKLFKALVGKYAARDAIFKLPKSLYLHLKYLELSIVKDYRVIYGTSLFPKLLISIMYCEVHRLLREQCPARGLGAAANAIMVTIEEKIFNFMKSCSTNTLLISYSGAHGERAKKHIVGSEDRGDEALTSEVSDDTKDLKASNVPLKVRNFMGNKELSVKGKRTTAEGNVEIVTGDELTTTLLDVVNTIQRTTTGYDQIRSAKKKVMSHVKQMRMCQIRLLKLLQEKVMHKDLEIDLEDPDSMSQLKINDRSIHNF

SEQ ID NO: 14276 - protein, 112 aa, Zea mays
  VARIANT 32: note = Ancestral polymorphism is V, Derived polymorphism is A
MESTVERISSSVQSWVKDHELAAIGGVWAAAVGTSVAYSRRKAPQRGTGLRLIHARMHAQALTLAVLGGAALFHYYGDGGRRKRADDIDLDFYSQLPPATDADGNENQRWSW

SEQ ID NO: 14277 - protein, 290 aa, Zea mays
  VARIANT 74: note = Ancestral polymorphism is G, Derived polymorphism is A
  VARIANT 186: note = Ancestral polymorphism is A, Derived polymorphism is S
  VARIANT 216: note = Ancestral polymorphism is A, Derived polymorphism is P
  VARIANT 274: note = Ancestral polymorphism is M, Derived polymorphism is T
MDCCICSPVASVYRLPRNAICAPCHQGAKAIIGFLDRDGEREEDDGGGRSVQLQPRGSAKGLRDAWEQVKEMRAREEETRQRAAFLQHGFASAWKEGIHTDIVVKPGTGPAIPAHKAILAARSEVFRHMLSGDDRCKAPAGGSISLPELSHDDLSLLLAFLYTGALEAPGEGGGEASQDQERQLHALLVAADKYDVPFLRRVCEARLAAGVAPRNALRTLEVAELSSSAALMERAMGAVVEHAEEVVFSAEYERFAARNAGLCVEITRALLARMPTPARSDGPCLELGSS

SEQ ID NO: 14278 - protein, 99 aa, Zea mays
  VARIANT 11: note = Ancestral polymorphism is T, Derived polymorphism is I
  VARIANT 16: note = Ancestral polymorphism is D, Derived polymorphism is A
  VARIANT 18: note = Ancestral polymorphism is L, Derived polymorphism is F
  VARIANT 39: note = Ancestral polymorphism is G, Derived polymorphism is V
MEPSLVHSQATRYILDILSLIMDPRYVTLFIFLVLALHGDTTLAETCRQFVKVHPFCFKAMCKANCAIEGKFSDGSYVKDYRCESGGFHSVCVCILCKH

SEQ ID NO: 14279 - protein, 99 aa, Zea mays
  VARIANT 2: note = Ancestral polymorphism is K, Derived polymorphism is E
MEPSLVHSQVTRYILDILSLIMDPRYVTLFIFLVLALHGDTTLAETCRQFVKVHPFCFKAMCKANCAIEGKFSDGSYVKDYRCESGGFHSVCVCILCKH

SEQ ID NO: 14280 - protein, 99 aa, Zea mays; identical to SEQ ID NO: 14278
  VARIANT 2: note = Ancestral polymorphism is K, Derived polymorphism is E
  VARIANT 8..99: note = Derived polymorphism lacks residues 8 to 99
  VARIANT 39: note = Ancestral polymorphism is G, Derived polymorphism is V
  VARIANT 49: note = Ancestral polymorphism is Q, Derived polymorphism is R

SEQ ID NO: 14281 - protein, 156 aa, Zea mays
  VARIANT 7: note = Ancestral polymorphism is V, Derived polymorphism is I
MAIGHNVDGDMGRWWHGKEDDDNTVWVSIGYGIPVGSGYEFGTRLQVCVLKWGVFSLTGSDLVPSTTPFLRRACEARLAVGVAPRNMLRTLEVAELSSSAALMERAMGAVVEHAEEVVFSAEYERFAARNAGLCVEITRALLARMPTAARSDGARA

SEQ ID NO: 14282 - protein, 355 aa, Zea mays
  VARIANT 244: note = Ancestral polymorphism is S, Derived polymorphism is R
  VARIANT 107..355: note = Derived polymorphism lacks residues 107 to 355
  VARIANT 14..355: note = Derived polymorphism lacks residues 14 to 355
  VARIANT 13: note = Ancestral polymorphism is P, Derived polymorphism is T
MAATYQTGLVAEPQLLNTEIITRRATYFVADTNRKDKCVGYLDVFVHQARDIHNVCVYHKQDVNAKLCLTSSPDILCSTKVISRAGRNPVFEESLRLDVQTVDASFKCEIWMLSRVRNYLEDQLLGFALVPLVDIVIGNGKLVQEFSLTSTDICCPHLITQKSPSTVDDSGNDHVVPAQLEKIVFPDLNVEKEDEIMVSKYLEMTSDSETPIKVENDMSLHSTNDDDVPSKLEKIKFIDSGRTSAACDRSATRAEAAPALAELCGNAGKAGLWQEAVVADAVSRLVWRLEAKPAGERDATARKLAAVLGVSGGCHKAFRKDECGVVNAVQLLDPSAPGVETRLGKGKMLGVFPRT

SEQ ID NO: 14283 - protein, 261 aa, Zea mays
  VARIANT 169..261: note = Derived polymorphism lacks residues 169 to 261
  VARIANT 147: note = Ancestral polymorphism is G, Derived polymorphism is R
MDLNLWPPSKSRMTMNCVFSCHCQGLSPMNVRYLYAAIFLLANLSAWFARENTVSYHLKQRLSGCQGDRGCLAVESVLVASHAFFLFFMTMFFSTVRTGKVNELRNSWHSGWWPVKIALFMVCSLISVLAPSWWIQIYESEDDVSYGYGFFHFAFAAGSMYVRMVFVGWDTHHTMKQWSVDIGWMSTWVHIANEALVVVFYIAILVARIFGIGLLRHLLAKIFGTGDRLHSGESQTTTTHLMRCTQRRRLFHHSTEQLRRR

SEQ ID NO: 14284 - protein, 230 aa, Zea mays
  VARIANT 196..230: note = Derived polymorphism lacks residues 196 to 230
  VARIANT 176: note = Ancestral polymorphism is G, Derived polymorphism is D
  VARIANT 94: note = Ancestral polymorphism is L, Derived polymorphism is Q
  VARIANT 25..230: note = Derived polymorphism lacks residues 25 to 230
MAMFFSTVRTGKVNELRNSWHCGWWPVKIALFMACSLISVLAPSWWIQIYGKIAQLGAGSAHKFYEIYHKAELQIVPNQLPRKVPRGWDLHLCQHGSTGLTIVMIVKHRHCWLDIEFLGTTLLLVYIMCALSLMSKCFAFGLLGTVYSTFSIGSDYKCIHLWNIVESEDDVPYGYGFFHFVFAVGSMYVGMVFVGWDKHHTMKQWSVDIGWMSTWVHIANEALLVVFYSK

SEQ ID NO: 14285 - protein, 268 aa, Zea mays
  VARIANT 32..268: note = Derived polymorphism lacks residues 32 to 268
  VARIANT 64..268: note = Derived polymorphism lacks residues 64 to 268
MKARYVYAVLFLLANLCAWLMRENRISYYLAQRGNARCHGKVAQVGAGVFLVLQLMSTIRFITQLNYKLCETNFEERYIRVIAISGTAILTFLGLIVFLSLKFVQCWHNMELIVITMVLFFIMCGVSLMSKANKFFMEPALIGGYATFICLLAITSEPESGCDIKCKAGSVAGWLTISFFVSGLLGTVYSAFTMGTGYKCTRNTLESEDNVPYGYGFFHFIFMSGCMYFGMMFVAWDTHHTMEEWNVDIGWISTWIHIASEALVVVSY

SEQ ID NO: 14286 - protein, 230 aa, Zea mays
  VARIANT 147: note = Ancestral polymorphism is G, Derived polymorphism is D
  VARIANT 71: note = Ancestral polymorphism is S, Derived polymorphism is R
  VARIANT 19: note = Ancestral polymorphism is A, Derived polymorphism is T
  VARIANT 14: note = Ancestral polymorphism is T, Derived polymorphism is A
  VARIANT 13: note = Ancestral polymorphism is P, Derived polymorphism is T
MPTIAAITSPLAPALTLTADYKSSSTWLIDLATKNNYLIGVDDFKSGQTKMKSVLVDFLVGGGIKPTLIVRYNHLGNNNGMNLSAPQTFRSKEISKSNMVDDIVSSNVILYGPGEHPDHVVVIKYVPYVGDSKRAMDENTSKIFMGGKNTIVLHNTCEDSLLTTPIVLDLDKFHSFHSVATILTYLTKAPLVPPGTPVVNALAKQRAMLENIMRACVGLAPKNNMILEYK

SEQ ID NO: 14287 - protein, 166 aa, Zea mays
  VARIANT 149..166: note = Derived polymorphism lacks residues 149 to 166
  VARIANT 18: note = Ancestral polymorphism is L, Derived polymorphism is F
  VARIANT 15: note = Ancestral polymorphism is R, Derived polymorphism is C
MEGHHESCPAILGFRHLLLLLAPHAASDGFRAPVPRDLTSAASMEGHHVSCILGLRTPSSDTMPPHPASRCLCRHYPQPPPHAINALPSSPEMPRPYVFSTPACIVIPSGTAAPVPLAYPPARQSPSSTYPTPLAMTPSILGSSRPTARRSTPTMEDSSMTTFSIG

SEQ ID NO: 14288 - protein, 111 aa, Zea mays
  VARIANT 66: note = Ancestral polymorphism is D, Derived polymorphism is H
MVDVGYIVEPSFKVMAGSDCSTQIPTKGKDRHELDNNEGENIKDNIGNVVEQSLDVVVVGSDYVFDPFQVSVKADVGEQSNVTHMSSLEVQNESTQISSDVDMLEQIEQDN

SEQ ID NO: 14289 - protein, 168 aa, Zea mays
  VARIANT 98: note = Ancestral polymorphism is R, Derived polymorphism is T
  VARIANT 25..168: note = Derived polymorphism lacks residues 25 to 168
  VARIANT 3..168: note = Derived polymorphism lacks residues 3 to 168
MGYNYDDEGEPIVNLDEREPSPEHQPYEDLDDDLDDGGDRTRDRSPTPVHGDDDGAGSSSKPRKHLLKKSGGGGMPSDDGLDDFGLADEDADPSAEERKRKGRASKEPLFPSPSARVRRDPLAASAKRSTYAADLHLAHLAAPTFLQRETPGPHARSRPTRSRCNSGL

SEQ ID NO: 14290 - protein, 72 aa, Zea mays
  VARIANT 59: note = Ancestral polymorphism is R, Derived polymorphism is H
  VARIANT 56: note = Ancestral polymorphism is G, Derived polymorphism is R
  VARIANT 55: note = Ancestral polymorphism is S, Derived polymorphism is Y
  VARIANT 15: note = Ancestral polymorphism is R, Derived polymorphism is S
MQNEEGKTVDLYVPRKCSATNRIITAKDHASVQINIGHLDANGLYDGHFTTFALSRFVRAQVIVHDMFIAFV

SEQ ID NO: 14291 - protein, 160 aa, Zea mays
  VARIANT 90: note = Ancestral polymorphism is S, Derived polymorphism is F
  VARIANT 93: note = Ancestral polymorphism is T, Derived polymorphism is A
MRMENPKAGRKGNLNVATEVFQIAPSLHVVELKKAKGDTLSSKRLAPLEFELSHCSFPATTVDPAAMVVSSKVGSTAAVSATVSFDAVSSMPTLNFDAPSFVATFGFAITSIAESSAALFSDASRFGLAITFTVETSVAVAHPIAVSGCDGWGIPASFVG

SEQ ID NO: 14292 - protein, 50 aa, Zea mays
  VARIANT 6..50: note = Derived polymorphism lacks residues 6 to 50
  VARIANT 32: note = Ancestral polymorphism is R, Derived polymorphism is M
MAAVRQNYGQKVLVQFEDFANHNAFTLLEKYMTNHLVFNDDIHVIKSDAS

SEQ ID NO: 14293 - protein, 86 aa, Zea mays
  VARIANT 44: note = Ancestral polymorphism is S, Derived polymorphism is C
  VARIANT 30: note = Ancestral polymorphism is R, Derived polymorphism is W
  VARIANT 29: note = Ancestral polymorphism is G, Derived polymorphism is R
  VARIANT 7: note = Ancestral polymorphism is S, Derived polymorphism is P
MALLLASALAMTCGQVGSALAPCILYATGRASGLPSKCCSGVRSLNMATIIDRRHPCQVRQEPRQERQHAPVSSAAPVVAKIQSGG

SEQ ID NO: 14294 - protein, 449 aa, Zea mays
  VARIANT 391: note = Ancestral polymorphism is V, Derived polymorphism is A
MAYAARRKKRVGRYEVGRTIGQGTFAKVKFAVDADTGAPVAMKVLDKETIFAHRMLHQIKREISIMKIVRHPNIVRLNEVLAGKTKIYIILELVNGGELFDKIARYGKLRENEARKYFQQLIDAIDYCHSKGVYHRDLKPENMLLDSRGNLKVSDFGLSTLSQNGAGLLHTTCGTPNYVAPEVLGSDGYDGPAADIWSCGVILYVLMAGYLPFEENDLPSLYEKITAAKYSCPYWFSPGAKSLIQRLLDPNPRTRITIGEIRADPWFEKNYVAIRRGEDENVSLDDVQAVFDNIEDKYVSEEVTHKDGGPLMMNAFEMITLSQGLDLSALFDRQQEYVKRQTRFVSRKPAKTIVATIEVVAESMSLKVHSQNYKLRLEGASSNRTSQFAVVLEVFQVAPSLFMVDVRKVAGDTLEYHRFYKNLCSRLDSIIWRPIEVSAKSKLLRTTTC

SEQ ID NO: 14295 - protein, 126 aa, Zea mays
  VARIANT 54: note = Ancestral polymorphism is E, Derived polymorphism is K
  VARIANT 81..126: note = Derived polymorphism lacks residues 81 to 126
MWGLGCVMAELLTAETLFDLETREEMLDEMSKLRDQMASAAGKLDPECLAHLPEGGRDVLTGLLAFRPDERRTGRGGLPDGAGGGGLGWQSATGGGRGGTTWRRRGLSPPWWASWRRRSGIRGGDW

SEQ ID NO: 14296 - protein, 463 aa, Zea mays
  VARIANT 310..463: note = Derived polymorphism lacks residues 310 to 463
  VARIANT 140: note = Ancestral polymorphism is D, Derived polymorphism is Y
  VARIANT 91..463: note = Derived polymorphism lacks residues 91 to 463
  VARIANT 77..463: note = Derived polymorphism lacks residues 77 to 463
  VARIANT 46..463: note = Derived polymorphism lacks residues 46 to 463
MVQQNVRLNRCGKRCCRWTNHLRPNLKKEPFNAEEEEKTIKFHIWWGSKWAMMASHLPGRTYNEIKNYWNTRNRRKQGCGSPLHLEYMLSQVSHKDMDCEIPRESHGKKRSNECSKENVADVQELVDELIVFEHLDYGKDIMFPTRPLKHHASTGSVQIPGDIGKTLNYVMTKNQSMPVGSAIGSGYPVYGGKLSTLGTIFSSIQTEIPSIQSSSYSITFCAPEHEGCSETQAPNLCSGSDVVFDPSQCYPVASFSDLGIPDTPLIAGFLNDIALLPGSTDNEIKNYWNTRKRRKRRCGSPLHPEYMLSQVTHKDMDCETPGESHGKKRSNECSKEKVADVQELVDELIVFEHLDYGKDIMFPTRPLKHHASTGSVQIPGDIGKTLNYVMTKNQSMSVGSAIGNGYPVYGGRLSTSGTIFSSIQMEIPSIQSSSYSPSNDWFALCPSACIEQWIPMECDTISQ

SEQ ID NO: 14297 - protein, 226 aa, Zea mays
  VARIANT 86: note = Ancestral polymorphism is S, Derived polymorphism is L
  VARIANT 96: note = Ancestral polymorphism is Y, Derived polymorphism is H
MTRSHSLPPINRPNPSIVLSRAKAMEKSRVLVVGSTGYIGRRLVRASLAQGHPTLVLLRPEIGLDIDKLQMLPSLEAQGARLVEASLEDHKWGTTYDFQHQNLSAKYGLHCHAHVNGFVPFHFKACASLEEGYIPPLTFVVVQKRHHTRLFPEVHGRHDMTDKSGNILPGTVVDQKICHPTEFDFYLCSHVGIQGTSRLTHYHVLYDENEFTADALQSPTNNLCYT

SEQ ID NO: 14298 - protein, 274 aa, Zea mays
  VARIANT 74..274: note = Derived polymorphism lacks residues 74 to 274
  VARIANT 75: note = Ancestral polymorphism is G, Derived polymorphism is D
  VARIANT 153: note = Ancestral polymorphism is W, Derived polymorphism is S
  VARIANT 185: note = Ancestral polymorphism is L, Derived polymorphism is P
  VARIANT 198..274: note = Derived polymorphism lacks residues 198 to 274
  VARIANT 200..274: note = Derived polymorphism lacks residues 200 to 274
MSRQVQKAKNHHQLALAILVLLFVYWLSYWRWRLPYASADQDLEFELGHVKHFTFHDLQSATDNFNSRNILGQGGFGIVYKGCLRNGTLVAVKRLKDPDVTGEVQFQTEVELIGLAVHRNLLCLYGFCMTSKERLLVYPYMPNGSVADRLRVWDTIGHIAPEYLSTGQSSEKTDVYGFGILLLELITGPKTLSNGHGQSQKGMILDWVRELKEDKRLDKLVDRDLIDSFDILELECSVDVIIQCTQTNPMLRPKMSEILHALEANVTLAETSSS

SEQ ID NO: 14299 - protein, 332 aa, Zea mays
  VARIANT 52: note = Ancestral polymorphism is R, Derived polymorphism is C
  VARIANT 190: note = Ancestral polymorphism is L, Derived polymorphism is S
  VARIANT 192..332: note = Derived polymorphism lacks residues 192 to 332
MVVLVVATTSDPASIGPAAAFLAMPGWSPGPPIAEAMESFTNGNVRLLKHERSIVAEDDLDQRWQEATGESVSEVIFLSKHTAVSKRPALTVHPIGVPHLKEDETPPQGGTPGWAAIPSPRIGPWLRLMQKIAVEQGLVPEFEVTLEATHHGPVTSTPTMFVEIVGRVDYCTIEDILSKIINRRFYGKVLVWRMEMLLELGRGEFGKYHHKGHLSCKLPNCEKVLLGIGGGHYVPRHMDIVIKDGVWVGHLLSGYSLPMDMSSQVNVKSSEEVAGMWKHSIKVSYEATKAAFPGGEVIAHLDHKSFKGWQKNAVTCFLQEQNIRIGKPSDFL

SEQ ID NO: 14300 - protein, 230 aa, Zea mays
  VARIANT 190: note = Ancestral polymorphism is R, Derived polymorphism is T
MVQQSKKKKFRGVRQRHWGSWVSEIRHPLLKRRVWLGTFDTAEEAARAYDEAAVLMSGRNAKTNFPVVPCGRTRGGGGGASSGNNTNASASASASTSTSSLSQSQVLSAKLRRCCKAPSPSLTCLRLDPERSHIGVWHKGAGARADSSWVMTVQLSDKDAAPAPSATSSTATTATAASPPPVVVVDDEERIALQMIEELLGGGGGGGPVSHPHGNGGMLQIAAAGGGLVI

SEQ ID NO: 14301 - protein, 257 aa, Zea mays
  VARIANT 194: note = Ancestral polymorphism is T, Derived polymorphism is N
MPPRKRPPSPPEEPSLASKPRPDAQPSKPDPDSEQSTINPRILAQLPNQERLVYKLIFEAGNKGMWMLDIRKKLLMAPNVATKVVRTLVASGLLKEVSDVRHRSRKIFMATDFQPSAEITGGTWYHDGRLDTDAVTTARRCCQAQVQRLGAATAQMIHQGILKEDPRAGYTIDKVRDIIKTMVLDKVLEEVKSTGAGDFSAVRAGTMCYRLVTGAPQGGMMEGIPCGVCPRIHECSPEGIISPSTCVYYKKWLQMDF

SEQ ID NO: 14302 - protein, 215 aa, Zea mays
  VARIANT 175: note = Ancestral polymorphism is V, Derived polymorphism is L
MAAASFDVAAAGAAGRNLGVHAASRKIGKHGQQERKPVIIYMVSPKVIHVEAHEFLPLVQRLTGPEAGRGDKTKKSSSRPSTSAGGGRRGAGAGVEEPSSEGARNRAKAAAPPVRVRARALNRPAGGPAVSVSVTAATRQQQQQPASPSGLMFHDLSPLRGAALKGEQHQLPLQVSPGWLHHVGDHFLGHGAAATLGSPSASFLDIFGPLSSQQQ

SEQ ID NO: 14303 - protein, 441 aa, Zea mays
  VARIANT 398: note = Ancestral polymorphism is T, Derived polymorphism is M
  VARIANT 346: note = Ancestral polymorphism is T, Derived polymorphism is M
  VARIANT 123: note = Ancestral polymorphism is V, Derived polymorphism is A
  VARIANT 79..441: note = Derived polymorphism lacks residues 79 to 441
  VARIANT 77: note = Ancestral polymorphism is R, Derived polymorphism is C
  VARIANT 3: note = Ancestral polymorphism is E, Derived polymorphism is K
MLEAKPPSPGSSGAAGAAAHIHAHRRWAAPLLASVLLSSILISASLFFSSSRALLLSFSPLPSAASAEPLFVEAKLRQQMRAEERPARGAVPRIAYLVSGSAGDGAALRRTLRALYHPANTYVVHLDLEAPAAERAELAAAVRADPVYARFRNVKVVTRANLVTYRGPTMVANTLHAAAILLREGGDWDWFINLSASDYPLVTQDDLLHVLSELPRQLNFIEHTSDIGWKEYQRAKPVIIDPGLYSLQKSDVFWITEKRSVPTAFKLFTGSAWMVLTHQFIEYCIWGWDNLPRTVLMYYANFLSSPEGYFHTVICNVPEFRNTTVNHDLHFISWDNPPKQHPHYLTLADFDGMVNSNAPFARKFGREDPVLDKIDQELLGRRPDGFVPGGWTYLLNATTEEGRPFAVERVQDLRPGPGVDRLKKLVTGLLTQEGFDDKHCL

SEQ ID NO: 14304 - protein, 370 aa, Zea mays
  VARIANT 111: note = Ancestral polymorphism is R, Derived polymorphism is H
  VARIANT 109..370: note = Derived polymorphism lacks residues 109 to 370
  VARIANT 87: note = Ancestral polymorphism is A, Derived polymorphism is T
  VARIANT 75: note = Ancestral polymorphism is C, Derived polymorphism is Y
  VARIANT 23..370: note = Derived polymorphism lacks residues 23 to 370
MEEVTEGVNNLAITELHKKNEIQVSNTKKPLFSTSTSPSYEPGPAFEEVKEEAMLDISPTDSTQFWLIQWPKDQYYFLMFEILRFQANRILRQKIVEDQFLDLVSVETEVRSVYKELYSIYKTTLKSKSSINKVNQVAQLRIIIKPKSCNGVGPLCTAQQIYYHVLGLVHGIWTPVPQALCQHVEDYIATAKPNGYQSLHTTVIPFLNESMFHLEVQIRTEDMDLIAEIGIAAHYSGRGVVSGPVRPGISSGRNAKGKEICLNNTRFDGRRRDGRDGSRGRGGRGFGNKQSAGTPSAEVHAASRGGRALDPCMGKNSFAFHDTIYFSTPIATMVTVAEILKNNGLAVAKKIMTSTVDVKDGSRAHPIQMP

SEQ ID NO: 14305 - protein, 614 aa, Zea mays
  VARIANT 209..614: note = Derived polymorphism lacks residues 209 to 614
MAAYGGGPWSTVPARSRRAEPIAPSPRGGSRGGGDDRVPGVGELAEAVDGLEIGGDGERRLDKYDMPVDVSGKGAPGPADGFEAAGLAEAVLRNVARCGYESPTPVQRYAMPIVMAGRDLMACAQTGSGKTAAFCLPVVSGLVAPAGGGNGHGPRDRGSFDRVAAKPRALVLAPTRELAAQINEEAKKFSFQTGLRVVVAYGGTPMFSQLRDLEKGVDLLVATPGRLVDLVERSRISLEAIKYLVMDEADRMLNMGFEPQIRKIVDMMNMPKKSVRQTMLFSATFPPEIQRLATDFLHNYIFVTVGRVGSSTDLIDQKIEFVNGGEKRGFLLDILQKQSVGLSKNKQPLTLVFVETKREADSLQYCLQSNGFSATSIHGDRTQQERERALKSFKSGATPILVATDVASRGLDVPNVAHVINYDLPKSIDDYVHRIGRTGRAGKAGKATALFTESNHHLAKDLLELMTGAKQDVPEWLGDYASRPCSGGSSYGGRGRRGGGGFGGRDYRLSSDYGYGGNGGVYSSSGSSYSGGGGGYSSRGGGYSGRGGGYASRGGGYSGGASRGGGYSGGRGDYYRGGSRGGGGSDGSYRQSAPPLPYPSYPRAAADISASGWD

SEQ ID NO: 14306 - protein, 122 aa, Zea mays
  VARIANT 67: note = Ancestral polymorphism is G, Derived polymorphism is R
  VARIANT 49: note = Ancestral polymorphism is S, Derived polymorphism is L
  VARIANT 47: note = Ancestral polymorphism is C, Derived polymorphism is F
  VARIANT 41: note = Ancestral polymorphism is A, Derived polymorphism is V
  VARIANT 23: note = Ancestral polymorphism is K, Derived polymorphism is N
MVDTNIKGTANVLRHFVPLMIEKRHGIIINLSSGWGRSAAAEVAPYCASKWAIEGLTRSLAKELPPGLAAIALSPGVVNTDMLNSCFGSSAALYQTTETWAPKAATMILSLSLDNNGASLTV

SEQ ID NO: 14307 - protein, 866 aa, Zea mays
  VARIANT 834..866: note = Derived polymorphism lacks residues 834 to 866
  VARIANT 338: note = Ancestral polymorphism is V, Derived polymorphism is E
  VARIANT 59: note = Ancestral polymorphism is R, Derived polymorphism is G
MDEHSPEIVPVNSPALDPDPDQEPQSSESGEEGDRGGPRPPESLSDKLPLPPADLNLYGAAVALRLLLLAAFFRYRVAHPARGAPWLWLAALACELCLALAWLLAQLPKLSPTSRETHLDRLASRYDKDARLGSVDVLVTAAGAGAEPPLAAANTVLSVLAADYPARRLACYVSDDGADLLLFEALFDAAGFARRWVPFCRRHAVEPRAPELYFARGVDYLRDKAAPSFVKERRAMKRAYEELKVRMNCLAAKARKVPEDGWVMSDGTPWPGNNTRDHPAMIQVLLGHPGDQDAEGNELPRLLYVSREKKPGFQHHTKAGALNALLRVSALLTNGSYVLNLDHDHCVANSGVLREAMCFLMDPESGNRTCYVQFPLRMGVNDDGGETRATRDSVFFDASDQSELCTLQRCPPSRLTLTHAFLTLGWGSDRHEVPGRHPGPGVRRLRLLHQQEGAVRAAVVCTARALTVGIAGRRRRLRSYRAALERHFGNSPAFIASAFASQERGGDTSAAADASCLLREAIHVVSCAYEARTRWGKDVGWMYGSGGGGGVVTGFRMHARGWSSAYCAPARTAFRSFARASPADVLASASKRAVAAMGVLLSRHCPVWAGAGGSLRFMQRLGYVSCVAYPLASIPLTVYCALPAACLLTGKSIFPDDMGFYDAVVVILLLSSVVATVALELRWSGVTLRAWWRDQKLWAVTGTSACLAAVFQGILRSCAGIDVCFSSTYTETAATRTSSSTSDDDSGAAGEEPSDAQKSVLRWSNLLIPPASLLLGNLAGVVVAVSYGVDHGYRSWGPVLVKLALALWVVAHLQGFFRGLLARRDRAPTIAVLWSVLFVSVLSLLWVNVDSYSAPPAQSTLQQPVL

SEQ ID NO: 14308 - protein, 370 aa, Zea mays
  VARIANT 58: note = Ancestral polymorphism is M, Derived polymorphism is T
MRFLKGSKVEVLQEADVPFGSWRPGEIVSGNGHAYFVRYDESPVDSSVAVERVPRRLMRPRPPADDPVRWSLGSIIEAFDSYSWKVAEVVRVLGKNQYLVRLLGSSLELSAHASVLRMRKLWLDDIWIVTQKYSARCLDGGAFRGQSKDKNLDHNFRMDSRQLENQNAFEGDTSRGIKRKSSAISTHPQCSEITKRLRTPNRDGRYSKLVDRSFSPLAEKVDDVDSPCIILRGKCIHAGHKWHTGTTEEFSDTESISSSVGSSSPNSTPHRSQHYNLVYQSGDSCSRTDDDEASTSERETSEHDNNGSREETHVLELHAYRATMLALHACGSISWEQEALLTNLRLTLNISIDEHLAELRSLVTRAVTSR

SEQ ID NO: 14309 - protein, 532 aa, Zea mays
  VARIANT 26: note = Ancestral polymorphism is Y, Derived polymorphism is C
  VARIANT 35: note = Ancestral polymorphism is A, Derived polymorphism is S
  VARIANT 36: note = Ancestral polymorphism is A, Derived polymorphism is T
  VARIANT 68: note = Ancestral polymorphism is G, Derived polymorphism is C
  VARIANT 95: note = Ancestral polymorphism is P, Derived polymorphism is L
  VARIANT 96..532: note = Derived polymorphism lacks residues 96 to 532
MPLRDCNVLIRTLARRGSFSRVMAVYYDLRARGLAADSYTYPFVLMAISTMKLSVEGRKVHAAAVKTGFRWDAYTTCSLMEMYTMLGRRVFDKMPQRFLVLWNMMMSYKEKRSCQHNDDSKGEQEKPFLSESCLPFIDNEGPYACIGMKALKIHVPIGYTAKDSRYLNRWLQIAITHGIEELELIFPFMAKYKFPYSLLPMSGDSIKCLELSCCSFCPTSKFGWLKNLTKLCLDGVFIEGDELERLVFSALALERLEIRYCDRIVCLKVPSMLQRLTYLEVYDCDKLRVLDIDAPNITCFNFGRHHTKTKLSIGGGVSKIKELSACFDDAVYYVRVELPSMMANLETLTINSMVEMNIPMLPSKYLHLKYLKISLAAYTFPSTFDYFSLASFFDACPSLEAFFLDAYQRKMKHVSIITNPLVLRGTPEQRHHKLKTVEMNGFTSAKSLVELACHIAQCATSLQSLKLEVHQSDFKCYIPANKHNKCSPLPVEVLMESRRAHLAIMTYIEPIIPSTVKLQVVGPCSRCHALEQ

SEQ ID NO: 14310 - protein, 731 aa, Zea mays
  VARIANT 54: note = Ancestral polymorphism is R, Derived polymorphism is M
  VARIANT 178..731: note = Derived polymorphism lacks residues 178 to 731
MATTCHHAMPLRDCNVLIRTLARRGSFSRVMAVYYDLRARGLAADSYTYPFVLRAIGTMKLSVEGRKVHAAAVKTGFRWDAYTACSLMEMYTMLGRADSARRVFDEMPQRFLVLWNMMMRCYIRCGRFTAAVALAVQMESGGATPDRVTLVTAVTACSRAGDLNLGRRIHSYMDGVFGFSLPVANALLDMYTKNGYLEEAVKMFEQMPERNIISWTILVSGYGIAGQLDKARVFFYQCTQKDLILWTSMINACVQHGSFEEALILFRDMQLQRVEPDKFTVVTLLTCCANIGALDQGEWIHQYAESRNMKIDAVLGTALIEMYSKCGHVDKSLQIFGRMQGKDAAAWTAIICGLATNGQASKALELFEEMQRSKTKPDGITFIGVLSACCHGGLVDEGQRYFQAMKEVYHIEPRIEHYSCLVNLLGHAGLLYEAEKLITDMPVNNDTMPLFGALLTACKANGNVEMSEWLTKRIAKEDCSPNPDVNVLMSNVYATASRWEEAIRVRSKMTNPAVKKTAGCSMIEIRTTGKLDGKLEREFESEADILDNVRHNNIIRLLCCLSGAEAKLLVYDYMDNESLDKWLHDDALAAGEHPMAARARSARRQRLDWPTRLKVAVGAAPGLCYMHHECVSPIVHRDVKTSNILLDSEFQAKVADFGLARMLAQAEAPETMSVVAGSFGYMAPVDFISSHFLSVRFWPLQIARTGLLSKLRFHFFWINLKLGFLGERRVG

SEQ ID NO: 14311 - protein, 70 aa, Zea mays
  VARIANT 1: note = Ancestral polymorphism is M, Derived polymorphism is T
  VARIANT 3: note = Ancestral polymorphism is P, Derived polymorphism is L
  VARIANT 54: note = Ancestral polymorphism is T, Derived polymorphism is I
MVLEKKVREWCASKGDIPYFETSAKEDHNIDTAFLCIARLALEHEHDQDIYFKTVAEQVPDTKQTSGCAS

SEQ ID NO: 14312 - protein, 966 aa, Zea mays
  VARIANT 328..966: note = Derived polymorphism lacks residues 328 to 966
MLEVVLDMTPPPPPPQARLHQGSSAKGGHAERRKQPLQSSVTQPKAEPAAAAAVLPVPEGGKRCRGGGRRRGRAKAPGEPRAALLAPAQAQTQAPPPRTVIGPPVPSKGLSFCRRPGFGTVGARCVVKANHFLAELPDKDLTQYDVKITPEVSSRTVNRAIMAELVRLYRASDLGMRLPAYDGRKNLYTAGTLPFDAREFVVRLADEDDGSGVPPREREYRVAIKFAARADLHHLRQFIAGRQADAPQEALQVLDIVLRELANQRYVSIGRSFYSPDIRKPQRLGDGLQSWRGFYQSIRPTQMGLSLNIDMSSTAFIEPLPVIEFVAQILGKDVISRPLSDANRIKIKKALRGVKVEVTHRGNVRRKYRISGLTTQPTHELIFPIDEQMNMKSVVEYFKEMYGFTIQHPHLPCLQVGNQKKANYLPMEACKIIEGQRYTKRLNEKQITSLLKVTCQRPREQEMDILQTVHQNDYEQDPYAKEFGINISEKLTSVEARVLPAPWLKYHDTGKEKECLPQVGQWNMVNKKVINGCKVSHWACINFSRSVPETTARGFCQELAQMCQISGMEFNSEPVMPIYSARPDQVVKALKNVYNIALNKLKGKDLELLLAILPDNNGQLYGDIKRICETDLGLISQCCLTKHVFKISKQYLANVSLKINVKMGGRNTVLLDAISWRIPLVSDIPTIIFGADVTHPETGEDSSPSIAAVVASQDWPEVTKYAGLVCAQAHRQELIQDLYKTWHDPQRGTVTGGMIRELLISFRKATGQKPLRIIFYRDGVSEGQFYQVLLYELDAIRKACASLEPNYQPPVTFVVVQKRHHTRLFANNHKDRSSMDKSGNILPGTVVDSKICHPTEFDFYLCSHAGIQGTSRPAHYHVLWDENNFTADEMQTLTNNLCYTYARCTRSVSVVPPAYYAHLAAFRARFYMEPEMLDNQTSKTSNGTSGVSVKPLPAVKEKVKRMMFYC

SEQ ID NO: 14313 - protein, 198 aa, Zea mays
  VARIANT 159: note = Ancestral polymorphism is G, Derived polymorphism is D
  VARIANT 146: note = Ancestral polymorphism is A, Derived polymorphism is T
  VARIANT 100: note = Ancestral polymorphism is V, Derived polymorphism is A
MQQDLRNSERRNPEQAHPVMSASSTNSAASPAVSGLDYDDTALTLALPGSSAEPAADRKRAHADHDKPPSPKARAVGWPPVRAYRRNALRDEARLVKVAVDGAPYLRKVDLAAHDGYAALLRALHGMFASCLVAGAGADGAGRIDTAAEYMPTYEDKDGDWMLVGDVPFKMFVDSCKRIRLMKSSEAVNLSPRTSSRQ

SEQ ID NO: 14314 - protein, 419 aa, Zea mays
  VARIANT 274..419: note = Derived polymorphism lacks residues 274 to 419
MAASIAASPFFPGSPAPAAPKNGLGERPESLDVRGVAAKPGASSNAVRAGKTRAHAAVPKVNGGKSAVADVEHETVTVPSSVPRTFYNQLPDWSMLLAAITTIFLAAEKQWTMLDWKPRRPDMLTDTFGFGRIIHDGLMFKQNFSIRSYEIGADRTASIETMMNHLQETALNHVKTAGLLGDGFGSTPEMSKRNLFWVVSQMQAIVERYPCWGDTVEVNTWVSANGKNGMRRDWHIRDSMTGHTILKATSKWVMMNKLTRKLARIPDEVRTEIEPYFVGRSAIVDEDNRKLPKLPEGQSTSAAKYVRTGLTPRWADLDINQHVNNVKYIAWILESAPITIFENHELASIVLDYKRECVRDSVLQSHTSVHEDCNIESGETTLHCEHVLSLESGPTIVKARTMWRPKGTKAQETAVPSSF

SEQ ID NO: 14315 - protein, 60 aa, Zea mays
  VARIANT 42: note = Ancestral polymorphism is D, Derived polymorphism is E
MMAKKLPVLLRYQCLHVHTYFKNSRPSEKLKEGEDIYIYQGDKSFCYEDDHRVLVCEFIL

SEQ ID NO: 14316 - protein, 478 aa, Zea mays
  VARIANT 191..478: note = Ancestral polymorphism lacks residues 191 to 478
MLPRPQRACRLLTILIAPAIRARRQDHHRAMGIFTVTKLSEGPVRPSADTPSETLPLAWVDRYPTHRGLVESTHIYCCDDVAKTLLLPAAPAEGDADALAPTKKEVITKKSPAAVVRAALADALVHYYPFAGRIVEDVPGRPAVLCSAEGVYFVEAVANCTLADVNFLERPLLLAKEQLVPCPTPELWPVLPHNSLAMIQVTAFTCGGFVVGLRTNHAVADGTGAAQFLSAVGDLARGLPEPRVRPVWGRDRFPDPDIKPGPLPELPALALEYIAFDFPTAYLDELKSQYAASTGGKFCSGFDIVIAKLWQCRTRAIAAALGPDDVRLCFFASVRHVLKLEPGYYGNAIFPVKVCAPAEKVAGSSVVELVGMVRDAKRRMAEECLRWAEGRTGGVDPFQMTFNYESVYVSDWSKLGFADVDYGYGTPMSAGPLVNCDLIASVIVMRAPAPLAGTRLLASCVTKEHADDFACRMREDLV

SEQ ID NO: 14317 - protein, 383 aa, Zea mays
  VARIANT 189: note = Ancestral polymorphism is G, Derived polymorphism is D
MGDLIPGLPDEVARECLVRVGFDQLPVVRRISRQWKSEVESPDYHRQRRAEGLARPVLALVQAQPTAPPDDDDDAGPAHKRSTAANSYRLVLLEPAEGRWTPLPPPPGPSQSLPLFCQVAAAVDGGGQGRKRLLVVVGGWDPETWAPTDAVLVYDFLSGAWRRGAPMPGPRRSFFACAAVGGAVYVAGGHDAEKNALRSALAYDPGADAWAGLPDMAEERDEPRGLCVAGRFVVVGGYPTRAQGRFVASAESFDPAAAASPAWGWAPVHDRLLPEDGACPRTCCAAPRSVGRMYMLRDGHLVARDGAAAWRPVARVPDDALTAPAVSAFPDGRVVVVGSGCHGGDQTVYVLREEGGRPASWSRAPPPPPEFAGHVQASCFLEL

SEQ ID NO: 14318 - protein, 354 aa, Zea mays
  VARIANT 178..354: note = Derived polymorphism lacks residues 178 to 354
MATSGEQSAGGACEGSAARASKLRYPLRSASKGKAAAVSPAADAPPTTISAPRRVKPSSDVSKSMCLDLSVKDKSVKPPRRHSIQTKPGASPRPIPSGTVTPVSGVRSKRSDGQGRFDTPTSEVSMSMSRRKFSTLSSISYWMTQIRLAEAASKHSVSLGFFKLALESECEPLDRMREELKSYVVRHCLATELEDPVKDILQVYDIVDDFEKLKISAEPSEQQKKSEKAARNVSNVSANCNLKPRSLNSGATESKEAGKKEGIQKAKPDARVRGSNNRNPVKCTTAKEVVAKNTGKKTKKEAKGQEEVSNGDSDASSALPDQESVDVVKEITHEDKENMDENEMAMDVAIAQEF

SEQ ID NO: 14319 - protein, 81 aa, Zea mays
  VARIANT 60: note = Ancestral polymorphism is G, Derived polymorphism is C
  VARIANT 43: note = Ancestral polymorphism is S, Derived polymorphism is F
  VARIANT 20: note = Ancestral polymorphism is L, Derived polymorphism is Q
  VARIANT 15: note = Ancestral polymorphism is P, Derived polymorphism is A
  VARIANT 14: note = Ancestral polymorphism is P, Derived polymorphism is A
MLDLSNNSFSGPIPPEIGALSNLGISLDLSSNRSVGELPDEMSGLTQLQSLSLASNGLCGSISILGELTSLASLNISYNNS

SEQ ID NO: 14320 - protein, 187 aa, Zea mays
  VARIANT 82: note = Ancestral polymorphism is S, Derived polymorphism is P
  VARIANT 81: note = Ancestral polymorphism is R, Derived polymorphism is K
  VARIANT 74: note = Ancestral polymorphism is A, Derived polymorphism is T
  VARIANT 64: note = Ancestral polymorphism is A, Derived polymorphism is T
  VARIANT 35..187: note = Derived polymorphism lacks residues 35 to 187
  VARIANT 29: note = Ancestral polymorphism is T, Derived polymorphism is M
  VARIANT 1: note = Ancestral polymorphism is M, Derived polymorphism is I
MILNQSSNKSTTNTSCTCSRCFPPHSVVTKCVNRRLIKISPLACEPATNKKVSIYWTYVHVHAALHKICIGYIALLSDLLRSGVQRLPHLGYQMDYISKTEPFYVCMILNEILGDRERIQSLYSEIPGRTTSNASTSRRTSNFSVDATGDESLSVEAHNCILDNTASILSMRSCADKLWKRRKGSKL

SEQ ID NO: 14321 - protein, 340 aa, Zea mays
  VARIANT 291..340: note = Derived polymorphism lacks residues 291 to 340
  VARIANT 294..340: note = Derived polymorphism lacks residues 294 to 340
MAAARRGRADGANGVVRPRPRDRVVGVSGSMAGRVAVLAFCVAGIWSAYIYQGVLQETLSTKRFRPEARRFEASSTLRSSTSRRMSYASSVIKLWSSGSGSSSDGRAPLSKYWGVSVTNTIGPTMGIEALKYINYPAQVLAKSSKMIPVMLMGTLLYGVKYTLPEYFCTFLVAGGVSSFALLKFAPSHILDDTGINKLQETKTVKKLANPNAPLGYTLCFLNLAFDGYTNSTQDLIKSRYPKTNPWDIMLGMNLWGTIYNAVVMFVAPLLFSNWPYADGFEALRFCQENPEVAWDIFLFCLCGAVGQNYIFLTISRFGALTNTTITTTVFLFYCPESNLL

SEQ ID NO: 14322 - protein, 420 aa, Zea mays
  VARIANT 7: note = Ancestral polymorphism is W, Derived polymorphism is C
  VARIANT 96..420: note = Derived polymorphism lacks residues 96 to 420
  VARIANT 143..420: note = Derived polymorphism lacks residues 143 to 420
MEEGFRWSTPCSLVLYSVFLLLSATASEANIGDFDDYWQQRKLMADAAAEATYKHDPLEEDTSTRREMMEQKKSKLSGPCTATNPIDRCWRCRQDWATDRKRLARCAKGFGRNTTGGLAGKFYVVTDGTDDDVVNPRPGTLRWGVIQIEPLWITFAKTMIITLKEELIIRGDKTIDGRGAQVRIANGAQLTVQFVNNVIIHNIHINDIVSSNKNGGYVRDSADHFGWRIVSDGDGVTVFGSTNVWLDHLSLSNCQDGLIDVIAKSTGVTISNCHLTNHNDRHALQLQRQAPRGPEDAEVPLGLLPRGQQRVNDYTHWLMYAIGGSKAPTIISQGNRYIAPPNFAAKQVTKQHDAPESEWKNWAWHSENDLFMEGAYFTVTAGQINRQLNKKDLIKPKPGSYVTRLTRYAGSLACRPGEPC

SEQ ID NO: 14323 - protein, 225 aa, Zea mays
  VARIANT 19: note = Ancestral polymorphism is F, Derived polymorphism is L
  VARIANT 43: note = Ancestral polymorphism is G, Derived polymorphism is A
  VARIANT 49: note = Ancestral polymorphism is I, Derived polymorphism is S
  VARIANT 98: note = Ancestral polymorphism is A, Derived polymorphism is G
  VARIANT 143: note = Ancestral polymorphism is G, Derived polymorphism is D
  VARIANT 147: note = Ancestral polymorphism is D, Derived polymorphism is Y
  VARIANT 153: note = Ancestral polymorphism is G, Derived polymorphism is S
MAGETKKGLVLLDFWVSPFGQRCRIALAEKGIAYEYSEQELLGGAKSDILLRSNPVHKKIPVLLHDGRPVCESLVILEYLEEAFPEASPRLLPDAAYARAQARFWAAYSDKVYEAGTRLWKLRGDARAQARAEIVQVVRNLDGELGDKAFFGGEAFGFVDVALVPFVPWLPSYERYGDFSVAEIAPRLAAWARRCAQRESVARTLHPPEKVDEFINLLKKTYGIE

SEQ ID NO: 14324 - protein, 110 aa, Zea mays
  VARIANT 49..110: note = Derived polymorphism lacks residues 49 to 110
MNRGETSDDPSKIRGETLSSGDPLTLPLTYICTECSYGKVNSWVWGLLREKILSFSSTPGGADTPARITGDGYKNGGEVKSTRRHSGMNVDPSGRDNHSGPGRGGDTSLS

SEQ ID NO: 14325 - protein, 293 aa, Zea mays
  VARIANT 169: note = Ancestral polymorphism is H, Derived polymorphism is Y
  VARIANT 242: note = Ancestral polymorphism is T, Derived polymorphism is I
  VARIANT 246: note = Ancestral polymorphism is P, Derived polymorphism is S
MEIPMIKMDQLHGEKRSETLSLLHNACAQWGFFWLENHGVDEDLMSKMKGLVNKHYEQDLEKNFYSSENAKILGCEKVPSNVDWECSFMYRHQPESNSHDIPELLRAMVSEYAEEVIKLAEQLAAAMSENLGLDKGYIEKAFSKPSVGVKVAKYPRCSHPELVMGLREHTDAGGIILLFQDELIPGLEFLKDGRWMAVPPTQGNRILVNLGDQIEVITNGTYKSICHRVLPNKNGSRLSIATFYNPGADAIICPASKLTYPSQYRFQDYLDFYSTAKFTDKVFRFQTTKAILK

SEQ ID NO: 14326 - protein, 248 aa, Zea mays
  VARIANT 125: note = Ancestral polymorphism is P, Derived polymorphism is R
  VARIANT 138: note = Ancestral polymorphism is F, Derived polymorphism is L
MICSATGCSPTRCSSSKLAPRLVRLVHDCPPNVVSILAIEVEPLDDKKRKKLKHALLLRKLYIFMKIIGCQALLIKWSCFYDKHGSIFNHEPPIFKHIRGMTAIIKKSDISIKYKETLVALYLYPFLNTVYKTREYEFLRLTSLGVIGALVKGMIILNHEMDDDRIECLHLKKVVLKGYRGQKHQTQLDIFLVSYVGFYMFSTDSPRPVIVGVVLQLILLRRAHGAAWQRRWRRGATTIEDRRGEGRR

SEQ ID NO: 14327 - protein, 147 aa, Zea mays
  VARIANT 32: note = Ancestral polymorphism is A, Derived polymorphism is T
  VARIANT 36: note = Ancestral polymorphism is R, Derived polymorphism is Q
  VARIANT 145..147: note = Derived polymorphism lacks residues 145 to 147
MESLLISSSMNLHVVTYRETTLLFDEMHSAAANKQRVAVVVAHELAHQWFGNFVTMEWWTHMWLNEGFATWVSYLAADQFFPEWNVWTQFLEESTIGFKLDALAGSHPIEVTKFFVTLQCYDHICALWEFTDVYITFLVNLDVRCID

SEQ ID NO: 14328 - protein, 417 aa, Zea mays
  VARIANT 35: note = Ancestral polymorphism is E, Derived polymorphism is V
  VARIANT 73: note = Ancestral polymorphism is Y, Derived polymorphism is C
  VARIANT 137: note = Ancestral polymorphism is S, Derived polymorphism is L
MALVLHSGAGNKNAFKALIAAEYSGIKVELTKDFEMGVSNKTPEFLKMNPLGKVPVLETPDGPVFESNAIARYVARLKDDNPLFGSSRIEQAHVEQWMDFAATEVDPGVAWYLYPRLGYLPYVSTTEETAISSLKRSLGALNTHLASNTYLVGHAVTLADIVMTCNLYHGIARILTKTFTSDFPHVERYFWTMVNQPNFKKVIGEVKQAESAPPIPKKAAPSKEPKAKDVKKEAPKEAPKPKVVEAPAEEEAPKPKPKNPLDLLPPSKMVLDDWKRLYSNTKTNFREVAIKGFWDMYDPEGYSLWFCDYKYNDENTVSFVTLNKVGGFLQRMDLCRKYAFGKMLVIGSEPPFKLKGLWLFRGQDVPKFVMDEVYDMELYEWTKVDISDEAQKERVNAMIEDQEPFEGEALLDAKCFK

SEQ ID NO: 14329 - protein, 485 aa, Zea mays
  VARIANT 43..485: note = Derived polymorphism lacks residues 43 to 485
  VARIANT 62: note = Ancestral polymorphism is G, Derived polymorphism is R
  VARIANT 295..485: note = Derived polymorphism lacks residues 295 to 485
  VARIANT 330..485: note = Derived polymorphism lacks residues 330 to 485
  VARIANT 363..485: note = Derived polymorphism lacks residues 363 to 485
MATHDRGPRPCHLLILIAAAALYFASSPASLPITSRSEGISVGFAFWIPCSGGLDNYIFFWGNMFLAIKNNVENLGEVLRGDHIENSVYNFKMRRDESCKVVCRTQLSQEAAKNFKEKINDEYRVNICGTNADPGRKPNTKHGYRVGYKLKDDKYYINNHLSFKVLYHEDQTSPDARIVGFHVIPSRYAIFHDQLLSSVSKILFSYYLHLVSYFHLPMKYGVIYIYNSFVLICYNIKHEYGAWDDNNPTVQTCNANIKVTPGSHTPQEVAPDADVVFSYVSTFKDITNYNQLDDQDEAQEETGWKLVHGDVFRAPVHSSLLCVYAGTSVQFFGMTLLTMMFALLGFLSPANRGGLMTAMVLFWVFMGVLAVPFGTMFALFLLWFGISVSLVFVGSFLGFKQLAIEDPVKTNKIHRQITEQAWYLQPVFAILASGILPFGTVFIELFFILTSIWLNQFYYIFGFLFKVFVVLVVTCVEITIVICYF

SEQ ID NO: 14330 - protein, 226 aa, Zea mays
  VARIANT 60: note = Ancestral polymorphism is D, Derived polymorphism is N
  VARIANT 220: note = Ancestral polymorphism is G, Derived polymorphism is D
MQGDPGYGGYGYGYGYDVAGNGGGGGYYPANDRYPAAAYEDPLAGRRQPLLTGLEFEPSDTCPRNYVIFDQTYDRSRVMYHPSLPADNFDHQGYYSGESAYHGGGGSGGSVRQKEDTDEIDALMSTEDGGGDDDEDDVLSTGRTPGCRAAGSPDSTCSSGGGRKHEAPAGGEKKKERVKKMVRTLKGIIPGGDRMDTPAAVLDEAVRYLKSLKVEVNKADARGSGS

SEQ ID NO: 14331 - protein, 76 aa, Zea mays
  VARIANT 16: note = Ancestral polymorphism is P, Derived polymorphism is S
MAAKAISSPVPVEWYPTLAVVMVSVGLMFTASFFIYEATSSKRSRSLAKEITTAAVASVLLGFGSLFVLLASGVYV

SEQ ID NO: 14332 - protein, 409 aa, Zea mays
  VARIANT 57: note = Ancestral polymorphism is A, Derived polymorphism is T
MPLLEEMMESSYIRTYLQQMAAASVSTASCDPSSGADEVECRDEAAALRLKMVFVVAILVAGATGVAIPLVGRRCHGHGASSSSSTGGAFVLVKAFAAGVILATGFVHMLHDADEALTDPCLPAAPWRRFPFPGFVAMLAALGTLVFDFVGTHMYERKKHHADAEEAAVVVGNASASANASGHDVIVALLQDGALVASTGSSIGRDGGGHKDPMHIVGMHAHAAAHRHSHAHGHGPCDDCHDGHDEEPSQARHVVVSQILELGIVSHSVIIGLSLGVSQNPCTIKPLGAALSFHQFFEGFALGGCISEAQFKSFSALLMAFFFAITTPAGITVGSGIASFYNPNSPRALVVEGILDSISAGILIYMALVDLIAADFLSKRMSCNLRLQVGSYIALFLGAMAMASLAIWA

SEQ ID NO: 14333 - protein, 1218 aa, Zea mays
  VARIANT 256..1218: note = Derived polymorphism lacks residues 256 to 1218
  VARIANT 141..1218: note = Derived polymorphism lacks residues 141 to 1218
  VARIANT 88..1218: note = Derived polymorphism lacks residues 88 to 1218
  VARIANT 83..1218: note = Derived polymorphism lacks residues 83 to 1218
MGRSGRRRRDRVRWSNLYTFSCFRAQQEHAGDAGPSSDGAGAVGGPGFSRVVYCNNAALQKPLKYITNYITTTKYNIITFFPKAIFEQFRRVANLYFLLTAILSLTPVCPFSPVSMIAPLAFVVGLSMMKEGLEDWRRFIQDMKVNNRYVSTHKGDGEFDYRHWEDLCVGDVVRVEKDQFFPADLLLLSSSYEDGICYVETMNLDGETNLKVKRSLEVTLPLEEDESFKDFQAVIRCEDPNPSLYTFTGNFEYERQVYALDPSQILLRDSKLRNTAFIYGVVIFTGHDSKVMQNSTESPSKRSRIEKKMDLIIYILFTVLVLISLISSIGFAVRIKLDLPRWWYLQPEKSNKLDDPSRPALSGIFHLITALILYGYLIPISLYVSIELVKVLQAHFINQDIHMFDEDTGNTAQARTSNLNEELGQVHTILSDKTGTLTCNQMDFLKCSIAGVSYGVGSSEVERAAAKHMASGADDHDIPLQDIWEENNDDEIELVGVNFSVGTNIKPSIKGFSFVDDRLMQGNWTKEPNSSTILLFFRILALCHTAIPEINEATGSIAYEAESPDEGAFLVAAREFGFEFFKRTQSSVFVREKHTSSKDTVEREFKILNLLEFSSKRKRMTVILQDEDGQILLFCKGADSIIFDRLAKNGRMYEVDTTRHLNDYGEAGLRTLALSYRVLDESEYSLWNAEFLKAKTYIGPDRELQLERVSELIERELILVGATAVEDKLQKGVPQCIDRLAQAGLKIWVLTGDKMETAINIGYACSLLRQGMKQICLSIPTGEQVAQDAKKVAKESLLSQIANGSQMVKLEKDPDAAFALVIDGKALAFALEDDMKHMFLNLAIECASVICCRVSPKQKALVTRLVKEGIGQTTLAVGDGANDVGMIQEADIGVGISGVEGMQAVMASDFSISQFRFLERLLVVHGHWCYKRIAQMICYFFYKNIAFGLTIFYFEAFAGFSGQSVYDDWFMLLFNVVLTSLPVISLGVFEQDVSSEICLQFPALYQQGPKNLFFDWYRILGWMGNGLYSSLAIFFLNLCIFYDQAIRVGGQTADIAAVGTTMFTCIIWAVNMQIALTMSHFTWIQHLFVWGSITTWYLFILAYGMTLRSGDNYQILLEVLGPAPIYWAATLLVTAACNIPYLIHISYQRSCNPLDHHVIQEIKYLKKDVEDQTMWKRERSKARQKTKIGFTARVDAKIKQIRGKLHKKGPSLTIQTVS

SEQ ID NO: 14334 - protein, 349 aa, Zea mays
  VARIANT 54: note = Ancestral polymorphism is R, Derived polymorphism is G
MDLELEAAGSGGNGTRAVSLSVDSPTAELGRGDLGGSGGPSQDRTVSRRHVSLRLLGVGDGIAFEVVGRNPVVVRSPDGGGGGGSGTSRVFRRGEKGELRAGDALSLSLKAPAFWAVRAREGNGDGDADVDVEPAVLDAVARRERRTRERKERERERRVAEETMEVTEEEEGAAVDSDVEGFDIDLAAIDPVREFGFLSMGHEFDSYPKGRIRAPKDWNWFLEEAKRTSDDEASGKRRSRSKVLGWNKKKKDGEGEDEDWTGESEDEKESTGRVTSVKRPKYATRSKSSEKYSRENSKTGSGRSIDEDDGTEDEQDETLGGFLVNDEDDEPAEELSDEEEEFDDEEDDD

SEQ ID NO: 14335 - protein, 42 aa, Zea mays
  VARIANT 8: note = Ancestral polymorphism is V, Derived polymorphism is M
  VARIANT 19: note = Ancestral polymorphism is W, Derived polymorphism is C
MMTPVRSVRTRIIPSGRSWCRTVCARHSLNMRNTKSKQESSK

SEQ ID NO: 14336 - protein, 69 aa, Zea mays
  VARIANT 56: note = Ancestral polymorphism is R, Derived polymorphism is G
  VARIANT 55..69: note = Derived polymorphism lacks residues 55 to 69
  VARIANT 45..69: note = Derived polymorphism lacks residues 45 to 69
  VARIANT 43..69: note = Derived polymorphism lacks residues 43 to 69
  VARIANT 41: note = Ancestral polymorphism is W, Derived polymorphism is L
  VARIANT 32: note = Ancestral polymorphism is Y, Derived polymorphism is N
  VARIANT 21: note = Ancestral polymorphism is A, Derived polymorphism is T
  VARIANT 7: note = Ancestral polymorphism is A, Derived polymorphism is V
  VARIANT 6: note = Ancestral polymorphism is K, Derived polymorphism is N
MLQEAKAYAQENGLFFMETSAKTATNVNDVFYEIAKKLLQWQQVQNPQGGMVLNQRPPERMVSSSSCCA

SEQ ID NO: 14337 - protein, 88 aa, Zea mays
  VARIANT 56..88: note = Derived polymorphism lacks residues 56 to 88
  VARIANT 51: note = Ancestral polymorphism is G, Derived polymorphism is C
  VARIANT 44..88: note = Derived polymorphism lacks residues 44 to 88
  VARIANT 42: note = Ancestral polymorphism is R, Derived polymorphism is H
  VARIANT 41: note = Ancestral polymorphism is W, Derived polymorphism is C
  VARIANT 4: note = Ancestral polymorphism is L, Derived polymorphism is M
MVLLQHQQLQQQRQQLEEEDEVLVVATSVLSPDAEKRSGMWRSQRDLNPGGRSPVQICDPPFSTLQIVAVDATEEGLQVSKSTTTTAH

SEQ ID NO: 14338 - protein, 700 aa, Zea mays
  VARIANT 429..700: note = Ancestral polymorphism lacks residues 429 to 700
MLTRRRSNHPGCSFPLPFLVCGLLLAAAVAFSPAAAAEAADGGAGHEGRAGKPEVEAEAEARGDGVAVAEAGGEVVAQGNATEAKEGSLADMIDRALEKEFPESEGEQGGGETDPGSFNNTVAEKQGVLETVARRVTKKNETKDNKSFPFKEVFLDRTEQEDVPTLIDRKDNVFIISNPKSKYPVLQLDLRLISDLVVVIVSATCGGIAFACLGQPVITGYLLAGSIIGPGGFSFVNEMVQVETVAQFGVIFLLFALGLEFSTAKLRVVRAVAVLGGLLQIMLFMFLCGILATLCGGKTKEGVFVGVLLSMSSTAVVLKFLMERNSINALHGQVTVGILILQDCAVGLLFALLPILSGTSGLLHGVASMMKSLVVLITFLTILSILSRTGVPWFLKLMISLSSQTNELYQLAAVAFCLLFAWVSFYCSYIDFDLAYGPIFLYFIIKTVFVKDLKCSDKLGLSLELGSFAAGVMISTTDLAQHTLEQVTFYMYLACLFFLQIEPIRNFFAALFLASIGMLINVHFLWNHVDILLAAVILVITVKTFIVAIVVKGFGYSNKTSLLVGMSLAQIGEFAFVLLSRASSIHLIEGKLYLLLLGTTALSLCLVLSQMVQKSDNPSAIQNDPCNGPPRGSFEMVFCRYQSGGGTRSYQLSSLMDCFTLECLPINSSVLPFQLGLKNDVLRIDSGKRINLIVQGSHDS

SEQ ID NO: 14339 - protein, 137 aa, Zea mays
  VARIANT 87: note = Ancestral polymorphism is A, Derived polymorphism is S
MADSKAAAAVTLRTRKFMTNRLLSRKQFVLEVIHPGRPNVSKAELKERLAKIYEVKDPNCIFVFKFRTNFGGGKSTGFGLIYDNLEAAKKFEPKYRLIRNGLATKVEKSRKQMKERKNRAKKIRGVKKTKAGDAKKK

SEQ ID NO: 14340 - protein, 123 aa, Zea mays
  VARIANT 69..123: note = Derived polymorphism lacks residues 69 to 123
MESSTGVCRARRTSGVATSALVASPTSLRGHLPGQVHLRRGGLGLGRQTCRPPRACARPGPPGGLGLGQSVAGPAAGLHEYVPTLRMTTTEKTERTTAPHHFPPRTSPTPARCSTGRRSSSQL

SEQ ID NO: 14341 - protein, 228 aa, Zea mays
  VARIANT 112: note = Ancestral polymorphism is G, Derived polymorphism is R
MAVMAGPFLAMASNAAVSASANSTGNGEVKRRRRTSSTNALQRTASDVSAYELHHHHHGVVTNKDEKAEAEQQQPAVPEASPVLQHAKCECCGMSQECTPEYIRGVRARFAGRWVCGLCAEAVTEEADKKKGGPLEEALKAHMGVCKRFNGFGRTHPVLFQAEAMREILRRRATATLGPRSRSSINPREVNREVAKAAGTGISRSSSCMTFIADHDFNHRASSSINKN

SEQ ID NO: 14342 - protein, 365 aa, Zea mays
  VARIANT 5: note = Ancestral polymorphism is R, Derived polymorphism is I
  VARIANT 98: note = Ancestral polymorphism is G, Derived polymorphism is R
  VARIANT 99: note = Ancestral polymorphism is R, Derived polymorphism is Q
  VARIANT 133: note = Ancestral polymorphism is G, Derived polymorphism is R
MARPRLPSMGHQQAMSLLLLTVLWAATAVAARREPVAWRPGMVRAEDCDKKHGKGGSGADVGGGAGGGIGAGGAIGSGAGSGLGSGTGGGLGGGGGSGRGGGGGLGGGIGGGAGFGGGAGAGSGGGVGLGGGGGLGGGGGVGAGGGGGFGSGGGVGVGGGGGFGGGGGVGAGGAGGGGFGAGGGTGGRIGGGDGLGGGVGGGGLGGGFGARGGAGGGLGGGAGAGGGIGGGAGGGFGSGGGFGGGAGAGGGFGAGAGGGIGGGAGGGFGGGGGFGGGAGLGGGAGGGLGGGGGFGGGMGGGFDGGAGGGFGAGSGTGIGAGGGGGIGAGAGGGIGGGPGIGGGAGSGVGGHHHDMSSVVNDKHLD

SEQ ID NO: 14343 - protein, 138 aa, Zea mays
  VARIANT 5: note = Ancestral polymorphism is G, Derived polymorphism is A
  VARIANT 14: note = Ancestral polymorphism is A, Derived polymorphism is T
  VARIANT 29: note = Ancestral polymorphism is R, Derived polymorphism is W
  VARIANT 30: note = Ancestral polymorphism is W, Derived polymorphism is L
  VARIANT 47: note = Ancestral polymorphism is S, Derived polymorphism is L
  VARIANT 58..138: note = Derived polymorphism lacks residues 58 to 138
  VARIANT 115: note = Ancestral polymorphism is R, Derived polymorphism is W
  VARIANT 130..138: note = Derived polymorphism lacks residues 130 to 138
MYLRGAPNSNRNITVIWKAKNFTVHSVVRWVDTQLPRHPKLKAFYRSISPRHFFNGDWDIGGSCDNTSPLAKGGSGVHLDRSEDADAKGAVRGTGVRLLDVTALPRLRDEGHISRYSIKATPGVQDCLHWCLPGVPDT

SEQ ID NO: 14344 - protein, 269 aa, Zea mays
  VARIANT 47: note = Ancestral polymorphism is S, Derived polymorphism is F
  VARIANT 53: note = Ancestral polymorphism is H, Derived polymorphism is D
  VARIANT 215..269: note = Derived polymorphism lacks residues 215 to 269
MADLSFEPGRPGESTIELGRVIDRGLRESRAVDMEFLCVVAGKHVWSVRVDLHILDNGGNLIDAANIVALAALSTFWRPECTVGGDDGQQVTVHDPEIDVRDLLPLTIHHMPIVVTFAYFGEGNIVVLDPTYKEEAVMGGRMTAIVNSNGDVCAIQKAGGEGPVSSVTMQCLRIASVKAAVITSKIKKAVSNPLRLMTRRGDGQGASGVITDVLRNTDDDAVDPHLERIKNQAGDEESDEEDEDFVADKDDSGSPTDDSGDEECTDVLS

SEQ ID NO: 14345 - protein, 136 aa, Zea mays
  VARIANT 7: note = Ancestral polymorphism is C, Derived polymorphism is S
  VARIANT 18: note = Ancestral polymorphism is R, Derived polymorphism is C
  VARIANT 20: note = Ancestral polymorphism is E, Derived polymorphism is K
  VARIANT 35: note = Ancestral polymorphism is S, Derived polymorphism is L
  VARIANT 42: note = Ancestral polymorphism is L, Derived polymorphism is M
  VARIANT 45: note = Ancestral polymorphism is D, Derived polymorphism is N
  VARIANT 55: note = Ancestral polymorphism is G, Derived polymorphism is D
  VARIANT 75: note = Ancestral polymorphism is R, Derived polymorphism is S
  VARIANT 80: note = Ancestral polymorphism is S, Derived polymorphism is Y
  VARIANT 92..136: note = Derived polymorphism lacks residues 92 to 136
  VARIANT 97: note = Ancestral polymorphism is F, Derived polymorphism is C
  VARIANT 126..136: note = Derived polymorphism lacks residues 126 to 136
  VARIANT 127: note = Ancestral polymorphism is S, Derived polymorphism is R
MEKNIICMHGGIGWSINRIEQIGNLQRPIAMEAGSVVLMDLLWSDPTENDSAGSGRMYGVLVLLLLGSVSICRSRSLDHSFRGNELLWNDKQHRCYFSSRKGYGGGSKTHPIFAACRACRHLRSLWSIKLRTHGCR

SEQ ID NO: 14346 - protein, 593 aa, Zea mays
  VARIANT 442..593: note = Derived polymorphism lacks residues 442 to 593
  VARIANT 387..593: note = Derived polymorphism lacks residues 387 to 593
  VARIANT 301..593: note = Derived polymorphism lacks residues 301 to 593
  VARIANT 19..593: note = Derived polymorphism lacks residues 19 to 593
MPRVQQQHDTPPRGGGTPRSAIAAAAAECATGEGRSSSEDDGDAAWKAAIDSIASVGFSVPSSNGMAKAASSSNDEVNNHVDLEEPPLNANGNAVALTLCFRSASVTTAHYQEDSTSAAREVQSGVYRPFQGNVEVLNISLINGTIRELNPVSTHCYNSSSGSMEPSTWSFDASKTPYRFSDVQNKFTVIGCQTLAYITDNTDKSYQSGCVSMCQNVSDLMDGSCSGMGCCQTDIPKKMGFYNVSFDCGFDTSQISRLGLGSCSYAMLMEAEEFSFSTTYIINMTAFNDTNSERVPVVMDWAIRDGALSCELARRNETGTYACRNGNNKCVDSPNGPGYLCNCSGEYEGNPYLPNGCHDVDECKNSPCPSVGGVCHNTFRAYKCSCRAGRKLNKQNNTCDPNTTLITGVTIGFLVLVIFSSFGYMILQKRKLNQVKQEHFRQHGGIILFERMRSENGLAFTVFSEVELVKAIDSYDKSRIIGKGGHGTVYKGIVKGNVPIAIKRCALIDERQKKEFGQEMLILSQINHKNIVKLEGCCLEVEIPMLVCEFVPNGTLYELIHGKNQALQIPFSTLLRIAHEAAEGLSFLHSCEM

SEQ ID NO: 14347 - protein, 562 aa, Zea mays
  VARIANT 71: note = Ancestral polymorphism is R, Derived polymorphism is C
  VARIANT 54..562: note = Derived polymorphism lacks residues 54 to 562
  VARIANT 36..562: note = Derived polymorphism lacks residues 36 to 562
MTRHVSMISITLSPRELDKHTPGYQAPVYVEQPRQQQVPPPQRQPRRPPAQFQQLEYEDSYARGRGRGRGRGRGWGRGGYGGYGGYGNNQGGYHQGGGYYDNQGGYNGYDNQGGYSGYDNQSGYGGGYGYKQGRYGNYQENGGYNRDPGSGMRGRCNWGYQGVFSIAAREPLGGRLQLRECELSRGSLNDDGPLRFRVITRDSCHRNRMRARDPYARSLEDILLDKVRKVPCIPLSDGSFTSISDGRIWLPYDVANSIPECSSIPNFPALYGNLRTVVKVEKTLSQVDSILAGGLSLADVSTKQCTVYDWESPELSRILSIFSSKRCKEKCVYLLEVLDRFWDDHYRAKSRIFTDATHCGENRAVESSFMKCIQSFKWIASRMDEDLHYATDLFYDCENVRSLFGSVAPYVVSQVSSSSLKKAIGFKTEVSYCDALMVLKSWITSKVPFRASMSQMWKFYTLLSEGVADAKIDIKREFMSSPSIFTPLQRPRARAISTISSIKTSKKIERLGSNGVPPRTSRLKRLFVYSLQNSEATSQEAHHGRMNEEEKSVAWNGCMLLD

SEQ ID NO: 14348 - protein, 153 aa, Zea mays
  VARIANT 108: note = Ancestral polymorphism is R, Derived polymorphism is S
MLSQRKRRETLDTLSCCYTIPPPQQPTRRRRRCKFVFGTCMPASSSSSSPNILSCSALEEDPWSPTATMMTAGDDDDDLLVQLVPRDVSDGLLGKFADTSAFDFDYGRSGLWSPLLLRPEAMLLAQSPAAGRRPRRRRRRKRRKVLCCCWRWW

SEQ ID NO: 14349 - protein, 331 aa, Zea mays
  VARIANT 224: note = Ancestral polymorphism is L, Derived polymorphism is S
  VARIANT 202: note = Ancestral polymorphism is G, Derived polymorphism is A
  VARIANT 159: note = Ancestral polymorphism is L, Derived polymorphism is P
  VARIANT 137: note = Ancestral polymorphism is R, Derived polymorphism is H
  VARIANT 86: note = Ancestral polymorphism is P, Derived polymorphism is L
  VARIANT 62..331: note = Derived polymorphism lacks residues 62 to 331
MPDLHPPEHQVAGHRASASKLGPLIDDSGLFYKPLQAGDRGEHEVAFYEAFSAHAAVPARIRDTFFPRFHGTRLLPTEAQPGEPHPHLVLDDLLAGFEAPCVADIKIVAAGGGGGGVTVKLVDFAHVAEGDGRLLRRSLWVLLKRGSWHFRFDNKDVLLYMKEALSAAKKESSSEDEDDSSEESSDDEPTKVEEKKGAELMGKYGINVPRGAAAGSVHEVKDALKNMFPSEKEIVVKSQILAGGRGLGTFKSGLQGGVHIVKAEEAELIASKMLGQILITKQTGPEGKIVSKVYLCEKLSLTNEMYFAITLDRKTAGPLIIACSKGGKHYS

SEQ ID NO: 14350 - protein, 511 aa, Zea mays
  VARIANT 23: note = Ancestral polymorphism is P, Derived polymorphism is S
MAVLRGRLTLVLILSLNCCFSFPTVLSSVTSDGFLQCLSDNIPVGLIYTQGSSNFTDVLVSSVRNPRLFTSATVRPLCIVTPVDASHVQAAVRCGRASGVRLRVRSGGHDYEGLSYRSERPEVFGVVDLSNLRAITVSADDDERPVPPTAPSAWVDSGATLGELYYTVAKNNPELAFPAGICPTIGVGGHLSGGGIGMMMRRFGLSVDNVLDAKLVNASGDLVDRAAMGEDHFWAIRGGGGESFGVVVSWKVGLVKVPSTVTAFNIVKTVADQGAVDALTKWQDVAPGLPTDITIRVIIQGQRATFQSLYLGSCSDLVPVLNSSFPELGMTSADCLEMTWLESAAFFQFWNRRTPVEALLDRKTSLSTFTKNKSDYVRRAIAKEAWESIFSWLTMDGAGMIILEPHGGFIGTVPDGATPYPHRSGVLYNIQYITFWSAGGEQEGATATAWIGSFYEFMEQHVSESPREAYVNYRDLDIGENVVVDDVSTLDSGRVWGEKYFAGNFQRLAAV

SEQ ID NO: 14351 - protein, 586 aa, Zea mays
  VARIANT 345: note = Ancestral polymorphism is S, Derived polymorphism is F
MVIRSFATTSLIAAFFAIAHLAAWVTPPQAAATAAPPSSPDTASFLRCLGAHLPPQAVYTNASRSYTSVLESSIKNLLFVTPATPTPVAIVAASNASHVQAAVRCGARHGVGVRPRSGGHDYEGLSYRSLSARRPFAVVDLARLRAVSVDARNRTAWVGSGATLGELYYAIASRSARLGFPGGVGPTVGVGGHLSGGGFGLLLRKHGLAADHVVDAVVVDAAGRLRDRAAMGEDLFWAIRGGGGGSFGVVLSWKLRLVRVPPVVAVSTVHRPRNQSASALLARWQHVAPALPRDAILRVVLQNQDAQFESLYLGTCAGLVATMARRFPELGMEARDCIEMTWIQSVLYFAFYGTGQPTERLLDRGTKPERYFKGKSDYVTEPMPSHVWESAWSWLLKDGAGLLILDPYGGRMRGVAPSATPFPHRRALYNLQYYGFWFQNGTRATEKHVGWIRGLHREMEPYVSKNPRGAYVNYRDLDLGVNHDDHRGLASYEKARFVEGKWLEWMDTEVKPQDGEGKLPTSMLFGPRIIREKFTQLCSPEITTLLAAIPIIGYACILDIGWEWAGVMWIYNVVTFLPMDMFKLAI

SEQ ID NO: 14352 - protein, 65 aa, Zea mays
  VARIANT 37: note = Ancestral polymorphism is G, Derived polymorphism is E
  VARIANT 32: note = Ancestral polymorphism is G, Derived polymorphism is C
  VARIANT 25: note = Ancestral polymorphism is T, Derived polymorphism is I
  VARIANT 3: note = Ancestral polymorphism is G, Derived polymorphism is E
  VARIANT 2: note = Ancestral polymorphism is M, Derived polymorphism is I
MMGSILFVSGVLLTIGSKPTVQFFTKPKDHKGSIFFGFGFFLVLIGWPALGIMVDSYGFIMLFKL

SEQ ID NO: 14353 - protein, 66 aa, Zea mays
  VARIANT 1: note = Ancestral polymorphism is M, Derived polymorphism is I
  VARIANT 4: note = Ancestral polymorphism is A, Derived polymorphism is V
  VARIANT 13: note = Ancestral polymorphism is Y, Derived polymorphism is H
  VARIANT 19: note = Ancestral polymorphism is P, Derived polymorphism is L
  VARIANT 20: note = Ancestral polymorphism is E, Derived polymorphism is K
  VARIANT 33: note = Ancestral polymorphism is V, Derived polymorphism is I
  VARIANT 37: note = Ancestral polymorphism is T, Derived polymorphism is A
  VARIANT 40: note = Ancestral polymorphism is A, Derived polymorphism is T
  VARIANT 42: note = Ancestral polymorphism is D, Derived polymorphism is G
  VARIANT 43: note = Ancestral polymorphism is V, Derived polymorphism is M
  VARIANT 47: note = Ancestral polymorphism is D, Derived polymorphism is N
  VARIANT 53: note = Ancestral polymorphism is V, Derived polymorphism is M
MSRAFDDYYIMDYGVISAPEVTQRRTGSNDQFVILPTVGAWGVLCNDEIIKIVAYIEVDMILMVAM

SEQ ID NO: 14354 - protein, 554 aa, Zea mays
  VARIANT 140: note = Ancestral polymorphism is V, Derived polymorphism is M
  VARIANT 143: note = Ancestral polymorphism is L, Derived polymorphism is P
MGKVKQKVATAAEDIVLEDEDDAERSSENSVPPVILDLNQSFGEGSEEGEAGEDGSYDEEDGDCDGGSMSRVAGGSSSSNSSSTNHHTSMSNKNYDTNNSSSCKGEGSGETAQTVRQYNRSKLPRLRWTPDLHMAFVHAVERLGGQERATPKLVLQTMNVRGLSIAHVKSHLQMYRSKKLDHESAGAGHDRAAIYSVFKPMDLHMMMRRGDHRFHDMFLHRAAAAGSVISSPLLHNGDLFGSRDAVSPEASRLYALLQRRQQPSSTQTFALMNYSSSLIDMIDQVWTFSRHAAAAAAAARAGAIDDDHGPTKGLIHDMILRKDGRLTSHLFGLWDAIACNRTSSNAAGAASHGARVVTSTDWNGTCSSSRPLSVTMSAAASTGLAMGSHHLMSRGRGGSANDVTSLDHAVVTNEALGSRLQLQTLLERNNAAKLTGEEMCGGTRTKMLKTAMEGKNGGMQEPDLQLSFSPNDDMEGDANKQIKKRKIIDGIGFSQQEVDSDKSMLPLSLSLSLRGGDIGGEDAGRFEAAAGSGGKKAALGRSTLDLTMSIKALE

SEQ ID NO: 14355 - protein, 161 aa, Zea mays
  VARIANT 44: note = Ancestral polymorphism is S, Derived polymorphism is R
MSSQLIEEHRSGAEVHVGHELCERKSREFMVELGLPDGLLPLPSLDEVGYNRSTGFVWLRQAAGLTHTFGSIGKQVWYDREVTAFVEPGRMHGLAGVKSKELLIWVTISEIVLSPSGTKIVFRTPAGLGRAFPVTAFQLEPAAAEGDHKEEAEDAAAAAAN

SEQ ID NO: 14356 - protein, 182 aa, Zea mays
  VARIANT 54: note = Ancestral polymorphism is C, Derived polymorphism is R
MSAAEEHRWRSLVFGEAVAAQRSALVLASYPLLLLLVVLAAFVRYLWIALAMYCALLFVLSCAARALAAQPAGAAGAEAARVSRGGLSAAAIAAVAPAFRYVAALGEPAQCAVCLEGLRDGEAARRLPACSHAFHAGCVDMWLDSHATCPVCRSLVVPHKPGKQPPEPLVLVHPSSSPLPPV

SEQ ID NO: 14357 - protein, 151 aa, Zea mays
  VARIANT 48: note = Ancestral polymorphism is R, Derived polymorphism is K
MKTSGRKLPVKAPFDRNMFLTEQHCREYFGGSIETLNCWPQTARSTSRPRCSSSSALESSVCCGSGGQGGYNFNLRLPAVEDWVLDSIPYSVKKHVQQSSMSADSLKKKCGEQGASVCSDPAAYVRWDGIHMTQAAYRKVADGWLNALLRS

SEQ ID NO: 14358 - protein, 390 aa, Zea mays
  VARIANT 11: note = Ancestral polymorphism is G, Derived polymorphism is R
  VARIANT 212: note = Ancestral polymorphism is M, Derived polymorphism is T
  VARIANT 285: note = Ancestral polymorphism is E, Derived polymorphism is V
MPRLTPRANFGKQAMPGDGGAAGSARWVCAVLSVFPLLAAAAQGRYRAVFSFGDSLVDAGNLVTEGIPDYLATARPPYGQTYFGYPTGRCSDGRLVVDFIAQELGLPLPPPSKAKNASFAQGANFAITGATALDTDFFRKRGLGSTVWNSGSLRTQIQWLRDLKPSLCSSAQGTRCKEFFAECLFVVGEFGGNDYNAPLFAGKDLREAYKLTSHVIRAISDGVEQLIAEGAKDLIVPGVMPSGCFPVYLTMYADPKEGHGSRTGCLKRFNTFSWVHNAMLKRALVKLRAKHPGARIIYGDYFTPIIQFILQPKKFGFYKQPPRACCGAPGRGPYNFNLTAKCGEPGASACADPKTHWSWDGIHLTEAAYLHIARGWLHGPFADQPVVQAS

SEQ ID NO: 14359 - protein, 349 aa, Zea mays
  VARIANT 295: note = Ancestral polymorphism is C, Derived polymorphism is R
  VARIANT 292: note = Ancestral polymorphism is L, Derived polymorphism is P
  VARIANT 277..349: note = Derived polymorphism lacks residues 277 to 349
  VARIANT 274..349: note = Derived polymorphism lacks residues 274 to 349
  VARIANT 155: note = Ancestral polymorphism is M, Derived polymorphism is T
  VARIANT 66: note = Ancestral polymorphism is S, Derived polymorphism is R
MAGSMSDGGVWRRWGTLGVCGINANPGQPMRTCESGREGEGMYAAFDETSTLEDVDKVFNNSKSASFTVESISLKVSSSIPSSLARESPYLTLLNMYMKNSYLEEAVKMFEQMPERNIISWTILVSGYGITGQSNKARVLYYQCTQKDLILWTAMINACVQHGSFDEALTLFQDMQLQHVEPDKFSVITLLTCYANIGAFDQCEWIHWYAEDKNMKIDAVRDTTLMEMCSKCGHVDKSLQIFRRMQGKDVVAWTAIICGLTTNGQASKALELFEEKQRSKTKPDGITFTRVLSACCHGGLVDEGQRHFQAMKEVYQIEMRIKHYSCLVNLLGHAAMVAWSMKDRGISKP

SEQ ID NO: 14360 - protein, 296 aa, Zea mays
  VARIANT 289: note = Ancestral polymorphism is W, Derived polymorphism is L
  VARIANT 206..296: note = Derived polymorphism lacks residues 206 to 296
  VARIANT 153..296: note = Derived polymorphism lacks residues 153 to 296
  VARIANT 134..296: note = Derived polymorphism lacks residues 134 to 296
  VARIANT 132..296: note = Derived polymorphism lacks residues 132 to 296
  VARIANT 14: note = Ancestral polymorphism is A, Derived polymorphism is T
  VARIANT 5..296: note = Derived polymorphism lacks residues 5 to 296
MVVYYAKRGDKHHARATFENMRARGIEPNAFVFTSLVRAYAVAGDMRGALSCVEEMKSEGIEMTVVTYSTLISGYGKTNDAHLSNIISCSGRSADNLFKEAKTKIDNLNGIIYSNIIHAHWLVSTQLKDDERAQRGGCLERSSGQKPEGDMGQDLGNEILAVEGVFYFQQEPIRTRFCNHDKQIEQAYDDLLNSSKHTLSSMMELQEALLESNHATKDANVAYVFGQSIAISARGERPEDWVPPEDVSAVYYAKCDDIDETLPMGADGNDGIVDIFSAHSYYDAAEVKWYILAWMA

SEQ ID NO: 14361 - protein, 380 aa, Zea mays
  VARIANT 186: note = Ancestral polymorphism is G, Derived polymorphism is V
MAPSSRRACHGWAWALTMVVVLALSASSADDAACDLFRGRWVADKSYPLYDASACPFVPDVFDCRRNGRPDDAYLKFRWSPANNCQLPRFDGADFLRRWRGKTVMFVGDSLSMNQWVSLACMLHAAAPAPVRATFTSGEPVSAVRFEDYDLSLVLYHTTFLVDVVREDIGRVLKLDSMRNASDWLGAHLLVFNTWHWWTYRGASQVWDYVQDGNSTYRDMDRLTAFSKALSTWARWVDANVDASRTRVFYQGVSPSHYDMSSKQQESQAGTTTVPAAAAAGGSCLRQTRPLQEATEAAGGGGGGTTLAPEQAVVRGVIGAMRAPVSLLDITALSQLRIDAHPSVYAGPGRDGMDCTHWCIAGLPDAWNHIMYAMLLQHTA

SEQ ID NO: 14362 - protein, 112 aa, Zea mays
  VARIANT 100: note = Ancestral polymorphism is R, Derived polymorphism is C
  VARIANT 87: note = Ancestral polymorphism is N, Derived polymorphism is D
  VARIANT 68: note = Ancestral polymorphism is Q, Derived polymorphism is H
MGNCLNTAAKRGHRGMLLPEEEESLSEMRRISQLLREEEEEMVAVAPAEGLKVKVVLTRGELEWLVAQLKGGERRLEDAIHHMQAANHAKGVGDGGWRPCLESILECPETQS

SEQ ID NO: 14363 - protein, 705 aa, Zea mays
  VARIANT 39..705: note = Derived polymorphism lacks residues 39 to 705
MVMGREDKYVRFQDWRSEQSVSSENIVAPHRDDVSLFSSLKERTATVFTFLGNILHTETSNKSMLDERKSTTGTLHPQGPFLQKWNRIFVISCIFAVSVDPLFLYIPVINDEKPCWYLDRKLEKAASVLRFFTDIFYILHIIFQFRTGFIASSHTTFGRSVLIEDRYAITKRYLSTYFFIDVFAILPIPQVIILVVLPNLHGSKVMKAKNVLMLIIICQYVPRLIRIRPLYLQITRSAGVITETARAGAAFNLLLYMLASHVLGALWYLLSIQRQDSCWRQYCRGNSTCDPAYLYCGDYDKDGKNAFLTTNCLLSNQSNLPDPYFGIYAPAIKNVSRSKSFFAKLFFCVWWGLQNLSSLGQNLKTSTYTWENLFAVFVSISGLVLFALLIGNVQTYLQSASLRVEEMRVKSRDTDQWMSYRHLPENLKERIRRYEQYRWQETSGVDEEQLLMNLPKDLRRDIKRHLCLKLLMRVPLFENMDEQLLDAMCDCLKPILYTEGSCVIREGDPVNEMLFVMRGNLMSMTTNGGRTGFFNSDVLKAGDFCGEELLTWALDPTSTSSLPSSTRTVKTMSEVEAFALRAEDLRFVATQFRRLHSKQLQHTFRFYSQQWRTWAACFIQAAWHRYCRKKIEDSLREKEKRLQFAIANDSSTSLSFMAALYASRFAGNMIRILRRNATRKARLQERVPARLLQKPAEPNFSAEEQ

SEQ ID NO: 14364 - protein, 387 aa, Zea mays
  VARIANT 172..387: note = Derived polymorphism lacks residues 172 to 387
  VARIANT 147..387: note = Derived polymorphism lacks residues 147 to 387
  VARIANT 9..387: note = Derived polymorphism lacks residues 9 to 387
  VARIANT 7..387: note = Derived polymorphism lacks residues 7 to 387
MAEEIHQNQEEEEEEEVVAASTAKRRRKAASSGKKPKPTPKKAKPAVDGGPGMCPRAIAPGLALSASLTKSPPAPASEIIIWVREIQFILISPTIYMFILLSPSTLDGDGEQAAATLRSQCSPQHPRSWKAPLKDAESQKDVGKGDKSGDKGTAEKFAIYQKHRSSLADIVQFRRPAAPTSSVNADIVGTSTLQSASLPKQESSTATSKSYTFREGDRVRYVGPAQLSSLSQRKRNNQNMRLLIGNPIPDGNDLGGLCEEDHGFFCSAESLRPDFSAGEEVERLAMTELIEVISEENKSGPLIVLLKDVEKSFIGVTESLSSLRSKFESLPSGVLIIGSHTQMDSRKEKDEALLTDWKQQLDRDVETLKAKSNIGSIRTVSCRIEDS

SEQ ID NO: 14365 - protein, 173 aa, Zea mays
  VARIANT 5: note = Ancestral polymorphism is I, Derived polymorphism is T
  VARIANT 141: note = Ancestral polymorphism is A, Derived polymorphism is V
MQVKTVRESMNRMIEAWREIPDLDEEVCSFDVPPSSQSTSSLTDTADSLGSTSTPSITRRNSWPTNRQPPPDASHNVTNRKGSTPSIVGKKILPPSRCSTDQAKKFEGRVDVTVASDATPAKMVTEEKLLNEGSVRERLEARRVLFQKTGDKGYKKLAGPKSGSRVFSIQWGW

SEQ ID NO: 14366 - protein, 478 aa, Zea mays
  VARIANT 202: note = Ancestral polymorphism is P, Derived polymorphism is T
  VARIANT 318: note = Ancestral polymorphism is R, Derived polymorphism is C
MMMSWSWCKTTGRHEAEGTKKGSSSAGRVAAWLLLSPLLVLVVLKTDFLPTVSRTDTGLGNAKWQQQHYPHGPEAVKADMGGSASRLTCNLSNRHSDTCTMEGDVRIHGRSATVYVVAAASNHRRPENSTVTVRPYTRKWEQETMARIREVTVRYTPPPAPFGSGVIPPRCTAVHDGAPAVVFSTGGCGTNFFHAMSDLVVPLYITAREYGGRVHLLVTDYRPEWVAKFRPVLDALSAHPVVDLDSDAAVRCFPAARVGLESHNGMLAIDPTLSRHGYTMVGFRDFLRSVFSLPRPWAWSSSRPVISRPPRLVMVLRRHSRALTNEADTVAAMEDLGFDVVPARPEDVADMGRFARVVNSCDVMVGVHGAGLTNMVFLPHNATVVQIVPWGDMKWACWYDFGEPVQGMGLRYVEYEVTAEETTLKEKYARDHPVFTDPQSIHRQGKAWATFLDGQNVTLDIDRFKAAMQQVFQSITTG

SEQ ID NO: 14367 - protein, 88 aa, Zea mays
  VARIANT 56: note = Ancestral polymorphism is V, Derived polymorphism is A
MVMAKLSGAAQQQPEDERERKEGVRCGGVGGCGFRMPLHYPRYKKADYEAMPEWRVDCLLREYGLPADGDLDSKRRFAMGAFLWPDQY

SEQ ID NO: 14368 - protein, 93 aa, Zea mays
  VARIANT 38: note = Ancestral polymorphism is T, Derived polymorphism is I
MNMAKQAATTVGAKNGAVAVADQQKVEGPRTMNCSSYTFHMPLHYPRYKKADYESMPEWRVDCLLREYGLPVDGELDSKRKFAMGAFLWPDQY

SEQ ID NO: 14369 - protein, 177 aa, Zea mays
  VARIANT 125..177: note = Derived polymorphism lacks residues 125 to 177
MGTCCTLSSAAKDKDDGSSIDLDLNFQLSLCNEGTSKLGTNACNDRRALEKQPVMDLKLSLTVRPSESVVTDVELKAAQSDVLYPDAPRALEDEQTAVFVMVGAKDVNLLAASRFKSAQGSTDFCKATRIWRFSRALFKGICYEQHWNQAVSHSSLPILPKVLQCWLRILLRLLFTH

SEQ ID NO: 14370 - protein, 664 aa, Zea mays
  VARIANT 549..664: note = Derived polymorphism lacks residues 549 to 664
MVFQQMLERDIIVWNAMIMGLGMIGHEKIAFVLVGQMKNSGVKLNDNTFIGLLCSCTHTSLVNDGRRYFHNMTHVYSISPRIEHYGCMVDLLSRAGLLEEAHQLIGDMPMLANAVVWGARLGGCKIHRNADLAEYVLKQLTRLEPWNSGNYVMLSNIYSNSGRWEDAAKLRLEMKAKGIEKVAASSWVELDDKVHKFYVGDDSHPLSDKIYAKLDELGHGIPSFRSRRFTLANSAVSLPLSARPLSFGCVSQISCLFVALDSSVVRMAAPKPISRLISHVILDLDGTLLNTDSVVSKVVKPFILKNGKTWDSKKAHKLVGKTPYEAAAVVLEDYGLPYSTEEFLSMITPMFSEQWCNLKPLPGANRLIKHLKTNGVPTALASNSPRCNIEAKIFFQQGWKESFSAIVGGDEVEKGKPSPNIFLEAAKRMNCAPSNCLVIEDSLPGVTGGKAAEMHVIAVPSIPKKTAEFSSADEVINSLLDVRPEKWGLPPFNDWIEGTLPIEPWFIGGPVIKGFGRGSKVLGIPTANLPAENFSDVVSEHTSGVYFGWAGLSTRGIYKMVMSIGWNPYFDNTEKTVEPWLLHNFGEDFYGEEVRLAIVGYIRPEANFPSLESLIERIHEDGRVAEKALDLPMYAKYKDSPYLRNPSKHGSSTTGGTQSEMDSK

SEQ ID NO: 14371 - protein, 536 aa, Zea mays
  VARIANT 293: note = Ancestral polymorphism is S, Derived polymorphism is L
MDPDFSPASGGPSFEFAFNSVNFSDRVLRIEIVAGDDALGAKGATGEGCSSLADWACHRKRRREELRRDKESRKYMPDPANCKVEAEECDAYEEGNEPVAMIEESPPDIEADGEDGKSSDSYCSMECTQVLRVKSMYISSAILAAKSPFFYKLFSNGMKESDQRHATLRITASEENALMELLSFMYSGKLTTNQPTVLLDILMIADKFEVGSCMRHCSQLLRNLPMTTESALLYLDLPSSISMAAAVQPLTDTAKEFLANKYKDLTKFQDEAMNIPLAGIEAILWSNDLQVASEDAIYDFMIKWARAQYPKLEERREILGTRLLPLVRFCHMTCRKLRKVIACSDLDHEQATKCVTEALLYKADAPHRQRALAADVMTCRKYAERAYKYRPLKVVEFDRPYRQCIAYLDLKREECSRLFPSGRIYSQAFHLAGQGFFLSAHCNVDQQSAFYCFGLFLGMQEKGSTSVTVDYEFAARTRPSGEFVSKYKGYYTFTGGKAVGYRNLFAIPWPLFMADDSLFFIDGVLHLRAELTIKQP

SEQ ID NO: 14372 - protein, 159 aa, Zea mays
  VARIANT 3: note = Ancestral polymorphism is S, Derived polymorphism is W
  VARIANT 46: note = Ancestral polymorphism is A, Derived polymorphism is S
MASKRILKELKDLQKDPPTSCSAGPVAEDMFYWQATIMGPSDSPYAGGVFLVTIHFPPDYPFKPPKVAFKTKVYHPNINSNGSICLDILKEQWSPALTVSKEALALASLIDDEKKLGDYQFDFWKQYYVVACVAVFGKLRRSRRLNAVQSCCTMLSIFK

SEQ ID NO: 14373 - protein, 304 aa, Zea mays
  VARIANT 208: note = Ancestral polymorphism is P, Derived polymorphism is L
  VARIANT 243: note = Ancestral polymorphism is A, Derived polymorphism is S
MVGFFGASAASDHCRLLTTNGSVHHELIRRHHGRPRSAIRCCSSTARGRTRDYYYQVLGIAIQSTPQQIKEAYRKLQKQHHPDIAGYKGHDYTLLLNEAYKVLMRDVSSSRHADGRGRSRVGSGAGYTGDGYSSWEGPVRSQALFVDENKCIGCRECVHHAARTFAMDDVLGSAHVEVQFGDLEQQIQLAVESCPVDCIHWVESHDLPVLEFLSRPQPKEGHGVFGGGWERPGNVFAAAKNFARRLEREKQREELERDQPSGGLDGDAGREAETEAQAEARRSAWEELRWKPLLDAWNGLIGGR

SEQ ID NO: 14374 - protein, 225 aa, Zea mays
  VARIANT 193..225: note = Derived polymorphism lacks residues 193 to 225
  VARIANT 192..225: note = Derived polymorphism lacks residues 192 to 225
  VARIANT 177..225: note = Derived polymorphism lacks residues 177 to 225
  VARIANT 155: note = Ancestral polymorphism is Y, Derived polymorphism is N
  VARIANT 125: note = Ancestral polymorphism is H, Derived polymorphism is R
  VARIANT 97: note = Ancestral polymorphism is T, Derived polymorphism is I
  VARIANT 9..225: note = Derived polymorphism lacks residues 9 to 225
  VARIANT 6: note = Ancestral polymorphism is G, Derived polymorphism is R
MFDLRGRLLEEEYARTKSLLQEREAEKMKNECSIMIDAWSDKKRRNIMNVCTNCADGTSFISSKEMSEMLHTSEVIFELVDKAIEDFGPDDVVQVVTDNASNNMGAKKLLHVKRPHIFWTSCATHTINLMLQGIGNMPRFKKVIDQAKAFTIFVYGHTRTLECMRYFTEKKEIVRPGVTRFASNYLTLDNIQEKKDQLRKMVVHSRWDSLKDVKLKKRKMSQQLY

SEQ ID NO: 14375 - protein, 763 aa, Zea mays
  VARIANT 46: note = Ancestral polymorphism is R, Derived polymorphism is C
MPSPPTMPSPPTLAPPSPRPAWNTNCNLVVTHPLLSVLESCASFRRLLQLQALLTVSGLASNRFPASRLLAFCALSDPPRLAHAAAVLAQCTEGPNAYMLATMMRGFLRAGKPTHALTLFRRVLRDRLAVDARTIVFAVKAAATSSSPTEAIHCVAFKRGFIGQSVLAGNALVHMYTSSMLLPDARKLFDEMADRDVVSWTTLIDGYARGGLPDEAWRVFCRMVVAESVWPNEVTLVAAASAAGQMGLLGLGRTVHQCIVESGGRMSVNLENALVDMFGKCGCVAAAKEVFDGMPIKDVYSWTSMVSAYAKCGDLENAAKLFKEIPNRNVVSWSCMVAAYSHANMPDEAIRIFNDMIAAGVEPIDATLVSVLSACAQLCSLDVGTWLYDTYIVSHKVELTPNLSNAFIDMFAKCGDVGAASRLFSNMEDKNVVSWNTMIMAHGLHGQPEEALHLFQEFKGNGILPDEATYIGVLSACSHGGLVSEGRCHFKEMKIVYGIEPRAEHYACMIDLLGKVGLLQEAFEVARSMPVGADEAGWGALLNACRMHGNVEIGKCAADKLAGLDPSDSGIYVLMSQIYASKSKWGQVKMLRTVMRDRRVKKNPGCSSIEVDGKCHEFLVADVSHVHSEDIYAALGNIYLHSKAEGSGVSFYCGPCTQFLPQNLEFFSIGENEVLQCVSVPQGGEGFLGTNPTGTGTDGDSVYKFLYGDQARFFDDEIRPELRHSKTGTVAMASAGENCNASQFYITLRDDMDYLDKHTNSFI

SEQ ID NO: 14376 - protein, 142 aa, Zea mays
  VARIANT 116: note = Ancestral polymorphism is R, Derived polymorphism is M
  VARIANT 84: note = Ancestral polymorphism is A, Derived polymorphism is V
  VARIANT 18: note = Ancestral polymorphism is K, Derived polymorphism is N
MEASSSLHFQVSGFSLSKIWLCLFLVLVLQNCSPALSDSPYLVGMGSYDITGPATDVNMMGYANAEQIASRIHFRLKARAFIVAEPNGKRVVFVNLDACMASQLVTIKVLERLKAMYGDLYNENNVAISGIHTHAGPGGYLQ

SEQ ID NO: 14377 - protein, 122 aa, Zea mays
  VARIANT 38: note = Ancestral polymorphism is G, Derived polymorphism is R
  VARIANT 1: note = Ancestral polymorphism is V, Derived polymorphism is M
MSSNQIQMWAPCVGARPSRGERDSTIENTSKNKKVELGFLDEERDQELPDFSSFIPFLPPLSAANLKVYYATRFTIIVGIMVFSGFLAPIKCTQVIHQVKSKTFESSWVICVAIDASESWLV

SEQ ID NO: 14378 - protein, 121 aa, Zea mays
  VARIANT 100: note = Ancestral polymorphism is R, Derived polymorphism is C
  VARIANT 44: note = Ancestral polymorphism is A, Derived polymorphism is T
  VARIANT 39: note = Ancestral polymorphism is R, Derived polymorphism is C
  VARIANT 37: note = Ancestral polymorphism is G, Derived polymorphism is V
MEWDDDWVAPDKLQHAVACLLIALLSAALAARSARPGLRRRAAAVGSAASLAAGAAKEAADEARLFGSAGASPKDAAADLLGVAAAALALALLRRLRRRRERKAREDGDGDGRGGAAVSMV

SEQ ID NO: 14379 - protein, 438 aa, Zea mays
  VARIANT 296: note = Ancestral polymorphism is P, Derived polymorphism is S
MAPTVEVLTSEVVVPAEETPAGSIWLSNLDIAARRGYTPTVYFFRPNGDPGFFAADVVKGSLARALAAFYPLAGRLGLDGTGRVQVDCTGEGAVFVTARSDYALDDLMREFVPCREMRDLLVPPTPAPNPPCALLFVQVTYLRCGGVVLALSMHHSACDARGAAHFLETWASIARGDDATTENAPVPPCFDYGRLLAARPGPARAVLYDHPEYKPEPEPVDADAVAASDDYASAIIVMTKAQVAALKARCPGASTFRAVVALVWQCVCLARALPPEAETRLYSMIDMRARLDPPLPPGYFGNAVVRTSVSATAGEVTSNPVGHAARRALAVTSQGDDYARSLVDYLEGVDAMNLPRSGISRAHLRAISWVGMSLYKADFGWGAPVFMGPALMYYSGFVYVMNAAGKEGALALVLSLEPESMPEFRKVFAEELASLEVM

SEQ ID NO: 14380 - protein, 135 aa, Zea mays
  VARIANT 9: note = Ancestral polymorphism is P, Derived polymorphism is L
  VARIANT 10: note = Ancestral polymorphism is A, Derived polymorphism is V
  VARIANT 18: note = Ancestral polymorphism is R, Derived polymorphism is C
  VARIANT 21: note = Ancestral polymorphism is A, Derived polymorphism is T
  VARIANT 22: note = Ancestral polymorphism is G, Derived polymorphism is S
  VARIANT 25: note = Ancestral polymorphism is L, Derived polymorphism is M
  VARIANT 26: note = Ancestral polymorphism is P, Derived polymorphism is S
  VARIANT 102: note = Ancestral polymorphism is A, Derived polymorphism is V
MVVVFEDFPAEKAAEVMRLATGDDLSIARKASLQRFLAKRKACLVEHAPYARPSSPAEEPEKKTVKPASTLASWLGLGSTEADRLTIALFCGSAHTRQIEDAVLEACPERIQPLPSNVAEPVDVKVHLKGFFMDL

SEQ ID NO: 14381 - protein, 157 aa, Zea mays
  VARIANT 103: note = Ancestral polymorphism is G, Derived polymorphism is D
  VARIANT 98: note = Ancestral polymorphism is A, Derived polymorphism is T
  VARIANT 32: note = Ancestral polymorphism is G, Derived polymorphism is R
MMRFFEDETEKVKGFTSESTVSYRDRLKIMAGLVNRTTSSWALRRGSSSRRTTRSQSSRGPSTASTRYPNHGEDYLEVDLDIHRFSYIARKGLDSFRARLKNGILDLGLTIQVRFHLDPPTEKKQKLSITVFFSFSLFVYIPVDRCDLAGLEAVGAP

SEQ ID NO: 14382 - protein, 440 aa, Zea mays
  VARIANT 422: note = Ancestral polymorphism is R, Derived polymorphism is G
MRVLEEDLYPSTPGKVKVERAGAMSRYLHRCFASTGTMFLWALFLVAMTATYLSVHSIVDTSSRYFAASWGGLHWERQIRASASPRRPPGSAEGAGLSVLVTGAAGFVGTHCSLALRKRGDGVLGLDNFNSYYDPSLKKARRALLGSHGVFVVEGDINDGRLLAKLFDVVPFTHVLHLAAQAGVRYAMENPASYVHSNIAGLVSLLEACKDADPQPAVVWASSSSVYGLNDRVPFSEAHRTDRPASLYAATKKAGEEITHTYNHIYGLSVTGLRFFTVYGPWGRPDMAYFSFTRNILQGKPITVYRGRDRVDLARDFTYIDDIVRGCLASLDTAGRSTGTGGKKRGPAPYRIFNLGNTSPVTVPTLVSILERYLRVKAKKNVVEMPGNGDVPYTHANISLAREQLGYKPTTSLEMGLKKFVRWYLSYYGYNRGTHTFRNS

SEQ ID NO: 14383 - protein, 526 aa, Zea mays
  VARIANT 413: note = Ancestral polymorphism is G, Derived polymorphism is S
  VARIANT 173: note = Ancestral polymorphism is T, Derived polymorphism is M
  VARIANT 28: note = Ancestral polymorphism is R, Derived polymorphism is C
MGTRGVALVAAALGVVVVTRLWTVLVVRLVWRPYTVARAFTRQGIRGPPYRLFTGNSKEAMAMRAATSGDTLDLSSHDFIPLVMPQYRAWMSLYGKVFLTWSGLTTPALFVGRYDMVKRVLFDKTGLYGKTDPGPIILSLLGRGLVFSDGEYWSRHRRVVHPAFAMDKLKSMTGSMVACAAEVIRAWEALAVARGEEEVTVEVAQQFTELTADVISHTAFGSSYRQGKAAFLAQRELQSIAFASLNSARVPGMQYLPTKANARRWQLERTVRGTLMAIIDERLAAAQEARGYGTDLLGLMLEANNGGGDGKSPQQAMSMDEIIEECKTFFFAGHNTTSQLLAWATFLLGTHPEWQQRLREEVIRECGGAEVLLHGDALNKLKLVTMVLYETVRLYGGATIIARQATADADLCGVKVPKATILLIPIAMLHRDEEVWGADAGDFNPLRFRDGVGRVAAHPNALLSFSLGPRSCIGQDFAMLEAKATLALILRRFAFEVAPEYVHAPADFLTLQPSKGLPVVLKLLDL

SEQ ID NO: 14384 - protein, 628 aa, Zea mays
  VARIANT 502: note = Ancestral polymorphism is W, Derived polymorphism is S
  VARIANT 484: note = Ancestral polymorphism is S, Derived polymorphism is L
  VARIANT 336: note = Ancestral polymorphism is S, Derived polymorphism is P
  VARIANT 275: note = Ancestral polymorphism is P, Derived polymorphism is A
MAGITGVMNMKLAARPSSGRHSRGCRPAVVPSAGKQMLLVRRHPPGSASWPTRATGGGGGGVPAGATAADSSGQAKEEEEEDRASRNTSSFEPSIWGDFFLTYSSPLATSSAQKARMVHRAEQLKKQVAKLIAASGACSLYHRIHLVDALERLCLDYLFEDEINDMVTQIHNVDVSGCDLQTVAMWFYLLRNHGYRVSSDVVFAKFRDEQGGFAANNPRDLLNLYNAACLRTHGETILDEAASFTSKCLKSLAPYTYMEASLASEIKRALEIPLPRSVRIYGAKSRIAEYGNQTEANELVLELAKLNYNLVQLQHQEELKIITRWWNDLELQTRLSFARDRVVECYFWMVGVYFEPSYSRARVILSKVLAIVSLLDDTYDVYGTSQECELFTKCIESWDPAATGGRLPGNMKFIFAKILDTCQSFEDELAPDEKYRMHYLKTFIIDLVRAYNEEVKWREQGYVPATVEEHLQVSARSGGCHLLSCTSFVGMGDVADQEAFEWVRGVPKIVKALCIILRLSDDLKSYEVREKMSSHVASTMESCMKEHQVPLEVARVKIQETIDETWKDFNEEWLNLNTNSHLPRELLERIFNLTRTMVYIYQQDDAYTNCHVIKDTINSLFVEPVSIT

SEQ ID NO: 14385 - protein, 457 aa, Zea mays
  VARIANT 31..457: note = Derived polymorphism lacks residues 31 to 457
  VARIANT 184..457: note = Derived polymorphism lacks residues 184 to 457
MMRIINFMVYCNEGMFLHKSINATGRIQNAEFIYDCIREVVVDEIGVKNDIQIVTDNGSNYKKACRQLITRYTHITWQPCAAHTINFMLKDISRFSEVSEVVVNAKRICRFFYNHNRLHAMTSYVSVCCNGTRNILQNDDGTGGHDVDPGHAEDGARAMKSMRAGLDGALDPKTLYMTKLARKQSTRHTVTLALKKLASSSKIAFVAIEQYAFFCEKRGLFAGEEAERSATNGRMSAGEHKELQMLARRIVSQWLSSSGCERNWSTFALVHAKLRNRLGYEKLHKLIYVHYNFKLHIQYFENDMQSLQEMQVFKDTELDPYSVMIDVAMYDEVLMDELGMDGEVTTLKRKLDFNTRDGKNKRKAGLVDIEDDVESDSSEGSPIHVELCDSSSDDGTVGDEFGDEWEFGGPSGGGACDVGASGDGSRDGVMHEQAAPNPPLRPRSTRLKKVHVKELYK

SEQ ID NO: 14386 - protein, 361 aa, Zea mays
  VARIANT 4: note = Ancestral polymorphism is R, Derived polymorphism is Q
  VARIANT 22..361: note = Derived polymorphism lacks residues 22 to 361
  VARIANT 28: note = Ancestral polymorphism is V, Derived polymorphism is M
  VARIANT 322: note = Ancestral polymorphism is Y, Derived polymorphism is C
MEARRTGRDLLASFVLAALAAQAFVAVVESRASPAEKASQGDDVKKPDCVPGMDPRSFPGIGSGSHGGGITPVTPSHSHGGSTGTPSHGGGGGGGDLPSPSHGGTTLPSPSHGGSGGDLPSPSHGGTTLPSPSHGGSGSTPTSPSTGGSPSHGGSGSSPTAPSTGGGYGGSPSHGGGAYGGSPSTPGSGGAYGGGSPSPAHGGGAYGSSPTPAYGDAPSHGGIGTSSPTPFDPHSFGSLPGSCDYWRSHPMEIWSAIGGRFPGTSSSMGTMGHFFGAAGRVGGTDVSIQDALANTRSDGAGALLREGAAALLNSMTRSGFPYTTEQVRDTFAAAAAAAAGGSDGAAAAQAAAFRMANEGKA

SEQ ID NO: 14387 - protein, 171 aa, Zea mays
  VARIANT 39: note = Ancestral polymorphism is P, Derived polymorphism is H
  VARIANT 29: note = Ancestral polymorphism is P, Derived polymorphism is Q
  VARIANT 12: note = Ancestral polymorphism is P, Derived polymorphism is T
MHSFQPSGSGSPPFGLVVCLVDALLFTSPETKMAASRIPPCHLHPSSSSSSSSSMATICPRPGTRQSSAFRFRASAHGSGSSPNLSSFTAVTGKKVKVFEDQLRGIVCYRDEDGEMVCEGYDEGPRLGMRLPEKASFPWPVGVRITDFIQLATLQVFDDDVDVLQLTGDQN

SEQ ID NO: 14388 - protein, 521 aa, Zea mays
  VARIANT 390: note = Ancestral polymorphism is S, Derived polymorphism is P
MDFSAGSYFSSWPINSASESYSLADGSAESYGEGSMPPSTYFMTARSDHNLNFSVHEQDSTMLPNEQLTYAGAGQIDLLPAETLSRDKLPENLLELQGLQNISNLQSNLVAPGVFQHNLTPGVFHPQLNTPGLSELPHALSSSIDSNGSEVSAFLADLNAVSSAPTLCSTFQNASSFMEPVNLEAFSIQGAQSDCVLNRTSHPNGNISVCDSAALASLHDSKEFISGSLPSFASVQETNLAASGFKTQKQEQNAVCNIPTFTARNQMSVAAMQGALVPQKIPSRINDNKSEGPVSHPSDVQTQPNSAVNGVGVKPRVRARRGQATDPHSIAERLRREKISDRMKNLQDLVPNSNKVLFLEGGGGLTCLVHTAARKTTVLPFIKEVHLFSSLNNMEWQIFWCKQADKASMLDEIIDYVKFLQLQVKVLSMSRVGAPGAVLPLLTESKTEGYHGQPLPQGLLDALDSEDSFVFEEEVVKLMETSITSAMQYLQSKGLCLMPVALASAISTQKGVSAAAVPPER

SEQ ID NO: 14389 - protein, 560 aa, Zea mays
  VARIANT 267..560: note = Derived polymorphism lacks residues 267 to 560
MSSRAPAAPTTTVVRAAGTDHLWAKAAELERDFAGYKRRLAERRAHDAVAEVARAEEARGGDDAAGRGRRYEEYVRRRDERLRQEWRARMERKEAEVQALWARLDRAGSRGRRGGDGELAAATATGHAREDQVKPPQKPGGNLVVKVKPSTPIPVTPRGNLGQPPAAKPARPRTSVPSSLAAGSPRLSTPDPRLRPSSHLQRELRQAQPQPPATPRKENRLPPPPSTAASPATPRPRTTMLSRSRSMFKDRGCSSVAVAVGESPRPSRFQPPRSSYEGASNLKKPAPSCSRDQAVVADRRKASSAVAPEPFLVKASRDDMPAPLVLVASKERDLPYRSGAISPAGCANEDSKSNVQEHVDRSPDKFGSEEITGDSDTEPSYVYVKKDSDEQIPGPPPPETPAAAAAAADDAEEEFRRESSESLYSNVQSSFSPRSELASAASSATTGSSPRPSATAQSPEASVSPRPRKSAEAEEGAEKRVPAPTTTPRSSAQSPMDAVNGLKRLLTFGKRSGNGKASEAAAAPRAPPARDGDSSTLLDNSYVISPNGNSSTLLGIRFRC

SEQ ID NO: 14390 - protein, 349 aa, Zea mays
  VARIANT 1: note = Ancestral polymorphism is M, Derived polymorphism is I
  VARIANT 155: note = Ancestral polymorphism is C, Derived polymorphism is R
  VARIANT 234..349: note = Derived polymorphism lacks residues 234 to 349
MAPAVAAAASAAMRQALRDRQILDAVGTGAAALSLAGSSFIVICYLLFRELRKFSFKLVFYLAVSDMFCSLFTILGGPSNAFYCFAHDYSAHFFCVASFLWTTTISFTLHRTVVKHKTDVEEFGSIFHLYVWGTSLSTTVLRSIGSDYGRPGTWCWIQQGSMAKACDLLCCFSFFLDYYTNISSMCHFFESYVLHLITFYLPLWGAILYNGFTYYEVNRMLNNATQMAAGISDQSNQSDIRAGRKAFNRWGYYPLILIGSWAFATINRLYDFANPGHRIVWLSFLDVGFAGLMGLFNSIAYGLNSSVRRAIAERIDTFLPERIKRSLPALSRLRSQQENELTSLIVEGN

SEQ ID NO: 14391 - protein, 142 aa, Zea mays
  VARIANT 39: note = Ancestral polymorphism is S, Derived polymorphism is A
MGRVRTKTVKKTSRQVIEKYYSRMTLDFHTNKKVLEEVSILPSKRLRNKVAGFTTHLMRRIQRGPVRGISLKLQEEERERRMDFVPEKSALEVEEIRVDKETMEMLAALGMADLPGVERQAEVSSVPAYGRPQYGGPRRDRV

SEQ ID NO: 14392 - protein, 444 aa, Zea mays
  VARIANT 407..444: note = Derived polymorphism lacks residues 407 to 444
  VARIANT 145: note = Ancestral polymorphism is L, Derived polymorphism is Q
MGLRESLLGCFGAGGGDQQEQGHEPAAARPAASRRPGGKPTLRRLSTANLRSLSLQDLSRKLETTKLHAFTLDELRAATRNFSAANFLGEGGFGPVYKGFVDGRLRPGLQPQHVAVKYLDSDGVQGHREWLAEVVYLGMLSHPHLVELVGFCNQDDHRMLVYEYMPRQSLENHLFKNLLASLPWSTRLKIAVGAAKGLAFLHEAETPVIYRDFKASNILLDSDYTAKLSDFGLAKEGPQGDATHVTTRVMGTHGYAAPEYILTGHLTARSDVYSFGVVLLELLTGRRSVDKSRRGREQSLVDWARPYLRRADRLHRFMDPGLEAQYSPRAAEAAAKVAHQCLQSVPKARPTMRDVVDALQPLLALDDDVPIGPFVFTVGGAAGAEADGVAVADDVDDQVDAEAGGRQGSKMHVMSAVHAESPLRSRYASAVKRPESPPTLMSRA

SEQ ID NO: 14393 - protein, 368 aa, Zea mays
  VARIANT 9: note = Ancestral polymorphism is G, Derived polymorphism is E
MMLSGHGGGRRLFTASQWQELEHQALIFKYMASGAPVPHDLVLPLRLATGVDTAPSLAFPPQPSPSRTTCALLSSRPDLPRPRLMFHSDHRQPSAHHIIADDFVRVTVHAVAYWGCYGAGAPFGRKAAEDTEPGRCRRTDGKKWRCSREAHGDSKYCEKHIHRGKSRSRKPVEVTSSPAAGPAAAYRPSAISTISPPRAADAPPPSLAYPQQHLLHGASSAAGAAARVPAGALQLHLDASLHAAAAAASPSPPPSYHRYAHYTPPASSLFPGGGYGYDYDYGQSKELRRRHFHALGADLSLDKPLPEPDTGSDEKQPLRRFFDEWPRESGDMAADDATQLSISIPAASPSDLAATSASAAAARFHNGE

SEQ ID NO: 14394 - protein, 273 aa, Zea mays
  VARIANT 233..273: note = Derived polymorphism lacks residues 233 to 273
MGRRACCAKEGVKRGAWTAKEDDTLAAYVKAHGEGKWREVPQKAGLRRCGKSCRLRWLNYLRPNIKRGNISYDEEDLIVRLHKLLGNRWSLIAGRLPGRTDNEIKNYWNSTLGRRAGAGAGAGGSRVVFAPDTGSHATPAAAGSREMTGGQKGAAPRADLGSPGSAAVVWAPKAARCTGGLFFHRRDTHTPHAGGTETPTPMMAGGAGGEARSSDDCSSAASVSVSPLVGSSQHDPCFSGDGNGDWMDDVRALASFLESDEEWLRCHTAEQLV

SEQ ID NO: 14395 - protein, 734 aa, Zea mays
  VARIANT 709..734: note = Derived polymorphism lacks residues 709 to 734
MDPSTAKAAAPPNNADHVLHIQPDNLPPPHPSNNQQPNPPPPETPKLSQNPEKPPASSPSRPPLPPALLRRRSSIAKPKSRFVEPPTPMHPDSAHPSPVHPAATAAASLTATPTHRAASVSTPHTPAEADDDEDIFRNKDGSRAPASAARCRRRVRLGLELCVLVLFLGLLVVSLVVRPLQGRVLWGLEIWKWCVMVTAVFSGHLLSQWLVTLIVFVVERNFLLRTKVLYFVFGLKKSFQVCLWLALVLIAWSQLFDSEVGRSRKTARTLNYVSRFLASMLIGSVIWLVKTFLMKVVASTFHRKTFFDRIQESVFHQYVLQTLSGPPLMELAENVGREGSGLGRVSIGRAKEDKGVPEVIDVVKLRRMSQEKVSAWTMRGLITAIRSSRLSTISNTIESFDDVDGMEQKDKEINSEWEAKAAAYAIFKNVAKPSYKHIEEVDLLRFFTKEEVHLVIPMFEGAPETGKIKKSALKNWVVKAYLDRKSLAHSLNDTKTAVMQLHNLISVIVIIIIIIVTLLLMGIATTKILVVISSQLLVAGFIFGNACKTVFEALIFVFIMHPFDVGDRCVIDGTQMIVEEMNILTTVLLKNDNEKIYYPNSVLSTKPISNFYRSPNMYDTIDFAIDVSTSVESIGALRSKIKGYLESKPTHWHPVHTVNLKDILDVNKINMSLSVQHTMNFQNIREKNIRRSELVMELKKIFEEMSIRYHLLPQKVELTYVGSNPLPMGPSHTR

SEQ ID NO: 14396 - protein, 860 aa, Zea mays
  VARIANT 453..860: note = Derived polymorphism lacks residues 453 to 860
MAGVGGGARSSDRAGAARSPTTTTTTTTTAIQSTIQSIKEVVVGHSDADILDTLRESNMDPNETAQKLLNQVADPFHEVKRKRDKKKESAGQKSFADSTGQVDQNPQWMRPHTHRMENDQRRLPNQGQMSGPSHEFRVVRDNRFQHGVVENRPEPGHKGSADVQMSDRSTVVQSARNLSPATTSDGQITHQNAMQNSQSDITQGKRDGQGTTQKHAKPYLKNSQNEQHFPGSDPAHGSATVRIAGGTVGPTRRHVGVINSSRQFVGRSGSQMHAPGGSSYANIQRGSFTSVGASGRYSAFMSRNIQQNLRADTTFRGRPTGRSFIAQNVNRYHQGPTTNQKAVHPIKEWKPKLTKKSPTIDAENSIADAASPSASNCENANTTDVNGLPEKLSQANLHEVEHVIIPEHLRVPEYEQTKLRFGSFTPDLDLEQVPDLTPQDTEQPEHVQEPVQQVSEGDSLDDGHDDMDEQARSSQHLSSSTAEISLSPSEDSDQMSGQVENDDGLGLVQSDTPVGAADGDSTQITSTLTAFSAYGHKDPNIHTTNEAQLYGLVEPNVHPQALASSSQGYPSENPEADNAVQVFRMPDSNVHSQVLPSTSEALNPQIVSNSPVPISSQQQHISQQQAATQMYPQMHVQHFPNFMPYRQLYSPVYPMPMPNYSPNVPYPSNGNSYLQMPSGGSHLTAGSVKYGVSQYKPVPSGNPSGYGNYTHPAGFTMGSPGVIGAAVGVDDVNRMKYKDNIYASTPQVETSDIWIQTAREMPPLQVPSYYNIPGQATPGAFVPNPANASFNATSQSPHAQFPGLYHPQQPPSIVSPHPMVHQQVPSAIGPNVGVGVAAPGPQVGAYQQRQIGHMNWRPSF

SEQ ID NO: 14397 - protein, 141 aa, Zea mays
  VARIANT 136: note = Ancestral polymorphism is T, Derived polymorphism is M
  VARIANT 122: note = Ancestral polymorphism is P, Derived polymorphism is L
  VARIANT 113..141: note = Derived polymorphism lacks residues 113 to 141
  VARIANT 105: note = Ancestral polymorphism is T, Derived polymorphism is I
  VARIANT 101: note = Ancestral polymorphism is W, Derived polymorphism is R
  VARIANT 99: note = Ancestral polymorphism is T, Derived polymorphism is I
  VARIANT 97: note = Ancestral polymorphism is G, Derived polymorphism is R
  VARIANT 96: note = Ancestral polymorphism is P, Derived polymorphism is L
  VARIANT 94: note = Ancestral polymorphism is I, Derived polymorphism is S
  VARIANT 83: note = Ancestral polymorphism is S, Derived polymorphism is F
  VARIANT 66: note = Ancestral polymorphism is A, Derived polymorphism is T
  VARIANT 58: note = Ancestral polymorphism is N, Derived polymorphism is K
  VARIANT 47: note = Ancestral polymorphism is A, Derived polymorphism is V
  VARIANT 19: note = Ancestral polymorphism is T, Derived polymorphism is M
MATAVPTSVEGFNCTANRTYLCQVYALYRTGFAGVPLDLATIGDLFAVSRFMVTHANKLSTMAAPANGQPLLMPLQCGCPSRSPSSYMPMQYQIDPGDTYWIVSTTKLHNLTQYQAVERVNPTLVPTDLDVGTMVTFPVFC

SEQ ID NO: 14398 - protein, 1208 aa, Zea mays
  VARIANT 574..1208: note = Derived polymorphism lacks residues 574 to 1208
  VARIANT 326..1208: note = Derived polymorphism lacks residues 326 to 1208
MEAAFDAYFCAADLDRDGRISGQEAVAFFKGSGLPQPVLAQIWTYADKNRTGFLGREDFCNSLKLVTVAQSGRELTPDIVRSALFGPAAAKIPAPRINVSTAGPQTNSVASPPNATRALGSGQQNPAVRGPQVLPGASSNPQVRPPQPPNANTVPPVQGVASRPPVGGGPSGLNHTSSTTTNLATDWFSGKRSASSLGATSQAPTRGISPQGNLTTAGISAQNSTPLPVYNSHMPGATTPANANSTNVNMMPSQPSVSDSKTLVPLGNGLPSNSTFGVDPFSVTLQAKQESALTPNVPNNLPSSTAPASAAGPHHPPKPMQAGPLQGISSLPSHTSQLPHSQPAPRQQQFNAIPSTPGPVGANIPGGQIPSNPYQSQAPWPKITQVDVRKYMIVFIKVDRDRDGKITGEEARNLFLSWRLPRDILRKVWDLSDQDKDGMLSFKEFCVAVYLMERHREHRPLPDVLPDGIWAEGTSLPSTGQFAGNPSGPPSHASTGFASRGMQGPHHGMLPSSMKPTSRRPLPLDADDTVKAEQQKPKIPVLEEHLVGQLSKEEQGTLDAKFKEASDADKKVYWKVQELEKEIQDSREKTEFYRTKMQELILYKSRCENRLNEVSESMSADKREVQSLAAKYDERCKKVGDVASKLTMDEASFREIQEKKLEIYNAIVKLQKGDESDEKLQERANKIQSDLEELVKSLNEQCKRYGLRAKPTTLVELPFGWQTGIQETAATWDEEWDRFGDEGFSIIKELTVEVEPPVVPKSQPTVEDVKVSTNGASTEKEDNKFAKSTAAAAVEQAVEPEAIPSNSKLESTKSPPVSPVKNRDDGSTDELDTKQSGPNDVLPRATESVSNRGMDSSAHGDKTYDGHSWAPSFDHGTDNDSLWNFGHKDGENGDSDLFFGPQGLPPIRTGGSSSNSLFVKEQKPSFDSVPGTPMEKPFFDSIPGTPVQKSVFDYSVPSTPMQNSVFDYSIPSTPMQKPLFDSVPGTPVQKSVFDSVPSTPMQKSVFDSAPSTPTQKPFFDSFPSTPMQRSMFDSGPSRAESPTAGSVYGKEQKGFFDSSVPSTPMYNSNLTPRYSEAGDDSFDTMSQYSSFGMHDNNSFGQIDSFSRFDSFRSNADNGGNDAFARFDSFRSTSDQGGGNSFMRYDSMNSSSDHDRTDTFARFDSMKNSDFNNQGYSFDDDDPFGTGPFKSTETSNSPTRHGTDAWSAF

SEQ ID NO: 14399 - protein, 194 aa, Zea mays
  VARIANT 43: note = Ancestral polymorphism is V, Derived polymorphism is G
MGRAKVESKRIENRVSRHVTFFSKRRKGLLNLAVLCDVDVGVGVFSERGKVFQYPGLAGQAVLPPSPSSFGFLVKNNVAMAKTILAIVAIISLLVPPAAATDHDSYNAAPAPVPSSKFPTAAAAPTEYDAADEDKKKSILPIVLVVAIASLSMASLSGDSPVRAMAWKGPSSTPRAGSEEDHGSEVSQRRRAWR

SEQ ID NO: 14400 - protein, 33 aa, Zea mays
  VARIANT 18: note = Ancestral polymorphism is H, Derived polymorphism is Y
  VARIANT 16: note = Ancestral polymorphism is K, Derived polymorphism is Q
  VARIANT 8: note = Ancestral polymorphism is A, Derived polymorphism is V
  VARIANT 4: note = Ancestral polymorphism is G, Derived polymorphism is E
MDKGGHVAVKILDKAKVHKNKLAEQIRREISVP

SEQ ID NO: 14401 - protein, 226 aa, Zea mays
  VARIANT 15: note = Ancestral polymorphism is E, Derived polymorphism is G
  VARIANT 2: note = Ancestral polymorphism is A, Derived polymorphism is T
MATIDVYSHQYIKGGEVTAAIMWVSNGKTDQVSDLNDIQAGWVVDPSSYGDNKTHFFVYWTTDGYKSTGCFNLDCNGFEPVNDAPITPSDILEPENGQSKISFKIFKSKDDGDWWLHFGYDINNLKPVGFWKKIIFTNLQDHVGFITWGGYTRSPNGNASPPMGNGQWPGKNSASVQNVQFVDSSGQGYALPAWALHVSVSNKKCYQVSTFFDSMFYYGGPGGCTD

SEQ ID NO: 14402 - protein, 122 aa, Zea mays
  VARIANT 119: note = Ancestral polymorphism is H, Derived polymorphism is P
MRAKAKAKPKRFLHPKVALEVRHDLEVKEDNMSKETQNLPLDRNSIDSTSSSSKRRKRDKGNEVSKSSDPFLDMVSGIHGDLKTTSNQFGKMAGIMEREAKMTMLFALPETLRRVFILPMLQ

SEQ ID NO: 14403 - protein, 169 aa, Zea mays
  VARIANT 2..169: note = Derived polymorphism lacks residues 2 to 169
  VARIANT 8: note = Ancestral polymorphism is T, Derived polymorphism is M
  VARIANT 11..169: note = Derived polymorphism lacks residues 11 to 169
  VARIANT 13: note = Ancestral polymorphism is V, Derived polymorphism is A
  VARIANT 23: note = Ancestral polymorphism is A, Derived polymorphism is T
  VARIANT 24: note = Ancestral polymorphism is R, Derived polymorphism is H
  VARIANT 27: note = Ancestral polymorphism is G, Derived polymorphism is E
  VARIANT 31: note = Ancestral polymorphism is V, Derived polymorphism is I
  VARIANT 52: note = Ancestral polymorphism is E, Derived polymorphism is K
  VARIANT 99..169: note = Derived polymorphism lacks residues 99 to 169
MQHKLRKTPDQVVTIAREMVAYARSLGCTDVEFSPEDAGRSNREFLYHILGEVIKAGATTLNIPDTVGYNLPYEFGKLIADIRANTPGIEKAIISTHCQNDLGLATANTLAVVMAIKCRRELLDGLYTGIDSRHITLTSKMVQEHSGLHVQPHKAIVGANVFAHESGIH

SEQ ID NO: 14404 - protein, 81 aa, Zea mays
  VARIANT 8..81: note = Ancestral polymorphism lacks residues 8 to 81
  VARIANT 59..81: note = Derived polymorphism lacks residues 59 to 81
MYPHSDKWNNGTSFGIVGGLLFSMGLLGYIFSRSTVSLVLGIAPGLATLLLGTLSLKFWRSGRSSFLLILAQADMDLGVLV

SEQ ID NO: 14405 - protein, 687 aa, Zea mays
  VARIANT 318: note = Ancestral polymorphism is I, Derived polymorphism is T
MDFGDEPEGSDSQRQRKRYHRHTPRQIQQLEAMFKECPHPDENQRAALSRELGLEPRQIKFWFQNRRTQMKAQHERADNCFLRAENDKIRCENITMREALKNVICPSCGGPPVDEDFFDEQKLRMENARLKEELDRVSSITSKYLGRPFTQMPPVPTMSVSSLDLSVGGMGSLGGPSLDLDLLSGCSSGLPYQVPAPVTEMERPMMVDMAARAMDELIRLAQAGEQIWVKGVPGDAREVLDVGTYDSLFAKPGAAFRPPDINVEASRDSGLVFMSAVALVDVFMDTNKWMEFFPGIVSKAQTVDVLVNGLGGRSESLIMMYEELHIMTPVVPTRELSFLRYCKQIEQGLWAVADVSLEGQRDAHYGVPSRSRRMPSGCLIADMSNGYSKVTWVEHMEIEQMLPINVLYRNLVLSGAAFGAHRWLAALQRACERFASVATLGVPHHDVAGVTPEGKRSMTKLSQRMVSSFCASLSSSPLQRWTLLSGTTDVSVRVSTHRSTDSGQPNGVVLSAATSIWLPVPGDHVFAFVRDENARSQWDVLSHGNQVQEVSRIPNGSNPGNCISLLRGLNANQNSMLILQESCTDASGALVVYSPIDIPAANVVMSGEDPSGIPLLPSGFAILPGSGAGASSSAVVPPPGCVVTVAFQILVSNLPSSRLNAESVATVNSLIGTTVQQIKAALNCAGH

SEQ ID NO: 14406 - protein, 112 aa, Zea mays
  VARIANT 75: note = Ancestral polymorphism is H, Derived polymorphism is R
MAPVEPLPEPLDDCGPVAWPMPDFCPLTIDGALKESFLETLRKDAAEVERPAREGAEEGEEALSPDSRPSSSKRHRAGTASPSSRSSPYRNILHVFQQCRQDAVGETPTKNY

SEQ ID NO: 14407 - protein, 1040 aa, Zea mays
  VARIANT 491..1040: note = Derived polymorphism lacks residues 491 to 1040
MARRDHDDDDEEEVEEEAYDLDEEEDDEDEEDDYEEEARRGKASRGGGKGGGGRKRSREDNFIDDSAIEDEDEDDDDDGGGRPRKKGGGGVRGFFDEEAQVDEDEEEEDEGEGEDDFINDAGADLPDEDVVRGSRRHSIPMRDEEEDIDEIERQVRERYARSTHIEYGEEAAEVEQQALLPSVKDPKLWMVKCAIGHERETAICLMQKFIDRSDLQIKSVVALDHLKNYIYVEAEKEAHVKEACKGLRNIYASAKITLVPIKEMADVLSVESKSVDLSRDSWVRMKLGIYKGDLAKVVDVDNVRQRVDVKLIPRIDLQALASKLEGESVKKKAFVPPPRFFNIDEAREMHIRVERRRDKESGEYFEWVDNLKFKDGFLYKSVSTKSIHTNNIQPNFDELEKFKKPGDDMNGDMASLSTLFANRKKGHFMKGDAVIVIKGDLKNLEGWVEKVEDETVHIRPKISDLPKTLAFNEKELCKYFKPGDHVKVISGVQEGATGMVVKVEGHVLIILSDTTKEHIRVFADHVVESSEITTGITRIGDYELHDLVLLDNLSFGVIIRVEAEAFQVLKGVPDRPEVVLVKLREIKSKIDRRSSAKDRSNNIISAKDVIRVVEGACKGKQGPVEHIHKGMLFIYDRHHLEHAGFICAKAQSCLLVGGSTGGHRGNGMDTVDARLGALRSSASILQSPGRLPPRGPNMNYGGRFGGGRGGRCDALVGKCIKIKSGPYKGYRGRVKEVTGALVRVELDSLMKIVTVKRDDIADTPTVATPFREPRYSLGGETPMHPSRTPHHAYQTPMRDPGATPIHEGMRTPMRSRAWAPMSPPRDNWEDGNPATWGSSPAYQPGTPQARPYEAPTPGSGWANTPGVSFNDAPTPRDNYANAPSPYVPSTPVGQPMTPNSASYLPGTPGGQPMTPGNAGMDMMSPIIGGEGEATWLLPDVLVNVLSGGDDGPGVVREVLGDGSCRVALGSSGNGDMVTVLPNEVEVIRPKKSDKIKILNGSFRGHTGKLIGIDGSDGIVRLDDTYEVKILDMVILAKLAT

SEQ ID NO: 14408 - protein, 242 aa, Zea mays
  VARIANT 87..242: note = Derived polymorphism lacks residues 87 to 242
  VARIANT 77..242: note = Derived polymorphism lacks residues 77 to 242
  VARIANT 25: note = Ancestral polymorphism is G, Derived polymorphism is S
  VARIANT 23: note = Ancestral polymorphism is W, Derived polymorphism is R
  VARIANT 22: note = Ancestral polymorphism is P, Derived polymorphism is S
  VARIANT 16..242: note = Derived polymorphism lacks residues 16 to 242
  VARIANT 10..242: note = Derived polymorphism lacks residues 10 to 242
MANLLGDPAWPQLHPQPYTDTPWPGLQCELAPDNARVLRATRLHLGPDVATPPCRPGARLDPTSLRPATPPDTLHLRLLRHNPRCSRSLITLMEFVPPMSLHRIIYELSPPSSSGLFSNFSSVHLGDLSDLETFDYLIPPMGMDKCCANNVDNNNVHKADMVMNGLHISVYASETLGWCGGHVHRRLMSKMLGRIGDSPPIKFGTYRCDACAVSCTLKWDMATFMEYKGLPLQQAVDYYVRA

SEQ ID NO: 14409 - protein, 269 aa, Zea mays
  VARIANT 173: note = Ancestral polymorphism is K, Derived polymorphism is N
  VARIANT 140: note = Ancestral polymorphism is G, Derived polymorphism is R
  VARIANT 18: note = Ancestral polymorphism is D, Derived polymorphism is N
  VARIANT 14: note = Ancestral polymorphism is C, Derived polymorphism is R
MRMLNVDPMFFVLCARADCYLIFFSETIVEVEKTKLEEEADVLSEIEEEKLESELDAQEGSFEVAKLRHGVRKQSPDAELVVLPPPFWGSQDPNSVFQVFLVPAPKLLVDQNHCSSSTTPFYRHYKWDLVGPLKLVADFGLQYWSAQVHLGQQGAAGFHSTGGAERTACRMRKNTLHPFQIIVHFGCIKPCLFLSVSSLCMLHEIKQTIQFVGELISGNVPYPVDQHHLDDPHIEANLLFQAHFSKAELPISDYLTNLKSVLDQSIRII

SEQ ID NO: 14410 - protein, 63 aa, Zea mays
  VARIANT 2..63: note = Derived polymorphism lacks residues 2 to 63
  VARIANT 12: note = Ancestral polymorphism is A, Derived polymorphism is T
  VARIANT 13..63: note = Derived polymorphism lacks residues 13 to 63
  VARIANT 15..63: note = Derived polymorphism lacks residues 15 to 63
  VARIANT 20: note = Ancestral polymorphism is P, Derived polymorphism is H
  VARIANT 33: note = Ancestral polymorphism is E, Derived polymorphism is K
  VARIANT 36: note = Ancestral polymorphism is M, Derived polymorphism is I
  VARIANT 37: note = Ancestral polymorphism is G, Derived polymorphism is D
  VARIANT 39: note = Ancestral polymorphism is V, Derived polymorphism is M
  VARIANT 41: note = Ancestral polymorphism is S, Derived polymorphism is L
  VARIANT 44: note = Ancestral polymorphism is S, Derived polymorphism is W
MQMLSDIHFQRAWVQGVILPVSKLQQSWRTTLEEMIGPVSSTFSSCQNKQRDDSGGQSSETLI

SEQ ID NO: 14411 - protein, 97 aa, Zea mays
  VARIANT 90..97: note = Derived polymorphism lacks residues 90 to 97
  VARIANT 63: note = Ancestral polymorphism is P, Derived polymorphism is L
  VARIANT 55: note = Ancestral polymorphism is R, Derived polymorphism is Q
  VARIANT 53..97: note = Derived polymorphism lacks residues 53 to 97
  VARIANT 50: note = Ancestral polymorphism is A, Derived polymorphism is V
  VARIANT 45: note = Ancestral polymorphism is V, Derived polymorphism is I
  VARIANT 43: note = Ancestral polymorphism is R, Derived polymorphism is W
  VARIANT 42: note = Ancestral polymorphism is P, Derived polymorphism is S
  VARIANT 33: note = Ancestral polymorphism is G, Derived polymorphism is C
MVTDGNVNLNTLMNMFSVLGAGGGLGGRNASNGSGPPCLRLPRDVHAAIAREQLRQPHRRVAPALVSQARVTVGAHAEEGMIHAEQPKARCHLRCHA

SEQ ID NO: 14412 - protein, 406 aa, Zea mays
  VARIANT 111: note = Ancestral polymorphism is R, Derived polymorphism is W
MATPPTALLLLLAAAAAFHGATAKTTIEPCSGADACPALLGYKLYADMKVSEVAALFGADPAAVLAANALDFASPGAANRILPAGTPLRVPTRCACADGVRKSVAIRYAARPSDTLGSISEVVFAGLPSADQIRTANGLAAEDPDAPLNPGQELVIPLPCVCFNSTDNNLPAVYLSYVVQVGDTVESIAASHTTTVTDISNVNAMGSPIVAPGDILAIPLSACASAFPNSASDYGLLVANGTYALTAGNCVECSCGPANLNLYCTPSSLSASCSSMQCSNSSLILGNVTAQPTTGGCSVSSCNYDGYVNGTIATSLSSGLQPMCPGPHQFPPLTAVPTAANHGSYSPSPAPGPGDAGGATPGGSSLSPSNEPAGNSSQAAAINQPCRFLLIFILSVTLSLRVWIPV

SEQ ID NO: 14413 - protein, 393 aa, Zea mays
  VARIANT 363: note = Ancestral polymorphism is L, Derived polymorphism is P
  VARIANT 350..393: note = Derived polymorphism lacks residues 350 to 393
  VARIANT 191: note = Ancestral polymorphism is S, Derived polymorphism is L
  VARIANT 98..393: note = Derived polymorphism lacks residues 98 to 393
  VARIANT 93: note = Ancestral polymorphism is G, Derived polymorphism is D
MNCSMPGLVAYALFFTLLFTAPATSTAGLTMRADLTHVDKGRGFTRWELVSRMAARSRARAASLYHRGGHYGDPVTATVVRMPAEYLIHLNIGTPRPQRVALTMDTGSDLCFYLCSYGDRSITAGHIFKDTFTFMSPNGVPVAVSELAFGCGDYNTGLFVSNESGIAGFGRGPQSLPSQLKVGRFSYCLTLVTESKSSVVILGTPPDPDGLRAHTTGPFQSTPIIYNPLIPTFYYLSLEGITVGKTRLPFDKSVFALKKDGSGGTVIDSGTSLTTLPEAVFELLQEELVAQFPLPRYDNTPEVGDRLCFRRPKGGKQVPVPKLILHLAGADMDLPRDNYFVEEPDSGVMCLQINGAEDTTMVLIGNFQQQNMHVVYDVENNKLLFAPAQCDKL

SEQ ID NO: 14414 - protein, 296 aa, Zea mays
  VARIANT 101..296: note = Derived polymorphism lacks residues 101 to 296
MDEAASASAAAARLRASTPRSKKRTSRSKSRGRSPNPNPSSRRERAADHGSAAPSRKSDRKPNRSFPDSATLATAMASVPAASAPSSGGGRGSAGAVQKLWSEVDEVALLTGAAAFKDRTGIAPRLPDMGELFESIRGSLAPHLDQAKVYYKLKRLKSKFQHSVLGDSSTAHEHRLRDLGAALWGAELTRPEENAVVTAEETTDPDEGFIDEDREGSVKLPMVKEVLGEYWRLNGQTMSGVSLEKGLVLLGSQQASVVEVKWRRQLEADMRMQMRRHDLEKEVYGLLIDAIKGLGP

SEQ ID NO: 14415 - protein, 139 aa, Zea mays
  VARIANT 117..139: note = Derived polymorphism lacks residues 117 to 139
  VARIANT 54: note = Ancestral polymorphism is G, Derived polymorphism is D
  VARIANT 51: note = Ancestral polymorphism is T, Derived polymorphism is M
  VARIANT 47: note = Ancestral polymorphism is V, Derived polymorphism is A
  VARIANT 45: note = Ancestral polymorphism is A, Derived polymorphism is D
  VARIANT 42: note = Ancestral polymorphism is P, Derived polymorphism is L
  VARIANT 32: note = Ancestral polymorphism is K, Derived polymorphism is N
MWKDNIVDVKYKENGQDLYLGLANSEIATRKNMGRVAKISVPVMASVLALMATGMYLVWICKLRELPFVIFGNNATATDNFSSENMLGQGGFGKVYKNRENYGIACSVQQWRNKTTQGMLGHNIEVAIKRLGQGSGQGA

SEQ ID NO: 14416 - protein, 211 aa, Zea mays
  VARIANT 2: note = Ancestral polymorphism is A, Derived polymorphism is T
  VARIANT 21: note = Ancestral polymorphism is A, Derived polymorphism is V
MAASVFPALLLAVAAVLLLPVAEAVWLELPPSGTKCVSEEIQPNVVVLADYAIMYESHPSSHPTVAVKVTSPYGNTVHHNENATTGQFAFTTSEAGNYLACFWIDSVEKGSGTSLNLDWKIGIAAKDWDTIAKKEKIEGVELELRKLEAAVESIHHNLLYLKAREADMRTVSERTNSRVAWFSILSLGVCVAVSVLQLWHLQGFFRKKKLI

SEQ ID NO: 14417 - protein, 439 aa, Zea mays
  VARIANT 6: note = Ancestral polymorphism is R, Derived polymorphism is C
  VARIANT 86: note = Ancestral polymorphism is L, Derived polymorphism is V
MPPPLRCLLLAFVVVLSGFPRLAHPFTALESDQIARFQEYLRIRTAHPSPDYAGASAFLLHYAASLGLHTTTLHFTPCKTKPLLLLTWRGSDPSLPSVLLNSHMDSVPAEPEHWAHPPFAAHRDPTTGRIYARGAQDDKCLPVQYLEAIRGLQAAGFAPARTIHISLVPDEEIGGADGFDKFARSEEFRALNIGFMLDEGQASPTDVFRVFYADRLVWRLVVKAAGAPGHGSRMLDGAAVDNLMDCVETIAAFRDAQFRMVKSGEKGPGEVVSVNPVYMKAGIPSPTGFVMNMQPSEAEVGFDLRLPPTEDIEQIKRRVEEEWAPSHKNLTYELVQKGPATDVSGRPVSTATNASNPWWLTFERAIASAGGELSKPEILSSTTDSRFARQLGIPALGFSPMTRTPILLHDHNEFLEDRVFLRGIQVYEHVIRALSSFQG

SEQ ID NO: 14418 - protein, 239 aa, Zea mays
  VARIANT 12: note = Ancestral polymorphism is A, Derived polymorphism is D
MVKTAASSSSDDAAAAKRRTYKGVRMRSWGSWVSEVRAPGQKTRIWLGSHATAEAAARAHDAALLCLRGSAADLNFPLRLPFDLPPAATMSPKAIQRVAAAAASASSSSSCGGGGGLRAPPPFAPRAENNGTSACSDGDGDATPASSTTSSPTSHADDVSSPDSTVSSAGDVDYYTSLADIDAFFQSPKCVVDYALMDPCSAFFAPDSTAADDDGGCCWAWEEDGGGIALWSFSATLDC

SEQ ID NO: 14419 - protein, 121 aa, Zea mays
  VARIANT 22: note = Ancestral polymorphism is D, Derived polymorphism is Y
  VARIANT 51: note = Ancestral polymorphism is G, Derived polymorphism is R
  VARIANT 94: note = Ancestral polymorphism is C, Derived polymorphism is Y
  VARIANT 108: note = Ancestral polymorphism is R, Derived polymorphism is G
  VARIANT 112..121: note = Ancestral polymorphism lacks residues 112 to 121
MVHSMAGRPGDGTTYQSIQPWDFAFVPLNDMASRGVISTEMLDSFYMPLYGPSDKELMEIIQNKGSFEINDVQVHEQMSGVDKSLQTPKITALCVRDNDRPAFWTLGRSHGRVRENQLSMT

SEQ ID NO: 14420 - protein, 186 aa, Zea mays
  VARIANT 155..186: note = Derived polymorphism lacks residues 155 to 186
  VARIANT 143: note = Ancestral polymorphism is R, Derived polymorphism is H
  VARIANT 132..186: note = Derived polymorphism lacks residues 132 to 186
  VARIANT 108: note = Ancestral polymorphism is S, Derived polymorphism is N
  VARIANT 105: note = Ancestral polymorphism is E, Derived polymorphism is K
  VARIANT 99: note = Ancestral polymorphism is A, Derived polymorphism is V
  VARIANT 98: note = Ancestral polymorphism is A, Derived polymorphism is V
  VARIANT 90: note = Ancestral polymorphism is G, Derived polymorphism is C
  VARIANT 87: note = Ancestral polymorphism is V, Derived polymorphism is A
  VARIANT 78: note = Ancestral polymorphism is A, Derived polymorphism is V
  VARIANT 68: note = Ancestral polymorphism is H, Derived polymorphism is D
  VARIANT 67..186: note = Derived polymorphism lacks residues 67 to 186
  VARIANT 40: note = Ancestral polymorphism is K, Derived polymorphism is T
  VARIANT 29: note = Ancestral polymorphism is Q, Derived polymorphism is E
  VARIANT 28: note = Ancestral polymorphism is I, Derived polymorphism is T
  VARIANT 25: note = Ancestral polymorphism is S, Derived polymorphism is F
MFQSVYSGSRARWLLVVKDLHSRVSVVIQAVDAISKRIEKIRDEELQPQLVELIQGLIRMWKLMLECHHKQFITITLAYHVKDSTSARQGEHHHHRQAAMHLWNEMDSFSSSFRNWVTAHKSYVKALNAWLQKCVLQPPQDRRRRKRKVSFPPRQAVSLPYSSSVGTGSPGQNHSLLMSYADPSKT

SEQ ID NO: 14421 - protein, 66 aa, Zea mays
  VARIANT 5: note = Ancestral polymorphism is P, Derived polymorphism is L
  VARIANT 12: note = Ancestral polymorphism is E, Derived polymorphism is K
  VARIANT 49: note = Ancestral polymorphism is G, Derived polymorphism is R
MLELPAGMLDDEKGDFVGTAVHEVEEETGIKLNIEDMVDLMTLLDPTTGGRMLPSPVTGQNFYSPG

SEQ ID NO: 14422 - protein, 98 aa, Zea mays
  VARIANT 40: note = Ancestral polymorphism is Q, Derived polymorphism is R
  VARIANT 16: note = Ancestral polymorphism is A, Derived polymorphism is T
MAFMRYRALPRGELTAEEFRAWLAQFDADSDGRISREELRHALRSLNVRFAWWKARGGVRAADADRDGGVQLGEDEVARLFAFAQSHLRVKIAQLGYY

SEQ ID NO: 14423 - protein, 399 aa, Zea mays
  VARIANT 70: note = Ancestral polymorphism is S, Derived polymorphism is L
  VARIANT 40: note = Ancestral polymorphism is P, Derived polymorphism is S
  VARIANT 35: note = Ancestral polymorphism is E, Derived polymorphism is D
  VARIANT 19: note = Ancestral polymorphism is G, Derived polymorphism is V
MWPGCGGRFYWAPESAPPGQARGVAVLFAWVWSDETQLRPFVELYSSLGWRCLVCHPDLVALYLSEKAISLATGVINELVKELKIKIVPIVLASFSGGSKGCMYKVIQLLDGICEGDAIMKDYRLVRNCICGQIYDSSPVDFVSDVGAQFVQKPADGNSSQPTILHSWMAKALASVMDTLFPSRIEAQRAEYWHTLYSAAGLGPVLLFCSEADNLAPCYIICGFARRLIELGTEVKLMKWNSSQHVGHYNSHETEYRTAVDDMLKKALLTFCHRSQLYDSNMAGDREYKIAHSVCSLHNAAANSNESLRGVPNSPSDHFFLPSSKDHDESQEPGSHMSHPPCMEPKGVLGQILFDVCVPRNVEGWDIKPTVSPNGRPTFASARQLGPFNPIRYFRRSRL

SEQ ID NO: 14424 - protein, 401 aa, Zea mays
  VARIANT 78: note = Ancestral polymorphism is E, Derived polymorphism is V
  VARIANT 73: note = Ancestral polymorphism is G, Derived polymorphism is S
  VARIANT 49: note = Ancestral polymorphism is S, Derived polymorphism is I
  VARIANT 44..401: note = Derived polymorphism lacks residues 44 to 401
MTVRVVMRYLVNKLGLEDDSQNCSGALRAVEESACDAEVVRPLSKLPNSSIGLYDSSFERDACGVGFVAELSGDYKHVTVNDTIEMLERMAHRGACGCEKNTGDGAGIMVALPHDFFKEVAKDAGIELPPLGEYAVAMFFMPTDEKRRKKGKAEFKKVAESLGHVILGWRLVPTDNSDLGESALETEPLYILRRLSIISVRASLNIKRGGERDFYMCSLSSRYMLARNLSSSLACSWKDDHNRKVPFLPSGFLATKLKVAFCLRSHHSHFILCVLLSAPGRQWACCSASRTCTGSRMFGPVQDVRIPYQQKRMFGFVTFVYAETVKVILSKGNPHFVCDARVLVKPYKEKGKVPGRFRKLQHTHHGGAEFVGCASPTGLLDSRDPYALLLLSGAQVNVLSM

SEQ ID NO: 14425 - protein, 281 aa, Zea mays
  VARIANT 1: note = Ancestral polymorphism is M, Derived polymorphism is I
MELKKSPASSSPPPPPTGFRSDSAAASPYVTAPSSPRGRLVPSEGAAGALFLTAPPSPSPFGLLPPATPTRLTGADPFDLFQHFTRPPLPPPGLLDGGSVTPSPRSPVVARGAGATWSPRRRSRVGSGVDFDPFTAALLEATKAPSPLGGKDDEGGVAVAPHGSPPTRPATRPASRSAGWRRWRLSDLLLFRSSSDGGRVNSSTCPSRGRAQQPPAVTIKASATKREDMGKGWKHGDGDAAAAADSVAGCARLSPLQRLAKGLGAYSWHNHRGMAAPATKG

SEQ ID NO: 14426 - protein, 389 aa, Zea mays
  VARIANT 26: note = Ancestral polymorphism is T, Derived polymorphism is S
MEGRGAEQAPEAAAEVKNPRCFMDVTIGGEMEGRIVVELYASVVPRTAENFRALCTGEKGIGAASGKPLHFKGSCFHRVIKGFMIQGGDTTAGDGTGGESIYGSKFEDENFVLKHERKGMLSMANSGPNTNGSQFFITTTRTPHLDGKHVVFGRVMKGMGVVRSIEHVSVGEADCPTLEVKIVDCGELPEGADDGVVNFFKDGDTYPDWPNDLEEKPAEVSWWMDAVESAKAYGNDNFKKQDYKAALRKYRKALRYLDLCWEKEEIDEDKSTALRKTKSIILTNSSACKLKLGDSSGALLDADFALREREGNAKAFFRQGQAHIALNDIDAAVESFKQALELEPNDAGIKRELAAAKKKIADRRDQERKAFARIFQSSGKSDKSNEENN

SEQ ID NO: 14427 - protein, 310 aa, Zea mays
  VARIANT 124..310: note = Ancestral polymorphism lacks residues 124 to 310
  VARIANT 127: note = Ancestral polymorphism is A, Derived polymorphism is T
  VARIANT 150..310: note = Ancestral polymorphism lacks residues 150 to 310
MDPAVDASASTAQADSNVSAAVPAPDPSPPLPAPEAETVDPPPPPPAPAPKTVTWSEKLTSESPTHVHAAAAAESSQYVSRGPASSSSKGAVEAMRETLSRWGKSWGETTKMVESLSRDTWQHWKKANIGQILQQSNFKSLKTDYSCRSWAKVLSVKTGPSFTEAAMGRLAQGTKVLAEGGYEKIFKQTFEVLPDEQLKICFACYLSTSAGPVMGVLYISTAKIAFCSDNPLSYKAGNKTEWSYYKARVVIPLHQLRAANPSVSKLSPAEKYIQVVSIEGHEFWFMGFLMYDKAATSLQEALASARELQP

SEQ ID NO: 14428 - protein, 213 aa, Zea mays
  VARIANT 21: note = Ancestral polymorphism is S, Derived polymorphism is W
MASGGASSLALAALLLVSCASAAVATKYTVGDASGWTTTGDYATWASGKKFKVGDSLEFKYAGGAHTVDEVSAADYAACSSSNALSTDSAGATTVTLKTAGKHYFICGVAGHCSSGMKLVVDVAKAVAAPAPAPAAAAAPAPAADTAPDAPDTTPSTPTSPSSSGGRTPKSPDTTVLSPPDKKSTSSGATGLSAAAWAGLGLAGLVAVHLGAF

SEQ ID NO: 14429 - protein, 327 aa, Zea mays
  VARIANT 212: note = Ancestral polymorphism is P, Derived polymorphism is S
  VARIANT 133: note = Ancestral polymorphism is S, Derived polymorphism is L
  VARIANT 124: note = Ancestral polymorphism is G, Derived polymorphism is D
  VARIANT 116: note = Ancestral polymorphism is G, Derived polymorphism is S
  VARIANT 112: note = Ancestral polymorphism is W, Derived polymorphism is R
  VARIANT 111: note = Ancestral polymorphism is T, Derived polymorphism is I
  VARIANT 109: note = Ancestral polymorphism is R, Derived polymorphism is C
  VARIANT 71: note = Ancestral polymorphism is R, Derived polymorphism is C
  VARIANT 42: note = Ancestral polymorphism is M, Derived polymorphism is T
  VARIANT 20: note = Ancestral polymorphism is T, Derived polymorphism is I
MGGRKMRASMTTLLIRLVLTVALLGGEAARRCAAFNPRVLFTVKPDPIVLRDHRGALLTGNHTVNLLFYGRFTAAQRAIVVDFVRSLSDASAPRPEPPGAPPSVAAWWCTIRLYRGGGARLRLGRQIIDERMSLGRGPLSPGNVTALARAAGHHRGAITAVLTAADVPVASFCVSRCGAHGHDRGGAHSRARYAYLWAGNPAQQCPGQCAWPFHLPTYGPRTPPLVPPNGDVGVDGMVISLAALLAGTVTNPYGDGYYQGDAGAGLEAATVCAGIFGTGSYPGYPGKLLTDPATGASYNAVGLGGRKYLLPALWDPATSQCKTLVQT

SEQ ID NO: 14430 - protein, 336 aa, Zea mays
  VARIANT 79: note = Ancestral polymorphism is T, Derived polymorphism is I
  VARIANT 215: note = Ancestral polymorphism is Q, Derived polymorphism is R
MASASSSFRLALFLVLLAFVSLARHATGEASPSRRLMELYKPPPSDLLRYHDGAVLSGDIPVSVLWYGRFTPAQKAIVTDFLLSLSAAPTSPAPSVSQWWGTIDRLYLSKAADAAAVGKSGAHGGGGGRKGARVVLAGQVSDEGCSLGKSLTLAQLPALAAAARPAKGGLALLLTAQDVLVEGFCMSRCGHHGSYGARPRVAAAAYAWVGNPGTQCPGQCAWPFHQPPYGPQAPPLVPPNGDAGMDGAMISVASMVAGAVTNPFGDGFYQGDRAAPLEAATACAGVYGNGAYPGYAGQLLVDAATGASYNANGARGRKYLLPALYDPDTAACTTLV

SEQ ID NO: 14431 - protein, 77 aa, Zea mays
  VARIANT 42: note = Ancestral polymorphism is P, Derived polymorphism is L
  VARIANT 35..77: note = Derived polymorphism lacks residues 35 to 77
MRMACAAAMPIDLSPAQAPTDEEVKAVEEDNKFRQNGCENYPFLEMDREHDNIINCTTPNFTRDEHHETSAGETGGI

SEQ ID NO: 14432 - protein, 184 aa, Zea mays
  VARIANT 147: note = Ancestral polymorphism is M, Derived polymorphism is T
  VARIANT 76: note = Ancestral polymorphism is A, Derived polymorphism is T
  VARIANT 43..184: note = Derived polymorphism lacks residues 43 to 184
  VARIANT 42: note = Ancestral polymorphism is D, Derived polymorphism is V
  VARIANT 20: note = Ancestral polymorphism is P, Derived polymorphism is S
  VARIANT 8: note = Ancestral polymorphism is S, Derived polymorphism is F
MRVALGKSSRIYSPSLRLFPLATTLGPSTSTTGTSGIIRILVWADIINAHIVPGTGIVDGLKLKGLPKGKGLLLLAEMSSAGNLAWTTLLRLWMARRGEGRLTVDGAHEARKEWRAFSGSLLRSNGVNVHVPRHGADAAQLARMKYMKLGSKPDVLQTEGNNIRCLRGHHAALLMVHVLMVFIT

SEQ ID NO: 14433 - protein, 72 aa, Zea mays
  VARIANT 9: note = Ancestral polymorphism is L, Derived polymorphism is F
  VARIANT 68: note = Ancestral polymorphism is S, Derived polymorphism is R
MAVEAETVLRPLQFLAAGAAGDGEVSVVFLATEKDRPVDPMIWGDEKRMKRELLVWAKAVASMVASCSIRAL

SEQ ID NO: 14434 - protein, 368 aa, Zea mays
  VARIANT 242..368: note = Derived polymorphism lacks residues 242 to 368
MGRVKLQIKRIENNTNRQVTFSKRRNGLIKKAYELSVLCDIDIALIMFSPSNRLSHFSGRRRIEDVITRYINLPEHDRGGVVRNREYLMKMLAKLKCEGNIAEQLTPNKEPINSNVEELQQEIKTYQHQMEVLKEQLRMFEPDLTTLMSMNDFETCEKFLMDTLTCVEERKKYLLCNHVAPFDPSASDMQQHVDVGMFALPPAPPHQQEQQGDDLGGAASAFGGDVSWFADGMPTSSIFAASDPILYFRDQVMFDSTSTMRRDSMVAGVDPGMTSVCQMEQQAPSVDWQQAYTSAEFFSTLIPSTPYPLDDQMQNDMAQVLTSPMVPPHEHDKVEVPMSSSNVPTDGDCGTTLAAAQEDGLPGVVNIG

SEQ ID NO: 14435 - protein, 108 aa, Zea mays
  VARIANT 38: note = Ancestral polymorphism is H, Derived polymorphism is Q
MKPLHGHLTVLPRARSFISPAKTTANLERCDNRIDVAQQSLYIPLYFASLLLSPIISKLWLQKAFGKVTIQIDRVVMLGSVAGEYTLLPESKSGPNRNLEIEFQWSNK

SEQ ID NO: 14436 - protein, 1921 aa, Zea mays
  VARIANT 1577: note = Ancestral polymorphism is I, Derived polymorphism is T
  VARIANT 1543..1921: note = Derived polymorphism lacks residues 1543 to 1921
MAAALAWRFNGTNGGAHGSADLERHTDKVQDSEPQTPMSIVKMGKNRVNVEDEETLSSVAQCIEQLRQSSSSSQEKESSLKQLLDLVQTRDTAFGAVGSHSQAVPILVSLLRSGPSGVKMLAATVLGSLCKEEELRVKVLLGGCIPPLLALLRSKSAESQTAAAKTIYAVSQGGIRDHVGSKIFSTENVVPVLWEQLKISLKNESLVDGLLTGALKNLSKNTEGFWSATVQCGGVDILIKLVSSGQTNTLANTCYLLGSLMMEDSSVCSKVLSGETTKQLLKLLGPGNETSIRAEAAGALKFLSAQSKEARRQIANSNGIPSLINATIAPSKEFMQGESAQALQENAMCALANISGGLSYVISSLGESLESCSSPAQIADTLGALASALMIYDTNAESISASNPVDIEKTLLKQFKPKVPFLVQERIIEALASLYGNPVLCKTLADSDAKRLLVGLITMAATEVQDDLTKSLFALCKKDCDLWQALQGREGVQLLISLLGLSSEQQQECAVALLALLSKENDESKWAITAAGGIPPLVQILETGSSKAKEDSATILGNLCNHSEDIRACVQSADAVPALLWLLKNGSDNGKEIASKTLNHLIHKSDTGTISQLSALLTSDQPESKVYVLDALKSLLSVAPLNDILHEGSAANDAVETMIKILSSPKEETQATSATALAGLFHCRKDLRETHIAVKTLWSVMKLLDMQSNKILTGASCCLAAVFLSIKENKEVAAIGRDALNPLVSLANSSVIEVAEQATRALANLFLDQELSLQVPFEEILFRVTRVLREGTIDGRTHAAAAIARLLQCRTINQPLSDTVNRSGSVLALAGLLEAANGEAAATSEVLDALVLLSRSKASSGHTKAPWAILAENPHTILPLVSCIADAAASLQDKAIEVVSRLCSDLHDVVGGLVSETPGCMSSITRRIIGSNILKVKVGGCALLVCAAKEYCQKQIEVLNDASLYIQLIHSLIGMIHMANTQAENVSSESISDIRISRHSKENNSDGETLCCTAVISGNMIPLWLLAIFSRHDSKTRAELLEMGAVEMLIEKISQNAFQYVGEEDNTSWVCSLLLTLLFQERETIRSNSALHSIPVLSNLLRSDEPAYRYFAAQALSSLVCNGSRGTLLAVANSGAAIGLISLLGCADVDIADLLELSEEFMLVPNPDQIALERLFRVDDIRVGATSRKSIPLLVDLLKPIPERPGAPFLALGLLTQLAVDCPPNMLLMAEAGILEALTKYLSLSPQDATEEATTELLGILFSSPEIRHHESALGVVNQLVAVLRLGGRNSRYSAAKALESLFCADHVRNSESTRQAIQPLVEILSTGMEREQHAAISALVRLLSDNPSRALAVADVEMNAVDVMCRILSSDCSVELKGNAAELCCVLFTNTRIRSTMAAARCVEPLVGLLVSEANPAQLSVVRALDRLLDDEQLAELVAANGAVIPLVGLLYGKNYMLHEAVARALVKLGKDRPACKLEMVKAGVIESILDILHDAPDFLCIALAEMLRILTNNATIAKGPSSAKVVQPLFSLLSKADMGPEGQYSTLQVLVNILEHPECRADYNLTPRQTIEPVITLLNSSPPAVQQLAAELLSHLLLEDHLQKDTVTEQAITPLIQVLSSGLPNLQQRAIKALANLAIAWPNTIAKEGGVFELSKVLLQSDPPLPHVVWESAASVLSSILQYSTEFFLEVPVAVLVQLLRSGTESTVVGALNALLVLESDDSTSAEAMAESGAVEALLDLLRSHQCEETAARLIEALLNNVRIREAKAAKNAIAPLSMYLLDPQTQSQQGRLLAALALGDLFQNEGLARSTDAVAACRALVNLLEDQPTEEMKVVAICALQNLVMYSRANKRAVAESGGVQVLLDLISSSNPDTSVQAAMFVKLLFNNHTIQEYATSETVRVITGKQYPFLVLSYSFA

SEQ ID NO: 14437 - protein, 496 aa, Zea mays
  VARIANT 155: note = Ancestral polymorphism is R, Derived polymorphism is W
MAIEDVANGRPTANGSGCDVKAHFVFIPLMFQGHLIPAVDTALLLATHGALASIVVTPSNTGRIRPTVDFARKSGLAVRLVELPLDLAAEGLPDGADDVDKVPPDLWTNYFRALARLREPLERHLRERAPYPTCVVADFCHPWARELAASLQVPRLCFFSMCAFCLLCQHNVERFHAYDGVADDHELVVVPGLEKRVEVSRAQAPGFFRGMPGFEKFADDVEQVLTEADGIVTNSFVEMEPEYVAGYQEARAMKVWTVGPVSLFHQRAATLASRGNTAAIGADECLRWLDGKEADSVVYVNFGSIAHAQPKQVVELGLGLEASGHPFVWVVKNAEQYGEEVGEFLHDLEARVASRGLLIRGWAPQVLILSHAATGSFVTHCGWNSTMEAITAGLPVVTWPHFSDQFLNAKFAVEVLGIGVDVGVTEPLMYQLEQKEIVVARDVVEKAVRNIMHGGDEGEERRRRARALAAKAKTAVEKGGSSHANVLDLINCFKTA

SEQ ID NO: 14438 - protein, 301 aa, Zea mays
  VARIANT 10..301: note = Derived polymorphism lacks residues 10 to 301
MAQRGELGRQLPLRGPLKALEADIHHANAMADVIQRNYGGSCVQMRLSFSSLAPLFLYFIQWLDCGCCYALPSYLGLFHILMQGKIAVYADGDSSVSTYERRASLREFYGDCLKRIRSTDLWVLTNSNDVIDPAHLEKENVSLVNDGPETMQIDSPSPQDAARSWYIEIWSALYCRCVRLSTKAVGVQDYYGLLKSILLWYDGLCLIVTSLADPYVNIIFGAVVDDRYTGEIHVTIIAIGFPQSFQKSLLVDPKGARIVESKEKAATLAHKAAAAADQSVGAMLQELEKEIDDVDAQIGNL

SEQ ID NO: 14439 - protein, 264 aa, Zea mays
  VARIANT 183: note = Ancestral polymorphism is W, Derived polymorphism is R
  VARIANT 10..264: note = Derived polymorphism lacks residues 10 to 264
MESGLASVAQGMEGCVISNKETGAYGMPSATNNPDASGQSFSEALKSSRKHPLQYDASESADGGLGVHRPPAGSFARCHGNDVMFPDLQSIVCQQEHGSAAAHRPSFAKPKPRLLLALGSSRCRACAAAASARGGARGWRRATAHRSRLASFRAQLYFKEQHGDPPVASSTQLPAVQTGSDRWAHPLMKPEKGCLLIATEKLDGSHIFERTVILLLSSLGPDGVILNRPSLMSIKEASGSICADDADIACAFAGRPLFFGGKAD

SEQ ID NO: 14440 - protein, 347 aa, Zea mays
  VARIANT 266: note = Ancestral polymorphism is S, Derived polymorphism is P
  VARIANT 277: note = Ancestral polymorphism is T, Derived polymorphism is I
MVDLIILAKVFLRLVNQPMFIFQSEGIILACARSKYHRTCLHRHKLIDLKFENGMDYSKGEYAKAIEKSFSFLSESSFSSSPWSSTSSEASLSSLSSFSSDDFSGYDSSSLLSPMHPEMTVNGKVTLKDKYSVTVVYDNQFFALRKKCCPSELAYITSLSRCKKWNAQGGKSKAYFVKTTDDRFIIKQINKTEFESFIKFAPDYFKHVYHSLDTGSQTCLAKILGIYQVKQIKHGKEVKIDLMVMENLLFGHNISRIYDLKGAIFSRRVTDSNDHDTVYLDQNYVEDMSFSPIYIGGRTKHLLQRAIWNDTSFLTSVNVMDYSLLVGVDKEKHELVFGIIDYLRQYT

SEQ ID NO: 14441 - protein, 263 aa, Zea mays
  VARIANT 212: note = Ancestral polymorphism is L, Derived polymorphism is P
  VARIANT 207: note = Ancestral polymorphism is D, Derived polymorphism is G
  VARIANT 171: note = Ancestral polymorphism is I, Derived polymorphism is S
  VARIANT 92: note = Ancestral polymorphism is V, Derived polymorphism is E
MAFAVSDELLGTFVPIAVYWLYSGLYVVLDGLGMDDYRLHPKGEEARNIVSRWTVVRGVLVQQAFQIAVSLLLFTVLGDDNGTVRKQPPALVMALQFLIAMFVMDTWQYFMHRYMHINRFLYKHVHSKHHTLVVPYAFGALYNHPLEGLILDTVGGALSFLISGMTPRIGIFFFSFATIKTVDDHCGLWLPGNILHVFFSNNSAYHDIHHQLYGNKYNFSQPFFVMWDKILGTYMPYTLETRKGGGFEARPVKLDQAQQIKAD

SEQ ID NO: 14442 - protein, 691 aa, Zea mays
  VARIANT 346..691: note = Derived polymorphism lacks residues 346 to 691
MSPTTMSLTTTTSRLPICRARDVSKQAPPAAKAAPPPSPSDTNGFSRRRLLRSAALGFGLGLARRDPARARAETTPPSPALAPEEVTSNRMSYSRFLDYLNANAVRKVDFFENGTVAVVELDDPALASRVHRVRVQLPAGGLPAELVRKLRDRGVDFAAHPVEPNLGLMFLDLLLNFGFPLLFLASLIWRSVTMNNPGAGGGGPNLPFGLGRSKAKFQMEPNTGITFDDVAGVDEAKQDFQEIVQFLKSPEKFTAVGARIPKGVLLVGPPGTGKTLLAKAIAGEAGVPFFSLSGSEFIEMFVGVGASRVRDLFNKAKANAPCLVFIDEIDAVGRQRGTGIGGGNDEREQTLNQLLTEMDGFSGDSGVVVIAATNRPDILDAALLRPGRFDRQVSVGLPDVRGREEILRVHSSNKRLDPDVSLSVVAMRTPGFSGADLANLMNEAAILAGRRGKDRIGVKEIDDSIDRIVAGLEGTSMTDGKSKLLVAYHEIGHAVCATLTPGHDAVQKVTLIPRGQSRGLTWFLPGEDPTLVSKQQIFARIVGGLGGRAAEEVIFGEPEVTTGAAGDLQQVTQVARQMVTTFGMSEIGPWALMEPAAQSGDVVLRMLARNSISEKLAADIDRAAKHIIDQAYEVAKEHVRRNRAAIDQLVDVLMEKETLTGDEFRALLSEHVDIGREQRETAARKKLVVTA

SEQ ID NO: 14443 - protein, 637 aa, Zea mays
  VARIANT 13: note = Ancestral polymorphism is S, Derived polymorphism is Y
  VARIANT 45..637: note = Derived polymorphism lacks residues 45 to 637
MMKKWHGGFAIVSLFIILMLRYVILDNPLVENSLQYVFQQNRTAELHWLDVPNPPAIQNLQISSEVISTGLLASNLSITRNLSDRELQSLHSWNHLKQLLSHVHILPDGVEAIKEAGVAWRELNTALAYDDAVSVNGSIQQKDKGKQCPYSIRRMNATRLGDRFALKLPCGLIQGSSITIIGTPGGLLGNFKIELTGAAVPGEPDPPIVLHYNVRLLGDKLTEDPVIVQNTWTISDDWGSENRCPSPDSDAKDTTKVDDLEKCSSMVGEDQKEILPSKFHSNVSAMPPASKKKAEPRKYFPFRQGYLAVAILRIGAHGIHMTVDGKHITSFAFREDLEPGFVGEVRIAGDIKLLSVIASGLPTTEDFEHVTDLEILKAPPVPMDKPVDLFIGVFSTANNFKRRMAVRRTWMQYDSVRSGKVTVRFFVGLHKNELVNEELWNEARTYGDIQLMPFVDYYSLILWKTIAICIYGTNVLSANYVMKTDDDAFVRVDEVLSSLDRTNVNHGLLYGRVNSDSQPHRDPYSKWYITPEEWPEESYPPWAHGPGYIVSKDIAKEVYRKHKSGELKMFKLEDVAMGIWINEMKKDGLDVKYENDGRILVEGCEDGYVIAHYQEPRDMMCLWDQFQKTKRGTCCKE

SEQ ID NO: 14444 - protein, 540 aa, Zea mays
  VARIANT 230: note = Ancestral polymorphism is N, Derived polymorphism is S
MAGTAAIASLAAVAGAWLDLDGSTTLLPRRLLPSSGGEALRAAWDAARAAAVAPALAAASWVCLALSAMLLADAVFLAAASLLPRRAPCPIAGPTAEVDGDEEEAGCSVGYPMVLVQIPMYNEREVYKLSIEAACGMWWPSDRVIVQVLDDSTDPTVKDLVELECKFWANNGKNVKYEVRNNRTGYKAGALKQGMLYEYVQQCDFVAVFDADFQPEPDFLVRTVPYLVHNPRIALVQARWEFVNPKEFLMTRIQKMTLDYHFKVEQEAGSSTFGFFGFNGTAGVWRTSSIKEAGGWEDRTTVEDMDLAVRAGLKGWKFIYVGDVKVKSELPSNLKAYRRQQHRWTCGAANLFRKMGAEIILTKEVSLWRKLYLIYSFFFIRKVVAHVVPFMLYCVIIPLSVLIPEVTVPVWGVVYIPTTITLLYAIRNPSSIHFIPFWILFENVMSFHRTKATFIGLLELGNVNEWVVTEKLGRTKPVPQMLEKPRCRFWDRCTISEILVAIFLFFCATYNLVLGDDFYFVYIYLQEIAFLIVGTGFCGT

SEQ ID NO: 14445 - protein, 308 aa, Zea mays
  VARIANT 25: note = Ancestral polymorphism is E, Derived polymorphism is V
MAIISDFKDDEAPEQQLAAGHGVEVALVAALERSGGALPFLQAAMDVAHRRSGLFRDPSAVSKVTAMAAAVRAQIEAEERVTREAEAKRKAEEDERKAEAEAQRAAKEAVMATAEEKPESTVEKDSMEVDKKEEANVRQPNAGNGLDLEKYSWTQQLPEVNITIPVPQGTKSRFVVFDLKKNHLKVGLKGQPPIIDGELYKPVKVDDCFWSIEDGRTLSILLTKHDQMEWWKSVIKGDPEVDTQKVEPENSKLSDLDPETRQTVEKMMFDQRQKQMGLPTSDEMQKQEILKKFMSEHPEMDFSRAKLD

SEQ ID NO: 14446 - protein, 269 aa, Zea mays
  VARIANT 62: note = Ancestral polymorphism is T, Derived polymorphism is I
MAVLLRSTSAAASTAGPSSALLATTFRRSRGCLLPRAAPQRRLYVARASAQPLEVCAKESITIPGRLGDCPFTQRVLLTIEEKHLPYDLKLVDLANKPDWLFEINPEGKVPIVKLEEKWIGDSDVITQALEEKYPEPPLATPPEKASVGSKIFSTFIGFLKSKDPSDGTEEALLNELTSFDSYLKDNVSGLVAIGPFINGGIISAADLSLGPKLYHMEITLGHYKNWSVPDSLSYVKTYMKSIFSMDSFVKTQALTEDVIAGWRPKVMG

SEQ ID NO: 14447 - protein, 409 aa, Zea mays
  VARIANT 245..409: note = Derived polymorphism lacks residues 245 to 409
  VARIANT 226..409: note = Derived polymorphism lacks residues 226 to 409
  VARIANT 196: note = Ancestral polymorphism is P, Derived polymorphism is L
  VARIANT 170: note = Ancestral polymorphism is P, Derived polymorphism is L
  VARIANT 142: note = Ancestral polymorphism is W, Derived polymorphism is S
  VARIANT 136..409: note = Derived polymorphism lacks residues 136 to 409
MPSPTRASVASLPTAGAVLSCRAHRASRWPTHTRSTLHPKKSACAWEERVLDVDKYAIMHCGVQEILHWMAPGTPQMEGAREDDGNDLLEMQAYDPETYNDKVIGALCVSSSEVVGNWCESRVGSNTTEQQGMLKRALEFNWQMLLEDIGLWIPPTIYHIEHDDKPENEPEGYFVYAAYVASIVDYILWVINEIIPGPPLPPECNTELHTDYGGTAVRWGLTHHKESAADCCQACIDQAKMARPGALKCNIWVYCPSEYGCYSPDKYEHKHQECWLKQFRHILASPSSDPGGHWSRCKSDLGGCSATQIATLQGLRSGMLTSLRQSESKPKAGVFINSCFAHCQSELQDTWFAPNSPSIDNKSCRNLIPIDKADHPRLNFKDRYPELYRDSHPTAPVVVPWMSGVITAM

SEQ ID NO: 14448 - protein, 454 aa, Zea mays
  VARIANT 299: note = Ancestral polymorphism is W, Derived polymorphism is S
MGGAYLQPPDPHSHSHKASSKKPGCFLSKTTCAWLACGFLSLALLHLLCCSPAGSQRAALSPLLQYINNTYSFVSTVPGPGPPVEVEEEERSSCNYAVGKWVWAPGHARRYNATECNVKESHDCIRNGRPDTGYLDWRWQPADGCPLPAFDAAAFLSAVRGKHVAFVGDSMARNQAQSLICLLSAAFPYRLLYRDSGPGPRKHNFWRYAFPAYDVKVSFYWTPFLLRATGKSEDESVRDNHVHLDALGDRWAADADTIDVAVLAAAHWLLNGAIYYNGSRMVGAHGYPELNVTGVGYAWPLRVAYRAAVDRLSAAGGRPRTVVLATFSPSHFEGKPTNDPTACAKTEPYKDGESDMEWMYREVRDVVYDEANAARARATSGNGSSASATRVEVLDVSKLASMRPDGHPGLYMHDHPFANGAPPEGMYSDCLHFCLPGPVDTFNEILLQILRKRR

SEQ ID NO: 14449 - protein, 447 aa, Zea mays
  VARIANT 29: note = Ancestral polymorphism is E, Derived polymorphism is K
  VARIANT 42: note = Ancestral polymorphism is Q, Derived polymorphism is K
  VARIANT 61: note = Ancestral polymorphism is L, Derived polymorphism is F
  VARIANT 115: note = Ancestral polymorphism is A, Derived polymorphism is T
  VARIANT 117: note = Ancestral polymorphism is R, Derived polymorphism is Q
  VARIANT 133: note = Ancestral polymorphism is C, Derived polymorphism is F
  VARIANT 162..447: note = Derived polymorphism lacks residues 162 to 447
  VARIANT 164: note = Ancestral polymorphism is S, Derived polymorphism is L
  VARIANT 185: note = Ancestral polymorphism is Q, Derived polymorphism is H
  VARIANT 247: note = Ancestral polymorphism is R, Derived polymorphism is C
  VARIANT 338..447: note = Derived polymorphism lacks residues 338 to 447
  VARIANT 350..447: note = Derived polymorphism lacks residues 350 to 447
MMTRCGVQLLVARGISSSPRLSQRINQMESEIVRMFHPPIRQSEEAIATIVPRYTYSMRVLDERFIRILKIFKWGPDAEKALEVLMLRVDHWLVREVMKTDVGVNVKMQFFRWATKRRNYEHDTSTYMALIHCLEVVEQYGEMWKMIQEMVRDPICVVTPTELSDVVRKLGNAKMVSKAIAISYHIKTRKCQPTAQAYNSMIIMLMHEGQYEKVHQLYNEMSTEGHCFPDTMTYSALIFAFCKLGRRDSAIQLLNEMKEIDSNCNCNFDLILEQWVIFRGKDGRPGCVQNTCAHRACPLHLGSVNEGRIQCPYHGWEYSTDGKCEKMPSTKMLNVRIQSLPCFEQEGMIWIWPGDDPPKATIPSLLPPSGFIVHAERCVLLIIQQIVMELPVEHVLLLDNLLDLAHAPFTHTSTFAKGLECSKFGEVLNTCIWAPRVLNEDLRLVLG

SEQ ID NO: 14450 - protein, 129 aa, Zea mays
  VARIANT 94: note = Ancestral polymorphism is N, Derived polymorphism is D
  VARIANT 63..129: note = Derived polymorphism lacks residues 63 to 129
  VARIANT 61: note = Ancestral polymorphism is F, Derived polymorphism is Y
MISPAHLAFAAAFLLVVRSSAPGAAAARPIFDGKPSPSEATATARWLAAQNTWGVLRHLLFLQLKMVDLQSSEADLAKSALFTKHPEMKDWPKNHHFKIFKMEIENIFLIDWFGGPKPISPSQYLEFGR

SEQ ID NO: 14451 - protein, 253 aa, Zea mays
  VARIANT 23: note = Ancestral polymorphism is G, Derived polymorphism is V
  VARIANT 121: note = Ancestral polymorphism is H, Derived polymorphism is Y
  VARIANT 122: note = Ancestral polymorphism is A, Derived polymorphism is V
  VARIANT 156: note = Ancestral polymorphism is R, Derived polymorphism is S
MSLCCCCSTATGRGVLLPSLLLGRRHWTGHHLLNLRATTTVVSSSSAAATSSLSPPQQRQITVYVDTLLEWNQRMNLTAVTDEAEVMARHVADSLAMLPPLERWKFTLLESMRKRCTFLEHAVEAMNLSNVDVVCDRAEKNLSGQKVGQSLDFRESYDIVAARAVAELKVLAEYCIPLVRIGGLFIAAKGHDPHEEVRNAEGAIKKLGASMLELCNVESMGPHGQRTAVLYVKERATPKKYPRLPGTPSKAPL

SEQ ID NO: 14452 - protein, 586 aa, Zea mays
  VARIANT 343: note = Ancestral polymorphism is S, Derived polymorphism is Y
MPEAAPPPPLPLLAAASSPAAAALPRARRRQQRRGWRRPRRLLVWGVLVAFFFIMNWWMFSRLQDPSARPHFRLRRHPPRAPATVNSSLSTLEEVANAAKGKRAHRVMLTRLLALAGHALAEAETRPEPKDLWEEPINATLWRPCSDQRDWKASEGTNGYIMISANGGINQQRVAICNAVTISRLLNATLVLPKFLYSNVWLDKSQFGDIYQEEYFIKYLKSDIQIVKDLPVELQSLDLEAIGSLVNDTDVMKEAKPSLYMKKILPILLRNRVVHFIGFGNRLSFDPIPSDLQRLRCRCNFHALRFVYKIQETGAVLVERLHGHRASSSPLKDNLLGQFAVKSDPRANKSDASKYLAVHLRFEIDMVAYSLCYFGGGKDEEDELEAYRQIHFPVLSELKKMTKLPSAAFLRSEGKCPLAPEEAVLMLAAIGFKRSTNIYVAGAEIYGGKDRMAAISRLYPALVTKETLLSPSELEPFRNFSSQLAALDFIACAAADAFAMTDPGSQFSSLVQGYRMYYGGGDLPTIRPNKRRLASILVKNATIEWNGFENRVRKLIQQTKQVHERPVARSVFRHPRCPECMCRTEH

SEQ ID NO: 14453 - protein, 250 aa, Zea mays
  VARIANT 172: note = Ancestral polymorphism is V, Derived polymorphism is E
MSFLAGRLAAKEGAYFLQESKTAVGRLAEKLPPSASAPGGASAQPSPDVLPEILRHSVPIKGTPPPAEASLSASSRWALPPGGGEAAGLHPDALNPLRSYVSLPQATFGPKRWQLPNEQPNYLASTANERRRDRAPPPLDPENLKAVIAGYSQIGKAFITATFMVFGGATAVLLYTADKLQLHSVDDVKTKGKDALQPRADMIKEQIAPLRSWAEEMSRKWHFEGGKEAKEKSGIVKELSRILGSRTPPG

SEQ ID NO: 14454 - protein, 198 aa, Zea mays
  VARIANT 98: note = Ancestral polymorphism is I, Derived polymorphism is L
  VARIANT 89..198: note = Derived polymorphism lacks residues 89 to 198
MRKLKFHEQKLLKRHNFLEYKREGGHREALVTQRYRLVERDDYKKYNGICLMVQKLVNIIKQMDPRDPFRIQMTDLILDKLVNVPKVAWISEIMRFLIIFPAFQMDPQCVEFHLPCLLNSCRRRLATVMVKLKFAEHLKEAVTYIEQGHVRVGPDAVTDPAFLVTRNMEDFITWVDSSKIKRKVMEYNDALDDYDAMF

SEQ ID NO: 14455 - protein, 265 aa, Zea mays
  VARIANT 9: note = Ancestral polymorphism is D, Derived polymorphism is G
MAAAASGGDTPKQLLSIIRDFAYEKSHGERRVSDLRRRLADARAAADVAAAELDAAKRAREAAEQEFRGSQVQDAIAADSILALEATISCLHEEISKASTDLDALKICLLAKTCFVSFNFVTIMLSIERQFQQMVSLELAEYNHCELPSTDERNFKIAQFGVVFVLMNIICVVKLCEHVKDKSKTVDSEGISEELSDKVSNIEAEVQLLEEEYKKDLLYHDKVRQELAEVQAKRALMEAVMEETKQLQELGEYPEHTELSVPMHF

SEQ ID NO: 14456 - protein, 614 aa, Zea mays
  VARIANT 129: note = Ancestral polymorphism is P, Derived polymorphism is L
  VARIANT 525..614: note = Derived polymorphism lacks residues 525 to 614
MGPAPREPMKQRVNRCLLRLSDRDTEAMAAAELDAIARELDADELPVFVAAVSDARPTDRTPLRRHSLRLLALVAGEHPRDAVAPLVPRLLAAALRRVRDPDSSVRAALVDAARAAAGAAASPPAALAPLADAVLHEQDQCAQLAAALAAAAAVEASEPTDDLAAYLRGLLPRLYKLLRSAAFKAKPALISLIGAASAASGGGAASAAVPCLRDALTADDWAARKAAAEALALLALEHGDDLVSHKSSCITVFEAKRFDKVKIVRESMNRLIEAWKEIPDLDEEVCSLPSSQSRSSLTDTASDGRYPADSSGSTSSPSITRRNSWPTNRQPQPDGSNNAINRKGSPPSIVAKKNLPPSRRSTDQFKKSEDRVVVTTAPDATPIKMVAEEKLLKEGNVRERLEARRVLFQKTGDKGYKKVAGPKSGSRVVPYSGEGDGDSEETAETEDAPEEFQSAHKDEDLSKIRMQLVQIENQQASLLNLLQKFMGSSQNGIRSLETRVNGLEMVLDEISRDLAASSGRIPNSEPDTNACCILSPKFWRRHDGGRYTSRYPISDAANYSEESRSPYKWDRQQKFGVHGGFVTNPLAEPNDSSVRSIAGSQQGRRRDSAQYRSR

SEQ ID NO: 14457 - protein, 1209 aa, Zea mays
  VARIANT 284..1209: note = Derived polymorphism lacks residues 284 to 1209
MHFFSGSGGARSGALLPTTSKPKAHHHLRSKSSLSVPAFSRRRGGLYSASSPYSRRALCLAATAFAALFILAFIRLGFPSSRSAALSSPTRRRARLTRSPAFRHRDSAAAAAVSARIGREAPVDITTRDLYDGIEFSDVDGGAWKQGWEVKYRGDEWDTEKLKVFVAPHSHNDPGWIRTVEEYYQRQSRHILDTIVESLSKDSRRKFIWEEMSYLERWWRDATPKMREAFAKLVRDGQLEIVSGGWVMNDEANSHYFAIIEQAIGPICHKFSLTNWGDLGLILCKWIASHLQMMEGNMWLNDTIGVIPKNSWSIDPFGYSSTMAYLLRRMGFHNMLIQRTHYEVKKELAMKKNLEYLWRQNWDIEETTDIFVHMMPFYSYDIPHTCGPEPAICCQFDFARMRGFSYESCPWRSDPVEINPDNVEERATTLLDQYRKKSTLYRTNTLLIPLGDDFRYVSMEEAEVQFRNYEKLFDYINSNPHLNAEVKFGTLEDYFSTLRDEAEKINYSRPGELGSAELQGFPTLSGDFFTYADRNQDYWSGYYVSRPFFKAVDRVLEQTLRAAEILGSFVLGYCQKFQCAKLPISFSHKLTAARRNLALFQHHDGVTGTAKDHVVVDYGTRMHTSLQDLQLFMSRAVEVLLGDFHDRSDPTLLSHFESVQERSKYDVQLVHKVLHPLEGKAQSVVFFNPLEQTRDEIVMVVVSSPDVSVLNSNGSCLPSQLSPEWQFVSDENISTGRHRLYWRAYVPPLGLETYYVVTGQDCEKAIPAAVKTYTTEQEFSCPQPYDCSKLEAKTVEMKNSNYTLSFDTSRGLLQTVTRHKDGQQTVIGEEIGMYKSHGSGAYLFKPVGDARSIVEEGGHFILTEGPLVQEAHSLPKTEWRKSPLSHSTRIYNCGDAIQDMLIEKEYHVELVGHAFNDRELIVRYKTDIDNQRIFYSDLNGFQMSKRQTYDKIPLQGNYYPMPSLAFLQDSHGNRFSVHSKQSLGAASLKNGWLEIMLDRRLVQDDGRGLGQGVMDNKPMNVIFHLLTESNVSALPKTHSLHTLQPSILSHRVGAHLNYPMHAFMSKKPHEKSFKRAQQSFAPLTASLPCDIHIVNLKVPRPLRFPHTESAEPKFAVLLQRRGWDASYCKRGGLQCTTVGEEPVNLFYMFKDLSAVNVKATSLNLLHDDPEMLGYLEQTGDVAQEGDVLISPMEILAYKLDLQPPSSQEE

SEQ ID NO: 14458 - protein, 144 aa, Zea mays
  VARIANT 10: note = Ancestral polymorphism is P, Derived polymorphism is T
MPPPREHHQPQDEEDDDTAGVVKLISAEGFEFVVDRKAAMVSNTLRNMLTSPGGFSETRQGEVRFPEIPTNILEKICQYFYWSLHYSRFLCLLSTFDNRHLLSPFRLSPWEGDSGVSNRTGDNPGAYDGRKLSGHLMRSLRDLI

SEQ ID NO: 14459 - protein, 913 aa, Zea mays
  VARIANT 284..913: note = Derived polymorphism lacks residues 284 to 913
  VARIANT 347..913: note = Derived polymorphism lacks residues 347 to 913
MEAMEELSELAESMRQAASLLADDDPSDDAAPRRPTTFLNAVALGNVGAGKSAVLNSLIGHPVLPTGENGATRAPIVVDLQREPGLSSKSIVLQIDSKSQQVSASALRHSLQDRLSRGASGGSGRGRVDEIYLKLRTSTAPSLKLIDLPGIDQRAVDDSMINEYAGHNDAILLIVIPAMQAADVASSRALRLAKDIDADGTRTVGVISKVDQANGDAKTIACVQALLSNKGPKNLPDIEWVALIGQSVAIASAQSVGSENSLETAWRAEAESLKNILTGSPQNKLGRIALVDTIAKQIRKRMKVRVPNLLSGLQGKSQMVQDELARLGESMVQSAEGTRAVALELCREFEDKFLAHITSGEGSGWKIVASFEGKFPDRIKQLPLDRHFDLNNVKRIVLEADGYQPYLISPEKGLRSLIKIVLEMAKEPSRLCVEEVHRVLLDIVNASANATPGLGRYPPFKREVVAIASNALETFKNDAKKMVVALVDMERAFVPPQHFIRLVQRRMERQRREDELRNRSSKKTQEAEQPTSKRASSPQTDAEQGGGSLKSMKDKSGQQDKDTKEGSNLQVAGPAGEITAGYLLKKSAKTNGWSKRWFVLNEKSGKLGYTKKQEERHFRGVITLEECNLEEVEEEEPSKSSKDSKKANGSEKISSLVFKITNRVAYKTVLKAHSAVVLKAESMADKVEWVNKIKAVIQSKGGSFKGPSTEGSSMRQSNSDGALDTMARRPADPEEELRWMSQEVRGYVEAVLNSLAANVPKAIVLCQVEKAKEDMLNQLYSSISGQSNAKIEELLQEDHNAKRRREKYQKQSSLLSKLTRQLSIHDNRASVSSYSNDTTEAESPRTPTRSGEDWRSAFDSASNGPVAGSTNSQSRSKSADGRSRRYENGDVSSGANSGSRRTPNRLPPAPPKY

SEQ ID NO: 14460 - protein, 88 aa, Zea mays
  VARIANT 10: note = Ancestral polymorphism is G, Derived polymorphism is R
  VARIANT 8: note = Ancestral polymorphism is R, Derived polymorphism is M
  VARIANT 7: note = Ancestral polymorphism is R, Derived polymorphism is K
MAVVMRRMGGLVLPVAVIMAVLLSLAVLGAEARPLSGDGGWAATGAGPLPDGGVFIVETLRRLYLQQLGGPGPSCETNSPNNGCPPPP

SEQ ID NO: 14461 - protein, 162 aa, Zea mays
  VARIANT 37: note = Ancestral polymorphism is K, Derived polymorphism is N
MRQLVTATAITCRARNQVWKDVDGVLTCDPNIYSHAKTVPDLTFEEVTELAYFGAQVLHPQLMIPAREGDITVRVENSYNCKALGTLITRQRDINKVVLTSIVLKSNVTMLDIVSTRMLGQYVFLARVFSIFEDLCISVDCVATSEVRISVSLDPSKILSRD

SEQ ID NO: 14462 - protein, 270 aa, Zea mays
  VARIANT 209: note = Ancestral polymorphism is S, Derived polymorphism is L
  VARIANT 86: note = Ancestral polymorphism is A, Derived polymorphism is E
MSPLLASMVLMFLQDTTPQQYRRSGLNFWCGPYVWGGPYSSDRNSLLRQPPSARRRAQPLGQLHYAIRYLGFDIRDVQSPEDIVAAEWLVFPGVGAFGSAMDVLNRMGMADALREYIQRDRPFLGICLGLQLLFDSSEENGPVSGLGVIPGLVRRFDSSNGLIVPHIGWNALQITKDTPLLQGADGQHVYFVHSYRVLPSDANRDWISSICNYGDSFISSISMGNIQAVQFHQEKSGATGLSILKEFLRPNSLGTKVIQRRPRSLVPMLP

SEQ ID NO: 14463 - protein, 311 aa, Zea mays
  VARIANT 35: note = Ancestral polymorphism is F, Derived polymorphism is I
  VARIANT 40: note = Ancestral polymorphism is G, Derived polymorphism is D
  VARIANT 56: note = Ancestral polymorphism is V, Derived polymorphism is A
MDPSSEIILDTPYFRIYSDRRIDRLMGTETVPAGFDPSTGVTSKDVVIDSDAGLYVRLYLPLPDTVAAAASPPPNVNDSKTKLPVLVYFHGGGFVTQSAASPIYQRLLNALAARAGLLIVSVNYRLAPEHPLPAGYEDSFRALEWVAASGGDPWLSRHGDLRRVFLAGDSAGGNIVHNVAMMAAASGPRVEGAVLLHAGFGGKEPVHGEAPASVALMERLWGVVCPGATDGVDDPWVNPLAAVAPPRPSLRDMPCERVLVCGAELDSLLPRDRAYYEALAASGWGGTVEWFESKGQDHVFFLFKPDCECCM

SEQ ID NO: 14464 - protein, 872 aa, Zea mays
  VARIANT 108: note = Ancestral polymorphism is R, Derived polymorphism is I
MVRGLGSKRRVAEEESSEEEYEVEVVRDHIASSRGSRLALFGSELRLGRFRPRRRRRLPLAGEGAAEGFFHGLVIHPDNKWYRLWTKFILVWAVYSSFFTPLEFGFFRGLPKNLFFLDVAGQTAFLIDIVVRFFVAYRDPDTYRVVYSPAAIALRYCKSSFVFDLLGCLPWDAIYKACGSKEEVRYLLWIRLTRVTKVTEFFWRLEKDIRVNYLFTRIVKLIVVELYCTHTAACIFYYLATTLPESMEGHTWIGSLQLGDYRFTHFREIDLAKRYITSLYFAIVTMATVGYGDIHAVNIREMIFIMIYVSFDMILGAYLIGNMTALIVKGSRTERFRDKMKEVIRYMNRNKLGKEIREQIKGHLRLQYESSYTEASVLQDIPISIRAKISQTLYKPYIESIPLFKGCSAEFIQQIVIRLQEEFFLPGEVILEQGSAVDQLYFVCHGALEGVGIGEDGQEETLLMLEPESSFGEISILCNIPQPYTVRVCELCRLLRLDKQSFTNILEIYFVDGRRILSNLSESEYGGRVKQLESDITFHIGKQEAELTLRVNSAAFYGDLHQLKSLIRAGADPKNTDYDGRSPLHLAASRGYEDVVQFLINEGVDIDLTDQFGNTPLLEAVKQGHERVAALLFAKGAKLSLKNAGSHLCTAVAKGDSDFIRRALAYGADPNCRDYDHRTPLHIAAAEGLYLIAKMLVEAGASVFTTDRWGTTPLDEARKCGGRTLGALLEEARASELSMFPERGEEVRDKVHPRRCSVFPYHPWRASAGEERRAEGVVLWIPHTIESLVASAQEKLGLPGPAASRLRLLCEDGARVLDVDMVNDGQKLYLVGGEDGDQEGVEENVIKSIIRAGHCTELQIGNNVRCEMKMQC

SEQ ID NO: 14465 - protein, 457 aa, Zea mays
  VARIANT 35: note = Ancestral polymorphism is R, Derived polymorphism is Q
  VARIANT 77..457: note = Derived polymorphism lacks residues 77 to 457
MGERAKEWLLAAGAGAAVGALSAAAVIDLLSRSKRRERYARDLLESNGMTTGNTRSSKHLGSLGSSALLSDEVVSEQLTRNIQFFGMDSQKKVTESYVVVIGLGGVGSHAASMLLRSGVGRLLLVDFDQVSLSSLNRHAVATRDDVGTSKALCLKKHFSMIYPECQIDAKVQLYDASSEEEILSGQPDFVLDCIDNIDTKVSLLAACVRRGLKVLSAMGAGARADPTRIRVADLRESSNDPLSRSVRYRLKKEHGIEGGIPVVFSLEKPKAKLLPFQASKEEETPSDYQIVPGFRVRIIPVLGTIPAIFGQVMASYVVTQLAGLDFQTEPVVNLDLDHYRILHQRLIEHEELMYGTAEQVLVDAEEVMYIVKELWRGRSARDQSQDTGRKMWRSVNELMLVRWDKSKAAGISNLILVKFSEADAHESTTLDRIKEQEPEFYSMVSRVLKRAEMEFAL

SEQ ID NO: 14466 - protein, 125 aa, Zea mays
  VARIANT 1: note = Ancestral polymorphism is M, Derived polymorphism is V
MQNYSLDEKIRMTLEAYVVEKTDEVHEVSFVVSHAPANNTSYALYVWSRSSSSQDEMCARMSYFPEAIWKGVQKFLWRIDTSLKNIGINERLPYNAPLIQFSSSMGGGRDGNFLLLYAIVYKAFV

SEQ ID NO: 14467 - protein, 658 aa, Zea mays
  VARIANT 66..658: note = Derived polymorphism lacks residues 66 to 658
MEEAPPSSSPPSPPVMLLLLLLLIVSSPCSSSALLSPKGVNPEVQALMTIKNTLKDPHGVLKNWDQDSVDPCSWTTVSCSLENFVTGLEVPGQNLSGLLSPSIGNLTNLETILLQNNNITGLIPAEIGKLTKLRTLDLSSNHLYGAIPTSVGNLESLQYLRLNNNTLSGPFPSASANLSQLVFLDLSYNNLSGPVPGSLARTFNIVGNPLICGTNNAERDCYGTAPMPPYNLNSSLPPAIMSKSHKFAIAFGTAIGCIGLLVLAAGFLFWWRHRRNRQVLFDVDDQHMENVSLGNVKRFQFRELQSATGNFSSKNILGKGGFGYVYRGQFPDGTLVAVKRLKDGNAAGGEAQFQTEVEMISLALHRNLLRLYGFCMTATERLLVYPYMSNGSVASRLKASSTTSIRFLSSLYSTMIATPTGKPPLDWVTRKRIALGAGRGLLYLHEQCDPKIIHRDVKAANILLDDCCEAIVGDFGLAKLLDHRDSHVTTAVRGTVGHIAPEYLSTGQSSEKTDVFGFGILLLELVTGQTALEFGKTANQKGAMLDWVKKTHQEKKLDVLVDQGLRGGYDKMELEEMVRVALLCTQYLPGHRPKMSEVVRMLEAGEGLAERWEASHSQSQSADSHEFKVPDFTFSRCYSDLTDDSSLLVQAVELSGPR

SEQ ID NO: 14468 - protein, 172 aa, Zea mays
  VARIANT 90: note = Ancestral polymorphism is V, Derived polymorphism is L
MTTTNPTAILSVVLLIAGVAVMLVAHILVVFWALLRGLGSRGSSQHAANQEERVEDGRGRRGLSSGELATLPCHEYFKAAADGETGDCAVCLEAFEAGDRCRQLPRCEHSFHAECVDSWLRKSSACPVCRVDAVDRRPPKGEAKAAAVSGVVVVDMAGRRSSRPAPEIVIER

SEQ ID NO: 14469 - protein, 212 aa, Zea mays
  VARIANT 165: note = Ancestral polymorphism is T, Derived polymorphism is N
MVQSLRSRIKGNVVNTFGCCWAFSAVAATEGIVKISTGKLISLSEQELVDCDVYGEDQGCEGGLMDDAFKFIIKNGGLTTESNYPYTAADGKCKSGSNSAANIKGYEDVPTNDEAALMKAVANQPVSVAVDGGDMTFQFYSGGVMTGSCGTDLDHGIAAIGYGKTSDGTKYWLMKNSWGTTWGENGYLRMEKDISDKKGMCGLAIEPSYPTE

SEQ ID NO: 14470 - protein, 340 aa, Zea mays
  VARIANT 293: note = Ancestral polymorphism is T, Derived polymorphism is N
  VARIANT 166: note = Ancestral polymorphism is G, Derived polymorphism is R
  VARIANT 149..340: note = Derived polymorphism lacks residues 149 to 340
MATLQASILAVLSFAFFCGAALAARDLNEDSAMVARHEQWMAQYSRVYKDAAEKARRFEVFKANVKFIESFNTGGNRKFWLGINQFADLTNDEFRTTKTNKGFKPSLDKVSTGFRYENVSVDAIPATIDWRTNGAVTPIKDQGQCGCCWAFSAVAATEGIVKISTGKLISLSEQELVDCDVHGEDQGCEGGLMDDAFKFIIKNGGLTTESNYPYTAADGKCKSGSNSAANIKGYEDVPTNDEAALMKAVANQPVSVAVDGGDMTFQFYSGGVMTGSCGTDLDHGIAAIGYGKTSDGTKYWLMKNSWGTTWGENGYLRMEKDISDKKGMCGLAMEPSYPTE

SEQ ID NO: 14471 - protein, 128 aa, Zea mays
  VARIANT 80: note = Ancestral polymorphism is G, Derived polymorphism is R
  VARIANT 67: note = Ancestral polymorphism is G, Derived polymorphism is R
  VARIANT 64: note = Ancestral polymorphism is C, Derived polymorphism is Y
  VARIANT 44: note = Ancestral polymorphism is V, Derived polymorphism is M
  VARIANT 33: note = Ancestral polymorphism is E, Derived polymorphism is K
  VARIANT 30: note = Ancestral polymorphism is V, Derived polymorphism is G
  VARIANT 28: note = Ancestral polymorphism is R, Derived polymorphism is H
  VARIANT 7: note = Ancestral polymorphism is V, Derived polymorphism is I
MNPINTVFGEHALVLGSLLTPAALAEIRFVHCEEKPKEPKEETVTLKIQLHCDCIVRTWKNTDCTAGLDWSSIRRFSSSGEASNVDDYLWLMGRAGCDAVEDPRFERRYCHTESVFDEMPPKSGGFYL

SEQ ID NO: 14472 - protein, 769 aa, Zea mays
  VARIANT 43..769: note = Derived polymorphism lacks residues 43 to 769
MDAESGRGAAGARKKSWRSELVLAYQSLGVVYGDLATSPLYVYKSAFAGGDIEHSEGNEEIYGVLSLVFWTLTLITLLKYVLVVLRAADDGEGGTFALYSLICRRVRAGLLPGVGDSAVDELKDQPDGALPPPASSVRAALQQRRELQWLLLLFALLGTSMVIGDGVLTPAVSVFSAVSGLKLSMVNEQHQYVLLPVTCVILVGLFALQHFGTHRVGFLFAPIVCLWLLCISTIGVYNIFIWNPHIYKALSPYYMYRFLQKTQVGGWMSLGGILLCVTGSEAMYADLGHFSQSSIKIAFTAVVYPSLVLAYMGQAAYISRHHNFERNHHIGFYISVPEKIRWPILGIAILAAVVGSQAVITGTFSVIKQCCSLNCFPRVKIVHTSSTVHGQIYIPEINWILMILCLAVTIGFRNTKQMANAQGLAVITVMIVTTCFMSLVIVLCWNKNVVFALAFLLFFGAIEAVYFSASLMKFHEGAWVPIIVSFIFLTVMCVWHYGTAKKYEFDVENKVSISWLLNLGSSLGIVRVRGIGLIHTELVSGIPAIFSHFVTNLPAFHQVLVFLCIKSVSVPHVQPEERFLVGRIGLKQYRLYRVVVRYGYRDVQQDSLQFEKALVSSIAEFIRSGDSDQNGYPDGSESPYERLSIISKGLPFQEADGDGSPSPESSARKDTNPILVSSKSRRVRFVLPENAQINSQVRNELQELTEAREAGMSFIMGRSYMKAKSGSSLMKRIAINFIYEFLTRNSRGPAYAANVPHVSTLEVGMVCQV

SEQ ID NO: 14473 - protein, 146 aa, Zea mays
  VARIANT 58: note = Ancestral polymorphism is R, Derived polymorphism is C
  VARIANT 54: note = Ancestral polymorphism is G, Derived polymorphism is S
  VARIANT 50: note = Ancestral polymorphism is V, Derived polymorphism is I
  VARIANT 36: note = Ancestral polymorphism is R, Derived polymorphism is C
  VARIANT 35: note = Ancestral polymorphism is H, Derived polymorphism is R
MKRPRLRPGGAGGAQCPSCAVDGCKADLSKCRDYHRRHKVCETHSKTPIVVVTGREMRFCQQCSRGTIPALNCENADSEPFATMWKITCAITFRGLLQSSYIRGESRFFDHGPVYNLFMAKVGSVHHRRSNLTLIMISSAEGTVID

SEQ ID NO: 14474 - protein, 508 aa, Zea mays
  VARIANT 50..508: note = Derived polymorphism lacks residues 50 to 508
MAAPGRAALLAAALLFGTFFPSASSASSYPARIAGRLLSTTSSAVAKQLWSLKSAATKTATTAVTGRSMVRYEGGYAVDTVFDGSKLGIEPHAVEITPAGNLLVLDSINSNIYRVQLPLSPYSRPKLLAGSPKGLSGHVDGRLREARMNHPKGFTVDDRGNIYVADGMNMAIRKISDTGVTTIAGGKSIRGGHIDGPSDDAKFSTDFEIKYISSSCSLLVIDRGNQAIREIPLNDDDCAYQYEAGFPLGFALLCAAGFFGYMLAMLQRRLLGMSSTTDDPQAPPRPSIASIPPSYQKPLNPYIRHPFIPREETAKQETGEGFFTTAGKLMGGAKSSVGEIFGFKKKRLSSPYHHQQQQQRRANPWPVQESYAMTHDEPPPALDTRAPTPQKNYSLMRKEPEKTHYVRHGHPYFNSWDGHCHPQQQPDQQLYRQQQHLQQHRQYSAGPQTFYEQSCEPTKEIVFGAVQEVDSKRRMVEIKAVNYGDTFYERYGMRYRNNFIGYNNNNNY

SEQ ID NO: 14475 - protein, 126 aa, Zea mays
  VARIANT 60..126: note = Derived polymorphism lacks residues 60 to 126
  VARIANT 54: note = Ancestral polymorphism is L, Derived polymorphism is F
  VARIANT 47: note = Ancestral polymorphism is R, Derived polymorphism is C
  VARIANT 42..126: note = Derived polymorphism lacks residues 42 to 126
  VARIANT 33: note = Ancestral polymorphism is E, Derived polymorphism is D
  VARIANT 28: note = Ancestral polymorphism is Q, Derived polymorphism is R
MLKELYYGCGIRSPSSKQIQRITAMLRQHDKIEGKNVFYWFQNHKTRERQKRRLTGSTSWPRGGGGGARDWRGAGTGMGEGRYEETEDGEETVPDAEKGEETEHGEDTMPASVTGQSRRRKRSGRG

SEQ ID NO: 14476 - protein, 304 aa, Zea mays
  VARIANT 289..304: note = Derived polymorphism lacks residues 289 to 304
MAARQERLVSTAFLSRAPISSTVPTRRTSSDDLVAAAFASPAALTSNSSASLAASILASRPLPPCFTRASDAVEAAASAARPVATRFLFESSMPSEAKIKASTLVAASMPSTPVSSALLQRTDATVSATRPAPGIDSFNSYYDPSLKKARRALLGSHGVFVVEGDINDGRLLAKLFDVVPFTHVLHLAAQAGVRYAMENPAAYVHSNVAGLVSLLEACKDADPQPAVVWASSSFVYSLNDRVPFSGLRGRGHRGRSQGHGAGDPGPPHPPPSPIRHQHRSRRWKARLSQSSVTGNLMAMPKKLR

SEQ ID NO: 14477 - protein, 131 aa, Zea mays
  VARIANT 55: note = Ancestral polymorphism is K, Derived polymorphism is N
  VARIANT 62: note = Ancestral polymorphism is S, Derived polymorphism is I
  VARIANT 73: note = Ancestral polymorphism is R, Derived polymorphism is C
  VARIANT 79: note = Ancestral polymorphism is S, Derived polymorphism is Y
  VARIANT 81: note = Ancestral polymorphism is S, Derived polymorphism is T
  VARIANT 89: note = Ancestral polymorphism is T, Derived polymorphism is N
  VARIANT 118: note = Ancestral polymorphism is Y, Derived polymorphism is D
MARRGKGRLTVDGAHRARKEWRAFSGSLLRSNGVDVHVPRHGADATQLASTKKQNKKTPRSINANHGHPRHKRRHADKSISLLDHGSLTMLPFTDESVVWYRLHHLSSLNLIVYLQFYTLEYCVSAPNYSD

SEQ ID NO: 14478 - protein, 1245 aa, Zea mays
  VARIANT 776..1245: note = Derived polymorphism lacks residues 776 to 1245
  VARIANT 735..1245: note = Derived polymorphism lacks residues 735 to 1245
  VARIANT 720..1245: note = Derived polymorphism lacks residues 720 to 1245
MLSAMMGIEGIAATVTEDPEPSIPPGFGPFAASASWGIQNDVKPADDHSSSVLALQSIDDDVEILEYLSSSVDHQSDTGCCISGSNTCRKSLRNRPPIDYSRFDQIADEDSDAEVADKGVNAVKHRQQFPKGVLRGCPECANCQKVIARWNPSGARRPVLDEAPVYYPTEEEFQDTLKYIEIIRPTAEPYGICRIVPPASWKPPCLLKEKNIWECSKFSTRVQKVDKLQNRKSPKKSRRGGMMKKRRKISETEENNHHQIGMQQNQERFGFEPGPEFTLQMFQKYADDFSDQYFMKDKCRDSPPSVEDIEGEYWRIVERPTEEIEKIHSHKVIYGADLETGTFGSGFPKLCPEMKSDVEDKYAQSGWNLNNLPRLQGSVLSFEGGDISGVLVPWLYVGMCFSSFCWHVEDHHLYSLNYMHWGAPKMWYGVPGKDAVNLEAAMRKHLPELFEEQPDLLHNLVTQFSPSLLKSEGVPVYRCVQHEGEFVLTFPRAYHAGFNCGFNCAEAVNVAPIDWLPVGQNAVDLYREQARKITISHDKLLLGAAREAIRAQWDILFLKRNSSVNLRWKSICGPDSTICKSLKARIEMELVQRQNISSPCQSRKMDSEFDSTDRECALCYYDLHLSASGCPCSPEKYACLVHAKQLCSCDWDKRFFLFRYDVNELNILADALGGKLSAIHRWGVSDLGLSLSSCVKREKVQDSKTVRRLTDGPRRSYMSQASTVSLIPSSVSTEQKKNEDKTLDLGCPGMNLPKISPEANNLRPSTEQIKSENLSQLKEPCVKNELSCPTSNGTSQEHKGGIGGHKLAAASMMVLSGQSFPANAGESVRNAHVLAVFKEGRDCTSSLTLREYHNRPVSMIDNGANMKLDLENIDNSHMLMSSPDFNATVCHSYKDQTFLTLETNTSVMTEKDSSQARNASQQFVSTALRTQNVSQEPLCTAIAPKQLIDPQVQKKSYGVFGSGSAHLGHLTVGNQQLNERWHQRQSDSLSSVEVRARGHSAMIVQPALENHSRNGVAQKGPRIANVVHRFKCSVEPIEIGAVLSGKLWSSSQAIFPKGFKSRVKYFSVVDPVQMTYYISEILDAGQQGPLFMVTVENCPGEIFINISPTKCWNMVRERLNMEIRRQLNMGRANLPTLQPPGSVDGHEMFGLLTPAIVQAIEARDRDYICTEYWRSRPHATIENRDNQNMSPQDPPLVALRGLFQRANCDELRALRSLLMSNRILGDNSRQQACQILDEEIAKQWH

SEQ ID NO: 14479 - protein, 926 aa, Zea mays
  VARIANT 75: note = Ancestral polymorphism is R, Derived polymorphism is G
  VARIANT 117..926: note = Derived polymorphism lacks residues 117 to 926
MTGCVPISVWTIFSRPAAFLRMKECHLAYVGKRERLVDGSSGQMIRFLYFGFSDKDVFCSAVQFTVLVCPLLFARGQLQYGAFAVNIPFKGSIKVVHQWPGLPKGVKFDPSDQELIWHLMAKHGKSGIKPHPFIDEFIPTVEEDEGICYTHPQKLPGVKQNGSVSHFFHRTFKAYNTGTRKRRRINTDDADVRWHKTGKTKPVLVDGKHLGCKKIMVLYISPLKGGKAEKTNWVIHQYHLGTGEDERDGEYVVSKLFFQQQFKPGDKNAQELTTSDDLESMAAESNLPDFTTLPTDKHVGTVQEVVHNPEHNLYQLQYGAFAVNIPFKGSIKVVHQWPGLPKGVKFDPSDQELIWHLMAKHGKSGIKPHPFIDEFIPTVEEDEGICYTHPQKLPGVKQNGSVSHFFHRTFKAYNTGTRKRRRINTDDADVRWHKTGKTKPVLVDGKHLGCKKIMVLYISPLKGGKAEKTNWVIHQYHLGAGEDERDGEYVVSKLFFQQQFKPGDKNAQELTTSDDLESMAAESNLPDFTTLPTDKHVGTVQEVVHNPEHNLYQLQYGAFAVNIPFKGSIKVVHQWPGLPKGVKFDPSDQELIWHLMAKHGKSGIKPHPFIDEFIPTVEEDEGICYTHPQKLPGVKQNGSVSHFFHRTFKAYNTGTRKRRRINTDDADVRWHKTGKTKPVLVDGKHLGCKKIMVLYISPLKGGKAEKTNWVIHQYHLGTGEDERDGEYVVSKIFFQQQFKPRDKNAQELTTSDDLESMAAESNLPDFTTLPTDKHVGTVQEVVHNPEHNLYQLNRNCEISIEETVVLPPSVKTTKDGDNLQSQDQKLWEGDSQFELLDSQQLAEGLALCDEFLLSQSQTSCGGGDEPRETKPCLAAYAHLSAEDFKKDLECQRLEPTDNTNLELDNTDEFRLSQIVWFRYHQLPSLK

SEQ ID NO: 14480 - protein, 103 aa, Zea mays
  VARIANT 61..103: note = Derived polymorphism lacks residues 61 to 103
  VARIANT 7: note = Ancestral polymorphism is R, Derived polymorphism is C
MKINAGRRDDGIAAATLLAAVLFGCLATSVQCARVVPADATTGDGERGQEAELALPPPFCYKACGNGRCDFCCASQYTPTFCWDTQAMCKRECHPPISPPSSV

SEQ ID NO: 14481 - protein, 135 aa, Zea mays
  VARIANT 109..135: note = Derived polymorphism lacks residues 109 to 135
  VARIANT 105..135: note = Derived polymorphism lacks residues 105 to 135
  VARIANT 48: note = Ancestral polymorphism is T, Derived polymorphism is R
  VARIANT 7: note = Ancestral polymorphism is A, Derived polymorphism is T
  VARIANT 1: note = Ancestral polymorphism is V, Derived polymorphism is M
MEQWREAEAMPAEAERSREVADVRGQVTSWLQNAMGLPTLFDVASDATLGALAADANEFLDSAGELLEASTHVLLYEGNHDAKDGMPTAEAWIRELNWDGLAAFQDTAQAVWRQGNGGAGQGQKLAGYRHDSLKE

SEQ ID NO: 14482 - protein, 129 aa, Zea mays
  VARIANT 113: note = Ancestral polymorphism is R, Derived polymorphism is H
  VARIANT 110: note = Ancestral polymorphism is A, Derived polymorphism is T
  VARIANT 108: note = Ancestral polymorphism is D, Derived polymorphism is A
  VARIANT 105: note = Ancestral polymorphism is R, Derived polymorphism is C
  VARIANT 97: note = Ancestral polymorphism is A, Derived polymorphism is T
  VARIANT 95: note = Ancestral polymorphism is E, Derived polymorphism is V
  VARIANT 94: note = Ancestral polymorphism is E, Derived polymorphism is K
  VARIANT 92: note = Ancestral polymorphism is E, Derived polymorphism is V
  VARIANT 87: note = Ancestral polymorphism is G, Derived polymorphism is D
  VARIANT 79: note = Ancestral polymorphism is A, Derived polymorphism is V
  VARIANT 76: note = Ancestral polymorphism is A, Derived polymorphism is T
  VARIANT 36: note = Ancestral polymorphism is D, Derived polymorphism is N
  VARIANT 32: note = Ancestral polymorphism is A, Derived polymorphism is T
  VARIANT 31: note = Ancestral polymorphism is P, Derived polymorphism is Q
  VARIANT 14: note = Ancestral polymorphism is A, Derived polymorphism is S
  VARIANT 12: note = Ancestral polymorphism is L, Derived polymorphism is M
MVGADTALLRDLEARAARRLDQATLGAVMIPAFGHNGEHAPALLLDVPLVLRLVRGFLKEGSGGSKAARVARLVDAYLAASAALEAGLRPAEFEELARAVPAHARPAADALYRAVDTYLKEPPYLVFQK

SEQ ID NO: 14483 - protein, 452 aa, Zea mays
  VARIANT 206: note = Ancestral polymorphism is P, Derived polymorphism is L
MIATTRGSSAKAAAAVGGKAARACDGCLRRRARWYCAADDAFLCQGCDTSVHSANPLARRHERLRLCPASPLQTPPDRSAAAAATATNKRERHDEVAVPAWFGRKARTPRGGHAKSVGQVALSRRLVVPHAAGGDSDSPDERNGGEEEQLLYRVPILDPALAEFCSPPPLEDAAGLALDASVCNEDGAIEDPAKPDPAAPLAQFCPVSGHFNFGPTDAELREFAADMEALLGHGLDDGNEEDSSFYMETLGLLDPMEVGDDATQVKVETDGSSACCEASGTLACGLELDLEASDEMLDIDFDYASPQDTATDERAASSDTGADAQFLQTSLSLTLNYEAIIQSWGSSPWTGGGERPHVKLDTRWPHDYTNMWVVGGVVGHGGEDLPGTPRLGMDGGREARVSRYREKRRTRLFSKKIRYEVRKLNAEKRPRMKGRFVKRATAGGSLAIAGLA

SEQ ID NO: 14484 - protein, 263 aa, Zea mays
  VARIANT 75: note = Ancestral polymorphism is L, Derived polymorphism is R
MGNSIGGRRKGAKVMQLDGTAFRVKPPASAGTVLRDHPGFQLLESEEVKLLGVRARPLAHDAQLRPGRLYFLVALPRPAAPPRRAWSGALHVGARERLESLMLTRRSTSDLSLAASAGTAPPSPLSTASEGGGPVRLRMRLPKAEVDRLMAESRDAADAAARIMQLCAAATPDRTPRFVPTPDWGAGAAAAAFPQTPDRSPRFAATPDWGTGFMMPPGAAAAPTTPERWPALPRTPEYASPGVKASRKEKRTRFVALPDEIIA

SEQ ID NO: 14485 - protein, 377 aa, Zea mays
  VARIANT 21: note = Ancestral polymorphism is S, Derived polymorphism is W
MAALAAVVVLALATVVAGAVSAPSRSPVIYIFGDSMSDVGNNNYLLLSLAKCNYPWYGIDYKNGYPTGRFTNGRTIGDIMAAKFGSPPPVPFLSLYMTDDEVLAGVNFASGGAGLLNETGIYFVQYLSFDSQISSFEQIKDAMIAKIGKKAAEETVNGAIFQIGLGSNDYVNNFLRPFMADGIVYTHDEFIGLLMDTIDRQLTRLYDLGARHVWFSGLAPLGCIPSQRVLSDDGGCLDDVNAYAVQFNAAAKDLLEGLNAKLPGARMSLSDCYTIVMELIDHPEKHGFKTSHTSCCDVDTTVGGLCLPTAQLCADRKDFVFWDAYHTSDAANQIIADRLFADMVGSGAVVPGNGTSPPRVVNAPTTMPIHAAPPRKP

SEQ ID NO: 14486 - protein, 339 aa, Zea mays
  VARIANT 39: note = Ancestral polymorphism is Y, Derived polymorphism is H
  VARIANT 262: note = Ancestral polymorphism is G, Derived polymorphism is E
  VARIANT 279: note = Ancestral polymorphism is A, Derived polymorphism is S
MPSTPTLVPPCDAVEPLLAESSDRFSMFPIRFPQIWEFYKKAVASFWTAEEVDLSADARHWDEALSPDERHFISHVLAFFAASDGIVLENLASRFMSDVQVAEARAFYGFQIAIENIHSEMYSLLLETYIRDDVEKDRLFRAIDTVPAVRRKADWAMRWIDGGERFAERLVAFACVEGIFFSGSFCAIFWLKKRGLMPGLTFSNELISRDEGLHCDFACLLYDVLRSKLDEARVRTIVADAVDIEREFVCDALPVSLVGMNGDLMSQYIEFVADRLLMALGCKKMYNVTNPFDWMELISLQGKTNFFEKRVGDYQKASVMNSLNGSAAANHVFSIDEDF

SEQ ID NO: 14487 - protein, 199 aa, Zea mays
  VARIANT 82: note = Ancestral polymorphism is R, Derived polymorphism is Q
  VARIANT 43: note = Ancestral polymorphism is M, Derived polymorphism is I
MDLDADMIPTSPSADSSPSSSDLDTESTGSFFPDRSTTLGTLMGVSAFGGRRAPAAGEGSAEGPQRAALGHGEEARGAGVWRRRRRRRRRGSWWRLCRDHGGPPTSLGEFLDMERQLAGADFLCDGSGAGASGRETAAALFENGRVRPPPQPAAAAAEERGRWRLLRASDGSSTSTATASASLARLPVLLTGICSGGAG

SEQ ID NO: 14488 - protein, 134 aa, Zea mays
  VARIANT 24: note = Ancestral polymorphism is E, Derived polymorphism is V
MIMSYDYIFFSSYLHYGLLAARAVVLKSSNGNGYNNCMLEGYQGQYKYGSETFEASASPSGASYSKCKNDVVKSLKVDKACTHLKCSFGGIWNGGGGAGQKNLFVASFFFDMADEIRCHWLFAFCVTGKWKSSE

SEQ ID NO: 14489 - protein, 324 aa, Zea mays
  VARIANT 72: note = Ancestral polymorphism is P, Derived polymorphism is L
MWKLVAAAVALIVLCACTTPARGGDDYTAFVYAGCSQGRYDPGSQYAADVDTALSSLVNSAGFVAYANYTSPGQLVGVYQCRSDLPAAVCGGCVRSAVSKLSSLCNAAAGAAVQLRACFVRYGNDSFLGRQDTTVLFKKCGGGESAGGDTGVVAMRDAALGALVAAAAPGAGEGSYRAGAAGYVQAMSQCVGDLGAKACTDCVSAAASQLKAGCGYASAGEVYLGKCYARFWSNAAPGGGGGEGTGTGGGLPVVGGGGGNVIGGGGVGGAGNGYGYGGFVPNTYGQHDESGKTLAIIIGLVAAAAIVIVFLSFLRRSRAAGGKT

SEQ ID NO: 14490 - protein, 117 aa, Zea mays
  VARIANT 8: note = Ancestral polymorphism is E, Derived polymorphism is G
  VARIANT 52: note = Ancestral polymorphism is P, Derived polymorphism is L
  VARIANT 79: note = Ancestral polymorphism is L, Derived polymorphism is V
MASWIGGGVEVLVISSRKKGPAGGALIPKGGWELLDESMDEAARREAKRRRLAWSGTPAPRWAAATTPRTRASSFVLPLRVTAELDRWPEMAARRREWVPAAQAIARCPHPWMRTSR

SEQ ID NO: 14491 - protein, 149 aa, Zea mays
  VARIANT 87: note = Ancestral polymorphism is R, Derived polymorphism is C
  VARIANT 84..149: note = Derived polymorphism lacks residues 84 to 149
  VARIANT 60..149: note = Derived polymorphism lacks residues 60 to 149
  VARIANT 58: note = Ancestral polymorphism is S, Derived polymorphism is F
MFSSIRRSRSRRRPLALCSLITRFPPPDLATMSLSSMLGLTIAPPRGRSRESHSSSPSDWSDPSESTSSSTSAWKRRARKLSDEFDRISAEQQHQLVVEKKRKAGAATPVRKQASAPAAGAPARASLKRKAAAPSSAAGARRTSPRNKH

SEQ ID NO: 14492 - protein, 963 aa, Zea mays
  VARIANT 569..963: note = Derived polymorphism lacks residues 569 to 963
MVRRSAAIWSCGSCFSIFHLPCIRKWVRYPASAADASRAAEPASPSWRCPGCQFVYATPARELTYSCFCGRRRDPPNDHFLTPHSCGEPCSKPLERAEPPGAKGEDVDATRCPHVCVLQCHPGPCPPCKAFAPDRPCPCGKQIIVRRCADRSTPVTCGRPCEQMLPCKRHRCEKVCHTGSCGDCAVLISVRCFCRNKNETLLCGDLMEKGELSEEDGVFSCNEVCGRTLACGNHACKDMCHPGPCGECELMPWKVSTCHCGKTRLLERRASCLDTIPTCDKICDKKLPCGVHKCKVNCHEGECPPCLVLVEQKCRCGSSGQMVECHKFSMEEFRCKKPCGLKKNCGRHRCSEICCPLSRKVAHLEGGNWDPHLCQISCGKKLRCGQHACQLLCHSGHCPPCLETIFTDLTCACGRTSLLPPLPCGTPTPSCPHQCSVPQPCGHPASHSCHFGDCPPCIVPVMRECIGGHVMLRNIPCGSKDIRCNQPCGKNRQCGIHACNRPCHPPPCDQTPANGDASSSSGGKAACGQVCGAARRECKHTCTAPCHPSSPCPDLRCEFAVTITCSCGRITATVPCGAGGSSMGDNMFEVSIIQKLSMPLQSVESNGRVPLGQRKLCCDEECAKMEKKRVLAEAFDITPPNLDALHFGENSSSSDLVSDLFRREPKWVLAIEERCKFLVLGKVRGSSSSNVKLHVFCPMMKDKRDAIRQIAGRWKLSVQSAGWEPKRFVTIHATPKSKPPARILGSKAGVPVTAAHPYFDPLVDMDPRLVVAMLDLPRDAGVSALVLRFGGECELVWLNDKNAIAVFNDPARAATALRRLDYGSAYQGAAMFMPSSAQASFSSNVWIGEQKDGGITARNNPWKKPASAAEPDPPSGDWTGVAGHAPAPGWRGVNTASQVMGTTNRWNVLESDAAASSGPGNERKPAPRMDTAYSAIPNVGNAGPSMTKLQPDAEVDHWEEACE

SEQ ID NO: 14493 - protein, 348 aa, Zea mays
  VARIANT 295..348: note = Derived polymorphism lacks residues 295 to 348
  VARIANT 74: note = Ancestral polymorphism is D, Derived polymorphism is H
  VARIANT 51: note = Ancestral polymorphism is Y, Derived polymorphism is S
MLRMGRASATAGVLRFVRAFALCVATACLLLAAGMPSPVAAQDPSKLSLQYYSKTCPNVEHVVRTEMECAVRADTRNAALMLRLHFHDCFVQGCDGSVLLDDTATMIGEKQAEQNVNSLKGFDLVDKIKEKLEAECPGTVSCADLLAIAARDAVVLVGGPYWDVPVGRLDSKKASLDLANSDIPTAQQGLLTLIAKFWEKGLDATDMVALVGSHTIGFARCENFRDRIYGDFEMTSKYNPSSEAYLSKLKEVCPRDGGDDNISAMDSHTSDVFDNAYFETLIKGEGLLNSDQAMWSSIAGYSTSDTVNKYWADPEAFFKQFSDSMVKMGNITNPAGGEVRKTCRFVNT

SEQ ID NO: 14494 - protein, 192 aa, Zea mays
  VARIANT 44: note = Ancestral polymorphism is L, Derived polymorphism is I
MNQLSLLHHLHRLSPGRGHGLTAVVRAGLSSCEPPTPQQHAKRLLAIAPHESIAAAREEESHLRQELAAAGNNNEAGGGGRTCALPTWALLGGITVGVTVALALSAGPGPALALGPEGPLVEEFWDNMRRYALYVVTVSTGVAYTVLQPIVELLKNPVTALLIVAVIAGSGFLVSQVLNAMVGNSDFIYRYE

SEQ ID NO: 14495 - protein, 1200 aa, Zea mays
  VARIANT 752..1200: note = Ancestral polymorphism lacks residues 752 to 1200
MALQLRRLLPHGYAQRHRAVIHALSLLPPPPAMLQFEVFQRYSSSPWPFSPFRPCKMCGVAFRSNSTRKISSRNNFGVALQPKSSAFITPRLFGSYSSVCFRATASCGIALKANNIGNSRPFSTTYSKKIRFLVKNKISFSNLNMRRKDGSVAHSLLHRSEKCQSTLATCSTIVDEASTSTSNNSKSVTDAKTDTAKRKSSRGSKKEVDGDMKEKEVHTNKKRIFARTRKAATKTSDNISTNQENKKTDNCKLKRGADSFKEKKVNNRAKSKAEVSAASSVPEICMQSSIDGSVIEKKPLVPLYPPRAKSVVVVESATKAKVIQKYLGDMYEVLPSYGHVRDLAGRSKSVRPDDDFSMVWEVPAAAWTHLKSIKVALQRAENLILASDPDREGEAIAWHIKEMLEQQGVLGFDVTVARVVFHEISEDAIKKALMSPRYIDMDLVNAYLARRSLDYLIGFGISPLLWRKLPGCQSAGRVQSAALALVCDREAEIEQFKAHEYWTVQTDFKIQSADPSNATCIPFCIKHLNSKKLDQLSIPSQEEAQAIEKMIHSSTFEVLGVKRSKIHKNPPLPYITSSLQQDAANKLHFTAGYTMKIAQNLYEGINLSSEETTGLITYIRTDGFHISDGAVEDIRSLVKERYGQKYVSEDIRKYLKKVKNAQEAHEAIRPTSIRRPPSSLVGILDDDSLKLYTLIWKRTMACQMEASRTEMVGYSRASFFYVVDFILHDDNGYELWVYKVTLVKETLISLTWHIQVDVGIPEGEMNFHSTASKLDFKGYRAVYEGPIVSAIAFSHLHDLLLVIRDDQASPCIDSSEGDCVHECNFEALSKLMVAVKDLVFPVNVHLGQHFTKPPPRYSEGALIKKLEELGIGRPSTYASIMKVLLDRKYVTAKSRVLHPEFRGRMVCSYIPDCMFPVSAFLLHHFSEVSDYNFTANMETEVFKYFSAYVFYNVSAGSTEWKGLLKDYWERFSKYCADVSKLDGRKVERMLEEKFGPILFSDVYKDCRICPSCSEGTLRFKVSRYGEGYFVGCDRHPKCKYIARSLSQQEDETEPIEENAKSFEPRLLGVMPDSDQKVFLKQGPYGYYVQVGEDKKGLFPKRVSLSKVKDIDSVTLEDAIELLQYPKILGKHPEDDNLVLITHSKVGYNIKHRRFIAQVPKNMDPKKMTLERALKLLSSKSVRRIGRLKGKVEKKEPIEWH

SEQ ID NO: 14496 - protein, 118 aa, Zea mays
  VARIANT 7: note = Ancestral polymorphism is E, Derived polymorphism is K
  VARIANT 10..118: note = Derived polymorphism lacks residues 10 to 118
  VARIANT 12..118: note = Derived polymorphism lacks residues 12 to 118
  VARIANT 13: note = Ancestral polymorphism is E, Derived polymorphism is K
  VARIANT 15: note = Ancestral polymorphism is S, Derived polymorphism is L
  VARIANT 53..118: note = Derived polymorphism lacks residues 53 to 118
MLLAEREKEQAQEASELQTSMIETLEAAEIEKQRHHSTRMEALARLARLEVDQVAQLREEVELKKLAQDKYRRKLTKIQKTSAPPVDEIESLRRFKLEEEINDAEYTLTCDRIVSLKD

SEQ ID NO: 14497 - protein, 500 aa, Zea mays
  VARIANT 239: note = Ancestral polymorphism is N, Derived polymorphism is I
  VARIANT 342..500: note = Derived polymorphism lacks residues 342 to 500
  VARIANT 356: note = Ancestral polymorphism is R, Derived polymorphism is M
  VARIANT 450: note = Ancestral polymorphism is D, Derived polymorphism is Y
MGWKVKSSPAAAPGDKLRFPPSSAARSRMKLWLVPATTTVLLWTCVLQLTAVGDTWGPRVLKGWPSCLTPHEEASAARPHPLAVDKAALALPPKRIYRNNGYLMVSCNGGLNQMRAAICDMVVIARYLNVTLVVPELDKTSFWNDPSEFQDIFDVEHFITSLRGEVRILRELPPRVKRRVELGMFHSMPPISWSDISYYQNQILPLIRKYKVLHLNRTDARLANNGLPIEIQKLRCRVNYASLKFTPQIEELGKRVIRILRQNGPFLVLHLRYEMDMLAFSGCTQGCSTEEAEELTRMRYAYPWWKEKVIDSDLKRKDGLCPLTPEETALVLRALDIDRSMQIYIAAGEIYGGKRRMASLTSAYPNVVRKETLLEPSDLMFFQNHSSQMAALDYLVSLESDIFVPTYDGNMAKVVEGHRRFMGYKKTVLLDRKLIVELVDRYTNGSLLWDEFSSLIKVAHAKRMGSASKRMVIPDRPKEEDYFYANPQECLQDRDFLQTS

SEQ ID NO: 14498 - protein, 138 aa, Zea mays
  VARIANT 51: note = Ancestral polymorphism is E, Derived polymorphism is G
  VARIANT 64: note = Ancestral polymorphism is S, Derived polymorphism is P
MSRVTAAVLFYILAVAALSAAEAPAESPKEGSAAKAPEAAKRTAAPAEAPGAASTPVAAAAPSSSSRKSGPATAPATASTPPSSTDEELSPSPPASTAAASPAAEGPAADDSAGAAALGSGAAIAGVAAAVATMIFFY

SEQ ID NO: 14499 - protein, 703 aa, Zea mays
  VARIANT 21: note = Ancestral polymorphism is K, Derived polymorphism is M
MAAAHLRLLPLLLLTLTAAAKNVTLDSAILSFADLTLLGDSFLRNGSVWLTRDTDVPSSSAGTVLCTQPVAFRGPDATASNATAAVASFAARFSFVIANPNAGAAGGDGIAFFISPDRTTLGATGGYLGLFNSSNSAAAKNGSASATIVAVEFDTMANPEFADPSDNHVGLDLGSPVSVTAADLAASGVDLKSGNVTTAWIDYRSADRRLEVFLSSYAVAAKPKRPVLSVAVDLSPYIKEAMYVGFSASTEGSTQQHTIKGWTFQTFGFPPTANSTFESNATSNSSEPAAPAPPPASNAPNSHKRRVGIALGILGPVALALAFIFFAWVSIKKLIELTSRTDAAFSTELVKGPRKFSYRELSAATRGFHMSRVVGKGAFGTVYKAAMPGAAATTYAVKRSTQAHQSRSEFVAELSVIACLRHKNLVQLEGWCEEKGELLLVYEYMPNGSLDKALYGEPCTLSWPQRYTVAAGIASVLSYLHQECEQRVIHRDIKTSNILLDVNLSPRLGDFGLARLMDHNKSPVSTLTAGTMGYLAPEYLQSGKATEQTDVFSYGVVLLEVCCGRRPIDKDERGGGGRGGGGKNVNLVDWVWRLHGEDRLIEAADARLAGEFDKAEMLLLLLVGLSCANPNCEERPAMRRVVQILNREAEPAPVPPKKPLLVFSSSASAKLQEIAFSCGDDVRGGYSVAKPASPKSEGADIER

SEQ ID NO: 14500 - protein, 107 aa, Zea mays
  VARIANT 19: note = Ancestral polymorphism is P, Derived polymorphism is L
  VARIANT 35: note = Ancestral polymorphism is C, Derived polymorphism is Y
  VARIANT 40: note = Ancestral polymorphism is A, Derived polymorphism is D
  VARIANT 45: note = Ancestral polymorphism is A, Derived polymorphism is T
  VARIANT 52: note = Ancestral polymorphism is V, Derived polymorphism is M
  VARIANT 69..107: note = Derived polymorphism lacks residues 69 to 107
  VARIANT 70..107: note = Derived polymorphism lacks residues 70 to 107
MNPVRPTRSLAQSTGDGDPPGVLLPRRAQAGIAFCRLLSATKDAALLMLAIVGLCRLPPDDADAGHQHQQPGEVKTRLPTVEYGQLLAEHEQQSDDHGCDGDAVSAL

SEQ ID NO: 14501 - protein, 179 aa, Zea mays
  VARIANT 3: note = Ancestral polymorphism is G, Derived polymorphism is S
MAGAAFRAVVFSLLGAATFFVGSSSASWHAQVFVVGGEPRGWRKPTAPNEESYNHWAARNRFHVGDFLHFKYEKNDSVLVVTRGDYQLCAADKPTLRFEGGDTRFHLNHSGYCYFISGAPGHCDAGQRMTLRAMVPQQQDGGNNPAAPARAPAAMSPGGEDDEGGTFEPPGARSSTPGV

SEQ ID NO: 14502 - protein, 482 aa, Zea mays
  VARIANT 109: note = Ancestral polymorphism is S, Derived polymorphism is Y
MAPPPAMQSPGELNDGAYDAPHILFIPSAGIGHLTPVFRVIAGFSSRGIDVSVVTVLPTVSAAETDYFNGLFADYPAVRRVDMHLLPLDASEFTREDPFFLRWEALRRSVHLLRPIITNAAPRITAIITDITLTSCVIPIAKELDVPCHVLFPTAATMLSLNAYYPVYLEKLKGGPEPGVIGDAVDIPGVFRVPRSALPPALLDVNKLFTKQFIDNGRAIVKADGVLVNTFDAVEPAPLAALRGGKIVPGYPPVYTIGPLKSHATKAGDKPGDALLDEWLGKQRARSVVYVAFGNRSAARLDQIREIAAGLEDSGYPFLWVLKTTKVDREDDAELAEVLGDGYLERVKGRGIVTKGWVEQEELLKHPAVGMFVSHGGWNSALEASSAGVPLLVWPQLGDHRVNAMAAVRAGIGAWAEHWSWDGEDTLVTRQEIADKVKEVMADGKLRASVAVAREEAAKAVAEGGTSYRNMHDFIAKLKGGA

SEQ ID NO: 14503 - protein, 483 aa, Zea mays
  VARIANT 22: note = Ancestral polymorphism is F, Derived polymorphism is C
  VARIANT 197: note = Ancestral polymorphism is A, Derived polymorphism is V
MAPPATNSPGEVDSGGRPHVMFIPSAGMGHLIPFFRFIAALAGQSVDISVVTVLPTVSAAEEDYFTSLFAALPRVRRVDLHLLPFDASKLPSNDRDPFVLRWEALRRSAHLLGPLIAGAAPRVSAVITDVTLTSHVIPIAKELGVQCHVLFPSSATMLSLLAYTPVHIDKKAEQGSDIGDVDIPGVCRIPQSCLPQVLLHLDKLFTKQFIANGREIINADGFLVNTFDALEPVALAALRDGKVVPGFPPVYAIGPLMSQQNSVDEGGKEEGSGSPVAWLDEQPARSVVYVAFGNRCAVSHDQIREIAAGLEASNCRFLWVLKTTTVDRDDSAVLTELLGEEFLERVQGRGLVTKAWVDQEALLKHPAMGLFLSHSGWNSVTEAAAASVPLLAWPRGGDHRVNAMVTVSGGVGMWMEHWSWDGEDWLVTGVEIAKKVKEVMSDEAVRARTTRTAEEAAKAVAEGGTSYRSMEEFISSVKATVAS

SEQ ID NO: 14504 - protein, 267 aa, Zea mays
  VARIANT 110: note = Ancestral polymorphism is I, Derived polymorphism is V
  VARIANT 175: note = Ancestral polymorphism is R, Derived polymorphism is W
MAEAGGGGVDQDAGSLPSHTNGVGGGGSSTWEIEELEPDDGRPPRSVPVADDVYVAVGSGGSSMAALSWALRRLAKPRSFVYLVHVFPVVTSIPTPLGMMPKSQASPEQIETYLNQERSKRRDMLQKFLDQCREIQVTVDVYLIESDQIANAIIELVPVLRISQLVLGVSKSNVRKLKKGTTIAGQVHKGAPLYCEVKIICDGKEVTTADPTPPLSPSPVNNNSSSSRSNNPTPPSSTPNHDTTAANGDRKDRERRKITKFLRCFSL

SEQ ID NO: 14505 - protein, 1242 aa, Zea mays
  VARIANT 268..1242: note = Derived polymorphism lacks residues 268 to 1242
MASTAATPEAGSNHSEDGTTVELPIVVTGSTSQESIDTPSTRYLLAPSHVSSSSFTADIELLWRLRKYLLLLGILAVGVTYNAGLTPPGGFWSKNTQGQSGHEAGDPVLRALFFPRHEVFFYCNATAFAASLVLIILLLSKNVARQRLWLRSMQLTMVLDLFSLMGAYAAGSCRAVKSSIYIWVLVLSVFTYIMIHILVFMKVVPRFVSEKRFVPKRLKDVARSVERWILSRCGVHRSEKNSSHEKDLEEARKFTLVLVTFAATVAYQAGLSPPGGFWAENDENKTPATSMLRSGNLPRYNTFVVCNSTSFVASLVTIILLLSPELSRHGIRSRAVTVCVVVDILGLVGAYAAGSCRSVVTSVSAVLVAVLVWICFAVLAGIFVNRSVAEWFGKKIKPDIMRCIDRFGRVFSSNHGRKRSRNPEGENSIASHQQTEESIKGEAEAETARVPEYQLPYHQLAPDIEEGECPGEQQSPGKQQPTNIEVVSISEHASVNEKQAENSSSVMCKLGSQSTDPNSAANEAMTETETENIQDANMEEQQSSLVDGLKTPTTVAGMSNHEHQSVDNHVVQNLIRQTFSTEDQESTTVECLSDIAPNNHNGATNSFKEEKEASEQHLQANEIESFRTNNVARPVENGNVGMYEVTPRQDDGDVNAGANPTDEHLKKSRTYLLLLAILAVSLAYQSGLNPPGGFWTQRGTNNSPKSTHHRPYHLPGDPILEDTRHRRYIAFFYLNAIAFVASLVMIIMLLNRRMSYKGIKRYALQMAMIVDLLALTGSYIMGSSRGTKSSIYIWLLVCLVLVYVAVHVLIATHVIPEGCKKVVAQKIENFSCRYIWTKASFRNRGIDGNGSDCEAGQSQRSDADDKTWERRRNLLLMLAVLAATVTYQAGINPPGGVWSDDSSASGKPGDPILQHNNSKRYDVFYYSNSLSFVASVVITILLVNKESCEHGIKSYALRVCLVVGLVSLLIAYSAGSSRKARESIYLIVIAVAVLIALVIQVLLLSCTQDSLRGPTGQFIERLLQLLFGTDKAWHGDTSKQKESSGRPEKKVRKRHKYLMLLAVLAASITYQAGLNPPGGFWSDDNEGHVEGNPGLKPPGALWSDNKGHLAGNPVLLDINPRRYEIFFCFNSISFMASIVVVMFLLNKSARKKAVPLEVLHLIMILDLLALMTAFAAGSCRKFRTSVYVYGLVLGVVVYLVIAVLLSSGIAKCLRPMDRNRVSSQRSPIRAPTASTRILGDHA

SEQ ID NO: 14506 - protein, 247 aa, Zea mays
  VARIANT 228: note = Ancestral polymorphism is C, Derived polymorphism is W
  VARIANT 219: note = Ancestral polymorphism is R, Derived polymorphism is Q
  VARIANT 136: note = Ancestral polymorphism is P, Derived polymorphism is S
  VARIANT 108: note = Ancestral polymorphism is S, Derived polymorphism is G
  VARIANT 107: note = Ancestral polymorphism is S, Derived polymorphism is F
  VARIANT 90: note = Ancestral polymorphism is S, Derived polymorphism is L
  VARIANT 56: note = Ancestral polymorphism is P, Derived polymorphism is L
  VARIANT 19..247: note = Derived polymorphism lacks residues 19 to 247
MQSSSGGVAIPDAASQCVQCGKEAPKKLHTVGYEPTPGKRAAFVCHSVNLAFLSVPSLGPRPRAVPAIKVAAWIVRIKKKSCFHRPFRLSFALVTGIRLNPDVLMISSRQMSGRDLVNMAKKRTNVIPIIEDVRHSTRYQMLVCMVDVIFSDVAQPNQVPFPSSLVSESLGCHIVGLSVVYPRSLPLYSFDFDLAILSLTNDDHTRIPIQDINWMMQIRVSDASCAQCQTYLYLLCAILISLFCFIG

SEQ ID NO: 14507 - protein, 247 aa, Zea mays
  VARIANT 57..247: note = Derived polymorphism lacks residues 57 to 247
  VARIANT 95: note = Ancestral polymorphism is A, Derived polymorphism is T
MPDILNNGDHIGPLLCHVDKVSSTPVRELNNVAAVSLTFLNKCPVVSAQLWVWGQDWGRSKMPNSQSGRQMQLAFQALAHSPRYATSSGPLCRTAHTGWLHQDIESDDEDLDDEVDDGAEGMVVTTGMKKYLASSSRVDDVEGDLALIDFIKEIPCEPRVEVVLIDDAFVERKSMECLFQPNAYLGDEVFIPINIRETHWYLVVINARNIEIQVFDSLGTSQDRKDLTYSVSMHKLITNSLLTYPNL

SEQ ID NO: 14508 - protein, 155 aa, Zea mays
  VARIANT 132: note = Ancestral polymorphism is T, Derived polymorphism is I
  VARIANT 84..155: note = Derived polymorphism lacks residues 84 to 155
  VARIANT 69: note = Ancestral polymorphism is A, Derived polymorphism is V
  VARIANT 56: note = Ancestral polymorphism is D, Derived polymorphism is H
MDIISAVLQKHFGFSSLKAFQKEVLDAWFAHEDCVLLAAIGSEMLFIQDHMKIIEDDGPGAAFYASAKAMTNGNHTFYVSKLIQRLARLSKYDTMYHMHSITSSASWEKILLSGFRGCCTQLLMKGFVGVATKIHAKSSMVAGEAGTHFLALYHQ

SEQ ID NO: 14509 - protein, 226 aa, Zea mays
  VARIANT 123: note = Ancestral polymorphism is G, Derived polymorphism is R
  VARIANT 207: note = Ancestral polymorphism is R, Derived polymorphism is S
MIELSHARDEEVSDTTTSIIVLALIMSIWLNTDNLLLCKPVGCRLLALNKRLFGIKVGNFCYVKEGLVLGQLTGNRFTITLRGVTAESEDMIKIAVDGLGKNGFINYYGLQFGSGSIPTHLVGAALLRGEWKEFVFSLASFCLNITKSVQRDDINELRKHYKEHGDIDMALRNFPRHLVAERAILQCLKKCPGNHLQALKGIPRTLRMMYVAFFYLHILHFSLYYY

SEQ ID NO: 14510 - protein, 288 aa, Zea mays
  VARIANT 120: note = Ancestral polymorphism is G, Derived polymorphism is S
  VARIANT 125: note = Ancestral polymorphism is R, Derived polymorphism is Q
  VARIANT 128: note = Ancestral polymorphism is G, Derived polymorphism is V
MAMASQCAPSVPPNRSANNGVQRQRRGDDVRDTALLEPSKQPSVTFSVKVLEFLDSKSETDVDVDYNSLYSKQDFLQGEIHAIRDSYLRFARSHMVKYGVEITLQRLGVSGRALSVAAFGSTKSRINGGALIMLPFCQSELKTLGSGANFSSIVQVTEENLAALFINCGQVVDCRMCGDPNSVLRFAFIEFTDEEGARAALNLSGTVLGYYLVNSDDECEMCARTIYCTNIDKKVTQADLKLFFESICGEVGRSLLQTQSPFCTTKSLQKWHHQDRSGDQQDHGLHQV

SEQ ID NO: 14511 - protein, 932 aa, Zea mays
  VARIANT 526: note = Ancestral polymorphism is R, Derived polymorphism is L
  VARIANT 768: note = Ancestral polymorphism is D, Derived polymorphism is V
MRLVVRVIEARGLPPTDADGTRDPYAKAQLGKQRAKTKVMRKTLCPAWDEEFAFRVGDLRDNLLVSVFHEDRYFAADVLGQVKLPLTAVLDADNRTLGTQWYQLQPKSKKSKLKDCGEIRLNVSLAQNYSEEETTAPAHWASDDLASNSDKSTELVKGSSLLNVPIEVSTAVPEIYEIEAAEEDKSNAAPSFVNKLYQMFNSKPKDTEASAPLPSKLNDPSDIAEETLSTSSEAPEKQDHDVSATMTFDELLKAFGSQHEGKEMPENLSGGVVLDQVYAVAPSDLNTLLFSPSSDFLQSLAEIQGTTGLEIQQWRLENDGEILRRVVSYTKAPTKLVKAVKATEDMTYLKADGEMFAVFADVSTPEVPFGNTFRVEVLTCIMPGPELRGDEKSSRLMVSWHINFVQSTMMKSMIENGAKQGLKDNYVQFSELLAKHCRPVDTKDTTSSNEVLSSVQPEQESDWKLAFRIFGNFALLSSVFAFFYVSAHIILASPSIIQGLEFPGLDLPDSAGEVVVCGVLVLQGQRVLNMIARFIQAKRQRGDHGVKAQGDGWLLTVALMEGTNLAATKSSGYSDPYVVFTCNGKTKTSSINFHTLDPQWNEIFEFDAMEDPPSVMKIHVYDFDGPFDEVASLGHAEVNFLKYNNISELADIWIPLKGKLAQACQSKLHLRIFLNNTRGTEVVKDYLDKVEKEVGKKIAMRSPHTNLAFQKIFSLPPEEFLINDFTCHLKRKMLTQGRIFLSPRIFGFYTNLFGHKTKFFFLWEDIEDILLVPATLSSMGSPSLVIILRKDRGMDAKHGAKQLDSQGRLKFHFQSFVSFNVAHKTITALWKARSLTPEQKVSTLMGIFEGGPLECRVMEKVGCMDYSVTAWEPVRADIYQRQVHYKFDKKSARHGGEAMSTQQKSPLSNKNGWLVEEVMTLEGIPVGECFNI

SEQ ID NO: 14512 - protein, 484 aa, Zea mays
  VARIANT 381: note = Ancestral polymorphism is S, Derived polymorphism is Y
MAVPSLLLCLLLLVSPHLGCSYHTSYTRDGRHHVLRSNRDPRRRPKPTCSSAHSAHSAVPVVHRLSPCSPLAGAARNQQPERRSVADVLHRDALRLRSLLHREEDNHRTPAPAAPPGGGVSIPSRGEPIEELPGAFEYHVVAGFGTPMQKLPVGFDTTTTGATLLQCTPCGSGADHAFDPSASSSVSQVPCGSPDCPFHGCSGRPSCTLSVSFNNTLLGNATFFTDTLTLTPSSSATVDKFRFACLEGIAPGPAEDGSAGILDLSRNSHSLPSRLVASSPPHAVAFSYCLPASTADVGFLSLGATKPELLGRKVSYTPLRGSPSNGNLYVVDLVGLGLGGPDLPIPPAAIAGDDTILELHTTFTYLKPQVYKVLRDSFRKSMSEYPAAPPLGSLDTCYNFTGLDAFSVPAVTLKFAGGADVDLWMDEMMYFTDPDNHFSIGCLAFVAQDDDCDGGTVIGSMAQMSTEVVYDVRGGKVGFVPYRC

SEQ ID NO: 14513 - protein, 1767 aa, Zea mays
  VARIANT 557..1767: note = Derived polymorphism lacks residues 557 to 1767
MVVWSTGRPSPRSLSLGSSSSSSSPRLHPHLVLEAKKEIGQRGHPRRRQCEGPREDWRMHLYNAWLPPPVSTAARGEAAAFAGAVRTAADAWLPGDSDSAYATLKWISVFDLFIKAKSDIASEDLQALVKLGLEVFHASHNKFVVQIKWGGLLIRLLRKHGKRLSLVVQWRPLYETLIRTHFKRNMGPEGWKVRKQHFETVTSLVCASRNFFTEGVAAEIWSEFRPLLENPWHNSAFEGVGFLRLFLPANSRNQDHFTTDWIRNCLDIWDSVTNCNFWDIQWASIIARCIKNSRSVNWDAFLPLLFTRYLNMFEVPISSGNGSYPFPVEVPGNTRFLFSSKTRTLSKAIAKSVVYLLKPKSLAFEYFEKLINFLEQFYHPSNGGRWTYSLERFLRYLVVYFEKRLQHEQFVMAVEDHDQSYLGKEERSVFVKAILKLLDRGQYSKDNSLAETVSVATSILSYIEPTLVLQFVAKNFQRALETTTATHQLKNAVTSVAFSGRALLLCSLCSSQNDDSSVVDSFSDLVVASLSNALLGMDANDPPKTIATMQLIGSIFSNLAAVSDDVPILLQSTTLSNWLDEFFSRLFSVLHNLESSSPINEGYQSSFMSGTFLVDSPYYFCMLEILLGKLSKPLFNQSLKRIAKFVNANILPGATSEVGLLCCACVHSYPEEASVYLVKPILETIMSSFEGTPTTGYVGRVVADKASTKAALSPALETAIDYYLRVLAISISYAGPTLLNYKEELNHIITSAFQSPSWKVNGAGDHLLRSLLGNLVSYYPIDQYKPFTCQPIGNIIEPWGCSKAHQDREDEMLNFPPKWHDPSHDELSFANELLQLHFQSALEDLLTICQTKVHSDTAGDEKEHLKITLLRIHSALHGVMSCLPEIRPSYKDGRSLEVESAFFIAGSAGSTVGSSEMREKAAEFVHIACRYLLKERTDDSILLSLVVRVIDALVNYGSLEYQEWSSHVQAWKLESASIIEPPCNFIVPFHAQGKKRPRWALVDKANLHSTWRCSQSSYHRYRMNADVSPSVPMINLMNDLLDLSLHNYETVRSYAGRSLTKLLKRWPSLISNCVLTLTGNLRDPKAPEHVVLGSCSILISQTVLRHLTTDSVSLSSFIMGILESSHHESLKCQKAITELFVTYNIRFSGISRSFFKTPENQADKPGFLSLISQINALGFETNGLHWRYNLMANRVLLLLILASRSESGIYSQMLAKIAGHFLRNLKSQLPHSRMLAISALNTLLQGSPHKTSAQNSKQPIDHPEDCNISSTEEILNEIIREEGFMNETLNSLSHVHIISDNDGSSKASYGASSFQSGSDKAITYFYFDFSASWPRTPSWISLLRGHTFYSSFARIFKRLIQQCGMPVISSLQSTLEEFLISKERPRQCVAAEAMAGMLHSDIIGNLECENNWLMAQLHKIMLAPSVESAPEWAACIRYAVTGKERAGTRAPVLRQKVLECLCTPLPHSMATSVLAKRYSFLSVALIEISPPKMSPAEKQYHVKILDELLDSMNHSSAQVREAIGIAMCVTTSNMRLSGLFGTGCSPQGLHGDVSMIEQTGNKYWSERLTDGANELAVSIQNSTQSKQLESTSDSAEDSMDDREQADAKRMETIFHFMIASLKSGRSSVLLDTIIRLVYPILSLQVREHAAGVLASLMKGIDEDLSKDFRERSYAQAQHIFVARRRNLKFSVGTIHGAVLALTASVLSVPYDMPSWLPSNVSLLARFIREPPPIRSTVTKAVAEFKRTHADTWSIQKDAFTEDELEAS

SEQ ID NO: 14514 - protein, 576 aa, Zea mays
  VARIANT 385: note = Ancestral polymorphism is A, Derived polymorphism is S
MQVPVGFLGKLWSFVSFVPFFVLLLLLGSIKAALVGPVTASIVFFGSSAVIIGLWPAHFIWTYYCVLKTERIGLQLKILTGLLLPLPLLLLPVLASIGSLLGGTGYGVCVPLMATFEAVGEGVTDKLTHCFTLQDGTVSAMAGACTVVRDVTDFCFHSYFSFMDDLIDKMGDNEEAPLDIKLSYLPRSMVVALIAVPVDVLLISAVALWKSPCMLFKGWQRLCEDLVGREGPFLETVCVPFAGLAIVLWPLAVIGGLLASFFSSFFFGFRAGLVAYQEASFQMGLAYMISAVAIFDEYTNDLLYLREGSCLPRPKYRRADIMRECETEPAERQQTGHHKHRRTLPRSKTFMQTVQRLRPIQIWDWFFRSCELNGRILLSEGLITAQDMEQYITNGKCKKLDTKLPCWCIFQCLLRSANSDSDGLVISDHVQVTTLNWPKDRVLDWLLGPLLLIKDQMKKLEVTEDEEMCLRKLIMTSKNEKPSDWDDSGFPSDDNIKRGQLQSIIRRLQGIVAYMSRVPSFRRRFINLVKAMYLEAIEAGAIDGSRKVKADVADRCAEDIAGSCSSTDTPANIHMV

SEQ ID NO: 14515 - protein, 166 aa, Zea mays
  VARIANT 14: note = Ancestral polymorphism is T, Derived polymorphism is I
  VARIANT 27..166: note = Derived polymorphism lacks residues 27 to 166
  VARIANT 54: note = Ancestral polymorphism is D, Derived polymorphism is N
  VARIANT 74: note = Ancestral polymorphism is V, Derived polymorphism is M
  VARIANT 84: note = Ancestral polymorphism is P, Derived polymorphism is S
  VARIANT 127: note = Ancestral polymorphism is A, Derived polymorphism is V
  VARIANT 132: note = Ancestral polymorphism is V, Derived polymorphism is A
  VARIANT 140: note = Ancestral polymorphism is A, Derived polymorphism is P
  VARIANT 155: note = Ancestral polymorphism is A, Derived polymorphism is V
MLDYDYLVVALGAIVSTFNTPGVLEHYCFLKIYIHEATNCIIYHVIFSAFLYHDMASHHESQEVEDAQKIRKGVIDCFEKASLPNISEEEKRKILHFVVIGGGPTGVEFAAEMHDFLVEDLVKLYPAIQDLVKITIIQSAEHILTMFDERIASFVEQKFKRAGSEI

SEQ ID NO: 14516 - protein, 181 aa, Zea mays
  VARIANT 65: note = Ancestral polymorphism is R, Derived polymorphism is W
  VARIANT 37..181: note = Derived polymorphism lacks residues 37 to 181
  VARIANT 27..181: note = Derived polymorphism lacks residues 27 to 181
  VARIANT 21: note = Ancestral polymorphism is G, Derived polymorphism is R
  VARIANT 20: note = Ancestral polymorphism is A, Derived polymorphism is V
  VARIANT 19: note = Ancestral polymorphism is F, Derived polymorphism is L
  VARIANT 17: note = Ancestral polymorphism is V, Derived polymorphism is G
  VARIANT 10: note = Ancestral polymorphism is Y, Derived polymorphism is H
  VARIANT 8: note = Ancestral polymorphism is F, Derived polymorphism is V
MIRKIPSFEYWSFEILVLFAGLMPDSQLSTSIIAMCQNTEAISYMITYGFAAVISTRVSNELGARNIANARKALTVSLALSLMLGVAFLRLLGLGHDLWVAPLHHQRGRGQRLRLHDAAAHRLCRAGLHTGGTLRRRQGLRVAAPDGMDQPGGLLCHRLVARHPLRIHACLPNQGTVYVLF

SEQ ID NO: 14517 - protein, 130 aa, Zea mays
  VARIANT 122..130: note = Ancestral polymorphism lacks residues 122 to 130
  VARIANT 118: note = Ancestral polymorphism is T, Derived polymorphism is I
  VARIANT 110: note = Ancestral polymorphism is A, Derived polymorphism is V
  VARIANT 107..130: note = Ancestral polymorphism lacks residues 107 to 130
  VARIANT 105: note = Ancestral polymorphism is E, Derived polymorphism is K
  VARIANT 87: note = Ancestral polymorphism is C, Derived polymorphism is Y
  VARIANT 85: note = Ancestral polymorphism is G, Derived polymorphism is R
  VARIANT 63: note = Ancestral polymorphism is S, Derived polymorphism is L
  VARIANT 2: note = Ancestral polymorphism is T, Derived polymorphism is M
MTRGGGGDTKSFYRQQKTHAAAAAAATAATTKPTGGVSKKAAVHHHKKAALATNVHPAPGQWSEFRISNHTGTICETVICLEPPGSYQFFELTLENLFINNLNAENRCTADCATAFLIALLQSPAQDVEE

SEQ ID NO: 14518 - protein, 899 aa, Zea mays
  VARIANT 220..899: note = Derived polymorphism lacks residues 220 to 899
MGRRKERRLAAMAAAGRRVKLDLFLDSSPGEASHNNGIGGENRDQQTVVPTSPSSSGGFHQFSSKGYVKKTCLWIMEHKYGGNLDLYKKENPLALLGQYSDDEVEDEEAADQPTGEAKGSPGDASAQLTSQRADIAGDNSEAKIEPSASVGDQQEAAPQAGDVKNYTQSVTEENTIAPEPTVQEESVKATESLPDSSGMQIVGDVGGNWKAVMHEQSNQCYYWNTVTGETSWDIPNGLASGVATAFVPSDVDYSNEAQTHVLPHSTLEAYPSDMSVGNGTTYPNLGMACGSAHVTQDAYAYAAPIASNEPLDIDPLYLAKYGDGLLQRLDLLERLCGSNKGLELIRREIEIRMSDLNALSSYGSSLLPLWLHAEVHLKQLDSSISKLEMNYHADSEPRNSKTEVAEHRAPDDADLITPSNGEALKYEVCAGITIDANMKIGKPASTSQNSQGRDNAAVPPKIESDNDEDMDVEMEVDEDNVEEQAQCSSVPEKEHPPSEQLSSSNLPSFEDPTPPEDNSVPPPPPEEEWIPPPPPEHEHEPAPPASPEEPAASYVQVDTIPQPYIAQENVGYTISGMEYYSTEGTNANYYMQVSEPHVLQAQHSYYAPVSGSGISVSVDGTSIAPESYYTYPSVTVAASAVAAEHSGYYASSVSAIYSSAADIKTSSASLVSAISNSDLKNHDNVISNDASIVPFTQAVVATSAAGTTSVPESSTQPSSSTTNQIKVIRNKKRVVGITSSLRSNKKVSSLVDKWKAAKEELRDEEEDEPETALEALERKRQKEIEEWRKQQIAFGHAQENANFVPVRGDWRDRVKRRRAEAKKESKDDIVVASLSSSKQHKGSPDLAELSKGLPTGWQVSILDCIISDANIAYLDESTKQVYYGNSLTSETSWERPTNE

SEQ ID NO: 14519 - protein, 338 aa, Zea mays
  VARIANT 36: note = Ancestral polymorphism is V, Derived polymorphism is A
MATNKPFAVNKLLPVVALLLLLAACSSPVVVAQLVAGYYSKTCPDVEEIVRDEMEKIISAAPSLAGPLLRLHFHDCFVRGCDASVLLNSTEGNLAERDAKPNKSLRGFGSVERVKARLEAACPGTVSCADVLTLMARDAVVLAKGPFWPVALGRRDGRASSATEAADHLPPAYGDVPLLTRIFSSKGLGVKDLAVLSGAHTLGTAHCPSYADRLYNFSSAYDSDPSLDTAYADRLRSRCKSVHHDDKDKAILSEMDPGSYKTFDTSYYRHVAKRRGLFQSDAALLADATTREYVHRIATGKFDDVFFNDFAESMTKMANVDVLTGAEGEIRKKCYIVN

SEQ ID NO: 14520 - protein, 631 aa, Zea mays
  VARIANT 336..631: note = Derived polymorphism lacks residues 336 to 631
MAGDITCGSLLQKLQFIWDEVGESEEDRDKVLYQLDQECLDVYKRKVDQATNSRDLLIQALDDSKIELARLLSALGEKAIARTKSYEVLLQVFRFESICFVAGHTIENIQSVQPEKTTGTIKQQLAAIAPTLEQLTKQKNERKREFVNVQSQIDQICGEIAGTIEVGEQMTTPQVNEDDLTLERLEDFRSQLKDLEKEKSNRLEKVLDYVGIVHDLCTVLGMDFLSTVIEVHPSLDDSIGDNCKSISNDTLSKLDNTVATLNEDKKLRLSKLQELAGQLYDLWDLMDAPKEERRMFDHVTCNRSASVDEVTAPGSLALDLIEQAEVEVQRLDQLKYSKMKEIAFKKQTELEDIYAGAHIVIDTAAAHEKILALIEAGNIEPSELIADMDTQIAKAKEEALSRKDILDKVERWMSACEEESWLEDYNRDDNRYNSSRGAHLNLKRAEKARILVNKIPGMLYVPLIADVMSSFILALVETLVSKTTAWEENRGLSFMYDGVPLLAMLDEYAMLRQEREEEKKRMREQKRYIEQQLNTDHEGPFGSRVSPNRPASSKKAVGVKVNGSVSNGTPPNRRLSISGQQNGGGHGVRSGGKDSKKDTAKTASPGNNAVAAAPVDAVSQISVTDPVPSTP

SEQ ID NO: 14521 - protein, 483 aa, Zea mays
  VARIANT 105..483: note = Derived polymorphism lacks residues 105 to 483
MGSESEPAKGLLPYLQRADELQKHEPLVAYYCRLYAMEKGLRIPQKERTKTTNSILISLMNQLEKARAYIWDKKSLTLGPDDNLHLEGFALNVFVKADKQDRAGRADINTAKTFYAASIFFEILNQFGELQPDIEQKQKYAIWKAAEIRKALKEGRKPEAGPPGGDKDEAPVSTTTISQDMGQSPSFSSVHQGSEASPRPVNMDFSRRDSFSAVQPGNNVPHQSTEFNDHPSTQLPYSPPPPSQSQHPSPSQSYSSPSYQATTDYPSSDFHKPSPNYSTPGYTSTDFPTNEVHKPPSNYSPPPYTRTDRPSNDGYNPHSNGKPDVSAYPQAYQPSPYTFDPQHNSQNYYSTEAPAVPYNYPNFQSYPSFQDNTSASVLTHQSSFYPESDDPAATSHTPASNSSVPTHYHPTADCSPQVTPPAAPPASQYRYDSSYQPEVEKIAEAHKAARFAVGALAFDDVSVAVDHLKRALDLLTNPSAEPH

SEQ ID NO: 14522 - protein, 231 aa, Zea mays
  VARIANT 3: note = Ancestral polymorphism is R, Derived polymorphism is W
MFRCVVRYGYKDLHKRDEDFEKVLFDCILFFVRLESMMEGYSDSDEFSVPEQTPGSGRAAFLGVGERTCATVCSNGDLSFSSQDLVVPAAVQSPRAPTGLPLLQCSASARQGTSGGTVGDELGMMPSRRRARSASTSSPSQEVVRRKRTSSRAATSKMSGLVWEHGENIGQGFRCKYRHEGKSGGSATRSKQHLAHRGKDVKNCPSVPPEIKKFFAGELDKTKEKKRQRIV

SEQ ID NO: 14523 - protein, 580 aa, Zea mays
  VARIANT 379: note = Ancestral polymorphism is T, Derived polymorphism is I
MDSEPDVELRGLDIDVELDPEDLQPSVPLKKVPGGDLFEAARAGDCDRLALLLDAGANVNARDRWDSVALYYACLAGHAEAARMLLEAGAVCAERTFDGDRCHYAALNLRLRWLLKSFEARPPPLAPLPTALRATFLACPANRTAFLEMLQGSAGAESAALAAAAGFGPKDDPSSACLFPPDITFYVDRKPVEAHRVILCARSPFFEKKFKTDWKDRKEVRFSNQKLYFGALYSLIHFFYSDRLEVAVDDMENLARACKVCKCEELQKVLDKEVVHQKYAEYKSARELDMDSSQKRFILQAQSLPEEDRLPSALQRILQTCLANSREGYCSEESNEMIRNSEDDDLADLYIKVGDKVFHCHQVILASRSEYFRARLSRTVDFLEGNCGFEAAQNVPLLEEHDISAEAFEKMLEYMYTDKLEHLDPGQAEELFDVASRYLLFPLKRVVADMLLPYLEHVSPAELCHWLMMSDIYGVMKIREYILDIIACNFEMFAATREFRALLLTLPPPSGDDSLRTTRPSAPGTGGNTDQGNILDDLREKWLEAEGAELDERDESAALFDKRLEMLMLVAEKEADDEDA

SEQ ID NO: 14524 - protein, 357 aa, Zea mays
  VARIANT 204: note = Ancestral polymorphism is G, Derived polymorphism is E
MSAMAAAGEAEYGECVQKGSLQQHQAPQPSPGALFYTHDGVAVYRNPVMPAFYQQPAGSNVVVPAAPGPAHSPASSEPFKRKRGRPRKYAPADGAVPLAIVPPSQPPTARAPATSEASPTVPPGFSPSPQSGGVVSRQASPAPAPASGAPDVKKRGRPSGPSSKKQQPQAAAPGPGWTGLKPHIFTVQAGEDVASRAMSFSGNGWAVCILTANGTVSNVTLRQGESSGGTVTYEGRFEILSLAGSYLLSESTGMSSRTGGLSVSLASPDGHVLGGAVAGPLTAASPVQVVIGSFLADTKMELDPGSAPEKHVFSRFQTTSSPSRGTESSGGHASPPNTTGSFSTSTQPGFPSFPTWK

SEQ ID NO: 14525 - protein, 148 aa, Zea mays
  VARIANT 105: note = Ancestral polymorphism is G, Derived polymorphism is E
MMLATHHSITHRLHSIPPPGSGHRRRLHSTARGAVRRDDATTESAGEGTSSSESLRVSKPTATTAPAGFSLPKDYRHTLFSSECLEVLGLVDLESLRKRPRLTIGVTVKASVVLPVLVVLAVLYLSDVTKGVVDWTHHHLENDDDVGD

SEQ ID NO: 14526 - protein, 260 aa, Zea mays
  VARIANT 168: note = Ancestral polymorphism is T, Derived polymorphism is K
MEVAVDREVGESGGSRGRRRWSGGRATANDEEVRIAERHPWNVSRRGSGEGDGALSQLPSEYVARIGGRAAFGARIRHAPRSGRCHQSRPPSKEGVVARKEGGIVDGVVARFRVGHNMVSGARAGARRSSGERARGRGLRRGVTGVAMVSPAPTLGVRGRGLRSRLYTVEETGACIWELERASWGGGYARGVAGAEEAGVGASIAGTEARASRGRAQRREGGGGGGRGTSIVVAEARARTGVAAAEAEPCAERMCGRLHY

SEQ ID NO: 14527 - protein, 236 aa, Zea mays
  VARIANT 9: note = Ancestral polymorphism is V, Derived polymorphism is L
  VARIANT 226..236: note = Derived polymorphism lacks residues 226 to 236
MQAPVSSTVYSRLRNPRPRTPRVGAGDTMATPVTPLRNPRPRARSPELRRAPALAPDTMLCPTLNLATTPSTMPPSFLATTPSLDGGRDWWHLPDLGACLILAPNAALPPIRATYSDGSWDNAPSPSPEPRRLTFQGCRSAILTSSSLAVARPPDHRLRPRDPPDSPTSLSTATSITHLLHADKKARPPLSPRPPTTRLLNKDLSKHPVDGFSAGLVDDSNVFEWQVTIIRPPDTL

SEQ ID NO: 14528 - protein, 127 aa, Zea mays
  VARIANT 10: note = Ancestral polymorphism is A, Derived polymorphism is V
MGATLLQAVASLLTRLQRAARRMAAGTAGGGGGKGSPRAQAAVAQWKKTFSSLAPASGTTTNKEAAEPGVWTKEILMGERCQPLDFSGVIYYDAEGRRLAQPPPPRSPMRSPLPASHGLAAAHARAY

SEQ ID NO: 14529 - protein, 211 aa, Zea mays
  VARIANT 18: note = Ancestral polymorphism is A, Derived polymorphism is S
  VARIANT 33: note = Ancestral polymorphism is M, Derived polymorphism is T
  VARIANT 52: note = Ancestral polymorphism is A, Derived polymorphism is T
  VARIANT 72: note = Ancestral polymorphism is P, Derived polymorphism is Q
  VARIANT 90: note = Ancestral polymorphism is L, Derived polymorphism is P
  VARIANT 92: note = Ancestral polymorphism is P, Derived polymorphism is S
  VARIANT 96: note = Ancestral polymorphism is P, Derived polymorphism is S
  VARIANT 174: note = Ancestral polymorphism is S, Derived polymorphism is P
MAAKMFALFALLALCATATSATHIPGHLSPLLMPLATMNPWMQYCMKQQGVANLLAWPTLMLQQLLASPLQPCQMPMMMPGMMPPMTMMPMPNMMPSMMVPTMMSPITIASMMPPMMMPNMVSPMMMPSMMPSTMTPSMMPPIMMPSMIPPMMMPSMVSSMIMPNMMTVPQCYSDSISHIIQQQQLPFMFSPTAVAISPMFLQQPFVGAAF

SEQ ID NO: 14530 - protein, 196 aa, Zea mays
  VARIANT 20: note = Ancestral polymorphism is L, Derived polymorphism is M
  VARIANT 34: note = Ancestral polymorphism is S, Derived polymorphism is L
  VARIANT 58: note = Ancestral polymorphism is T, Derived polymorphism is I
  VARIANT 63: note = Ancestral polymorphism is R, Derived polymorphism is Q
  VARIANT 86..196: note = Derived polymorphism lacks residues 86 to 196
  VARIANT 98: note = Ancestral polymorphism is Y, Derived polymorphism is F
  VARIANT 103..196: note = Derived polymorphism lacks residues 103 to 196
  VARIANT 106: note = Ancestral polymorphism is H, Derived polymorphism is Q
MVHHGFYSAYDNTTLLYEILKSIKWARKHMEIYSWLASLISLHFLHVKFGSRDVELMTFGQPRIGNPAFVVCLGEQVPRTIHVTHQNDIVPQLPLYYYYLSEWTYHHFARELVHISLSILDIYFLCVFHIICVFLKKWVYGMSVADHLEYYSVTLHADSRGTCQFVIGTANQVYNNIREVDGSIILLRYICKNHKL

SEQ ID NO: 14531 - protein, 198 aa, Zea mays
  VARIANT 47: note = Ancestral polymorphism is V, Derived polymorphism is A
  VARIANT 175: note = Ancestral polymorphism is D, Derived polymorphism is G
MPLIVLPLSYRRLAYKAAMAAHVDPLVVGRVIGDVVDLFVPTVAVSARFGAKDLTNGCEIKPSVAAAAPAVLIAGRANDLFTLVMTDPDAPSPSEPTMRELLHWLVVNIPGGADASQGGETVVPYVGPRPPVGIHRYVLVVYQQKARVTAPPSLAPATEATRARFSNRAFADRHDLGLPVAAMFFNAQKETASRRRHY

SEQ ID NO: 14532 - protein, 81 aa, Zea mays
  VARIANT 34: note = Ancestral polymorphism is Y, Derived polymorphism is N
  VARIANT 6: note = Ancestral polymorphism is P, Derived polymorphism is S
MQWILPENMGYILSHPETKDRVQSWSDASDVLRYAFTLTEDTTDHQYEEVLKATRQQHERELSLEDLNSIHDLPACNLLYK

SEQ ID NO: 14533 - protein, 212 aa, Zea mays
  VARIANT 44..212: note = Derived polymorphism lacks residues 44 to 212
  VARIANT 120: note = Ancestral polymorphism is C, Derived polymorphism is Y
  VARIANT 135..212: note = Derived polymorphism lacks residues 135 to 212
  VARIANT 138: note = Ancestral polymorphism is D, Derived polymorphism is Y
MMSMFKEIEKKVFVVQEEYKKTQEMIDNHKVELDKTKEEYTKLKKAMDELRATEVDAEYKLQDTKKLAKEWEMKVKTFKKRLDEIHIMLLNTWISIIQKDAVDPEKLKATPGDEQLNDTYDMKRAMEMVALLEAQIKDLNPNLDSIAEYRTKACLYGERVDELNATTQERDDLKKLYDGLRKRRLDEFMAGFNIISLKLKEMYQVLNTYNIL

SEQ ID NO: 14534 - protein, 268 aa, Zea mays
  VARIANT 51: note = Ancestral polymorphism is E, Derived polymorphism is K
  VARIANT 65: note = Ancestral polymorphism is D, Derived polymorphism is N
  VARIANT 82: note = Ancestral polymorphism is P, Derived polymorphism is L
  VARIANT 127: note = Ancestral polymorphism is W, Derived polymorphism is R
  VARIANT 196..268: note = Derived polymorphism lacks residues 196 to 268
MGREAQRGRRRAGRPVEAAWMSGAQRGVVWAKGISWGKEHDVCGAPLIGNEIMMVELKDVYDSLDIHVVHCLSVLVDADQALGDYYMVASTRFIHDVGAASIVIRYAGSSSAPPTPNMTESPAGWAWSINQASPQGSYHYGQINITRTIKVMVSRGHIDGKLRYIFNDISHRDTETPPSSPSTSTSLTGCSATTRWATCPSPSTGHSMSSPKSSSPSCIYLIISATWSAWRKRSPLFTNYVDFLTKFPSLQIHRKYGTNGNTDKILMP

SEQ ID NO: 14535 - protein, 318 aa, Zea mays
  VARIANT 287: note = Ancestral polymorphism is Q, Derived polymorphism is H
  VARIANT 147: note = Ancestral polymorphism is P, Derived polymorphism is S
  VARIANT 139: note = Ancestral polymorphism is D, Derived polymorphism is Y
  VARIANT 126: note = Ancestral polymorphism is P, Derived polymorphism is L
  VARIANT 117..318: note = Derived polymorphism lacks residues 117 to 318
  VARIANT 82: note = Ancestral polymorphism is L, Derived polymorphism is M
  VARIANT 43: note = Ancestral polymorphism is C, Derived polymorphism is R
  VARIANT 22: note = Ancestral polymorphism is A, Derived polymorphism is V
  VARIANT 12: note = Ancestral polymorphism is L, Derived polymorphism is M
MAASAREARSGLEWRVAVPEGASVTMEHEVGPCMRVWAWLVARFAKAWSNVVGVARKVWRIGAEVDVVRGTLVLQMNDAMHLEKFSHNLKMDLPVNASATDKSKPQKLEYLLILDLEGRVEILEFPVMMIDAQNREFVDSFHRFVRPTAMSEQRTTEYIEGKYGKFGVDRVWHDTATPFKQVLQEFEDWLGNHNLWKKEQGGSLNRGAFVTCGNWDLKTKVPEQCKVSKINLPTYFMEWINLKDIYLNFYNRRATGMMTMMRELQLPIVGNHHLGIDDSKNIARVVQRMLADGAVIQITAKRQSATGDVRFLFKDRIR

SEQ ID NO: 14536 - protein, 308 aa, Zea mays
  VARIANT 252: note = Ancestral polymorphism is G, Derived polymorphism is E
MAVSAPVTLCPSDSRSLSSALVSSRSNKPSSLDAVRSRRLNLGDSAMPTQISTRQSLRFALPSNNARPISTAARMTCFAKKQHIAAVPLCTLEAKRYEPIVKMCGITSAFDAEMALKAGAKLIGMILWPKSKRSIPLSEAKEISRVAKSYGAESVGVFVDDDSSTILTASDSCNLDLIQLHGDSSRELLPLLWKNNRIIYVLNADEDGKLINAPPSEEYVLDWFLVDSAKGGSGKGFNWEKFQMPTVKSKNGWLLAGGLHADNVHEAASALKPNGLDVSSGICFPDGLRKDPKRMCSFMSSVKTLNLL

SEQ ID NO: 14537 - protein, 120 aa, Zea mays
  VARIANT 66: note = Ancestral polymorphism is P, Derived polymorphism is L
MDNGYMATVRNLKNPVNKWRCGVTPISYYYFIRLMGHKASHVALECALQSHPNMLIFCESFHGSTPLVPWPADDASGSFHSTNATESKVFYLKMKGDYHRYTVIDSRSRPCKLWFVEIKT

SEQ ID NO: 14538 - protein, 305 aa, Zea mays
  VARIANT 276: note = Ancestral polymorphism is R, Derived polymorphism is W
  VARIANT 242: note = Ancestral polymorphism is R, Derived polymorphism is C
  VARIANT 162: note = Ancestral polymorphism is T, Derived polymorphism is M
  VARIANT 157: note = Ancestral polymorphism is G, Derived polymorphism is S
  VARIANT 122: note = Ancestral polymorphism is R, Derived polymorphism is C
  VARIANT 120..305: note = Derived polymorphism lacks residues 120 to 305
MPLISCRGWKACHRYRDELERYINYTVGGECPSDKASAQRLMLKGCEPLPRRRCRPRTPAEYVEPTPLPASLWAVPPDTSIMWDAYTCKSYGCLARHGKAKGSYDCKDCFDLGGREKDRWVRHDKEKGDECNSLNYSIDDVLGSLPRGSVRIGLDIGGGSGTFAARMRERGVTVVTTSMNFDGPFNSFIVSRGLVPMHLSVASRLPFFDGTLDVVHSMHVLSSWIPDGMLESALFDVNRVLRPGGVFWLDHFFCLGTQLDATYLPMFDRIDFKKLRWNADRKLDRGIHMDECKIYIFSFDQKYVA

SEQ ID NO: 14539 - protein, 76 aa, Zea mays
  VARIANT 49: note = Ancestral polymorphism is Q, Derived polymorphism is R
  VARIANT 50: note = Ancestral polymorphism is L, Derived polymorphism is R
  VARIANT 55: note = Ancestral polymorphism is G, Derived polymorphism is D
  VARIANT 56: note = Ancestral polymorphism is R, Derived polymorphism is H
  VARIANT 57: note = Ancestral polymorphism is V, Derived polymorphism is I
  VARIANT 73..76: note = Derived polymorphism lacks residues 73 to 76
MSRSVAVQLQSTRRLHLDRVPHPSPPWVLTGGCDAFRTAHEVAEVLRVQLAEVDGRVVALEAELDILRHRSSQLLD

SEQ ID NO: 14540 - protein, 492 aa, Zea mays
  VARIANT 250..492: note = Derived polymorphism lacks residues 250 to 492
MADGPVTATSSMAVPSARRNRALLPTVSVAREPARAWAAAGAEGRARRGKEAEVEDEKEAGRRRKEEVNRKIASRKALSVILRREATKAVLDKRKPGKGTRRLLPGTVLEALHDRVAALRWDSALKVFELMRDQVWYKPHIGIYIKLITMLGKCKQPEKAHQLFQAMIDEGCAPNLQSYTALVSTYSRSGRFREAFDLLDRMKDTPGCQPDVQTYSILIKSCLHAYDFEKVKSLLADMARAGIPPNTVTYNTLIDAYGKAGRFAEMESTLLKMLSQNCKPDVWTMNSTLRAFGSSGQIETMESCYEKFQASGIVPNIKTYNILLDSYGKAKMYEKMGAVMEYMQKYYYSWTIVTYNVVIDAFGRAGDLEQMEYIFRLMKSERIKPNCVTLCSVVRAYGRAGEVKKIKTALRIIENSDITLDIVFFNCLVDAYGRVGCLAEMWDILDLMKEHRCKPDKVTCTTMIKWFLIKGIDDHRVQYLRDLKDGRAKDDT

SEQ ID NO: 14541 - protein, 232 aa, Zea mays
  VARIANT 25: note = Ancestral polymorphism is T, Derived polymorphism is I
  VARIANT 69: note = Ancestral polymorphism is E, Derived polymorphism is K
MKYMMDQQCYLPENSHFVGTTSHFTTTNQKNESPNNIESDDANKDVRRIYTSGYSDEMWLEKAHMLYAKANKGSHFSLMDVWKMVRNQTKWSAYNDQNHTKRKDMEKGDTTEDVDLPRPMGQKKAKHIVHEGNGKSKESAINLEGLDIFEKIQNEVHVNRLKALEIAGKINIDKMETTKIALERAKEEKEAKLIETYSSLLKQDTSVMPDDVRIEHVTALRCLRKKLFPELP

SEQ ID NO: 14542 - protein, 62 aa, Zea mays; identical to SEQ ID NO: 13237
  VARIANT 31: note = Ancestral polymorphism is R, Derived polymorphism is S
  VARIANT 37: note = Ancestral polymorphism is R, Derived polymorphism is S

SEQ ID NO: 14543 - protein, 843 aa, Zea mays
  VARIANT 249: note = Ancestral polymorphism is A, Derived polymorphism is S
  VARIANT 195: note = Ancestral polymorphism is V, Derived polymorphism is I
MSVMARRLSSSCSRAVASSCPSKSSLRRRIYTLPSRPLLLAFSLRASPLCPAPPLPPPTPPRCSFRTLAAAKESSPPSTSVSPTQQQSRSTIEGGEMTVASSVRLAGGNLTVCGRTVLSGVPDAVVATSAATEGAVDGIFLGADFAEPAARHVVSLGDLRDVRFMACFRFKLWWMAQRMGEKGSDVPRETQFLLVESRGVGDEDAAYVVFLPLVEGAFRASIQGGAGDALELCVESGDDDTRAASFERSLFVGAAESDPFAAISGAVAAAKSALRTFRVRAEKKLPGIVDYFGWCTWDAFYQDVTQEGVEAGLRSLIAGGAPPKFVIIDDGWQSVATDTNESAGEDKPPLLSRLTGIKENSKFQNADDPAAGIKTVVRLAKEEYRLKYVYVWHAITGYWGGVRPGEEHYRSSMQFPKVSPGVMENEPGMKTDVLTVQGLGLVHPRAVYRFYDELHAYLAAAGVDGVKVDVQCILETLGAGHGGRVQLTRQYHQALDASVAKNFPENGIIACMSHNTDALYCSKQTAVVRASDDFYPRDPASHTIHIASVAYNSVFLGEFMLPDWDMFHSLHQAGDYHGSARAISGGPVYVSDAPGKHNFELLKKIVLPDGSILRARLPGRPTKDCLFTDPARDGVSLLKIWNMNKFTGVLGVYNCQGAAWNSVEKKNTFHQTGTEALTCGVKGGDVHLISEAATDTEWDGDCAMYRHADGDLVVLPHDAALPVSLKVLEHDILTVSPIKELAPGFRFAPIGLVDMFNSGGAVEGLTYHLLGGDGSTLGSEAVALACMEVKGCGRFGAYSSVRPRKSTLGSAQIELKYDSSSGLLILQLDAMPKERVHKIVIEL

SEQ ID NO: 14544 - protein, 254 aa, Zea mays
  VARIANT 216: note = Ancestral polymorphism is T, Derived polymorphism is I
  VARIANT 212: note = Ancestral polymorphism is R, Derived polymorphism is W
  VARIANT 205..254: note = Derived polymorphism lacks residues 205 to 254
  VARIANT 186: note = Ancestral polymorphism is G, Derived polymorphism is V
  VARIANT 172: note = Ancestral polymorphism is R, Derived polymorphism is C
  VARIANT 170..254: note = Derived polymorphism lacks residues 170 to 254
  VARIANT 154: note = Ancestral polymorphism is G, Derived polymorphism is R
  VARIANT 143: note = Ancestral polymorphism is F, Derived polymorphism is S
  VARIANT 94: note = Ancestral polymorphism is R, Derived polymorphism is W
  VARIANT 86: note = Ancestral polymorphism is G, Derived polymorphism is R
  VARIANT 77: note = Ancestral polymorphism is P, Derived polymorphism is L
  VARIANT 57: note = Ancestral polymorphism is K, Derived polymorphism is R
MAILYALVARGTVVLAEHSAAATNAGAIARQVLERLPDGGADSHVSYTQDRYVFHAKRTDGITALCMADDAAGRRIPFAFLEDIHGRFVKTYGRAALTALAYAMNDEFSRVLSQQMDYYSNDPSADRINRMRGEINQVMHPFFKNSIDLAHWSGRVSQYKRIYLFIIFSQVRSVMIDNIDKVLERGDRLELLVDKTANMQGNTVRFKRQARRFRNTVWWRNVKLTAALILLLLVIIYVVLVFVCHGFTLPTCIR

SEQ ID NO: 14545 - protein, 152 aa, Zea mays
  VARIANT 64: note = Ancestral polymorphism is R, Derived polymorphism is G
  VARIANT 16..152: note = Derived polymorphism lacks residues 16 to 152
  VARIANT 8: note = Ancestral polymorphism is A, Derived polymorphism is V
  VARIANT 6: note = Ancestral polymorphism is A, Derived polymorphism is V
MAPKAAPAKKGDAKAQALKVAKAVKSGAGKKKTKKIRTSVTFHQPKTLKKARDPKYPRISTTGRNKLDQYQILKYPLTTESAMKKIEDNNTLVFIVDLKADKKKIKAAVKKMYDIQAKKVNTLIRPDGKKKAYVKLTPDYDALDVANKIGII

SEQ ID NO: 14546 - protein, 230 aa, Zea mays
  VARIANT 52: note = Ancestral polymorphism is S, Derived polymorphism is L
  VARIANT 77: note = Ancestral polymorphism is K, Derived polymorphism is N
  VARIANT 99: note = Ancestral polymorphism is A, Derived polymorphism is V
  VARIANT 107: note = Ancestral polymorphism is A, Derived polymorphism is V
  VARIANT 117: note = Ancestral polymorphism is A, Derived polymorphism is T
  VARIANT 175..230: note = Derived polymorphism lacks residues 175 to 230
  VARIANT 183: note = Ancestral polymorphism is P, Derived polymorphism is L
  VARIANT 216: note = Ancestral polymorphism is P, Derived polymorphism is L
MRPNDWCGPLSPSCEPLQQLLTEPVWCREILDARSPQRPSFPHREYDPVPPSLSFPPPGDMVMRTFTFGPGHVAAIKKSISAQRGSGGGKATTFKTLAAFVWRARTVALEIPADEDARLVIAASVRGVRDLGLPTGYYRIDPQLSDLELGLLGRELGLQERDDGDSLLEYLLLQQLHAEARLPLLELLDGAQQLCDLQRRAGGGAHLCRRARERMLHHPLPPCKPTYVSS

SEQ ID NO: 14547 - protein, 222 aa, Zea mays
  VARIANT 192..222: note = Derived polymorphism lacks residues 192 to 222
  VARIANT 191..222: note = Derived polymorphism lacks residues 191 to 222
  VARIANT 144: note = Ancestral polymorphism is G, Derived polymorphism is R
  VARIANT 101: note = Ancestral polymorphism is R, Derived polymorphism is S
  VARIANT 100..222: note = Derived polymorphism lacks residues 100 to 222
  VARIANT 85: note = Ancestral polymorphism is V, Derived polymorphism is I
  VARIANT 82: note = Ancestral polymorphism is E, Derived polymorphism is K
  VARIANT 76: note = Ancestral polymorphism is A, Derived polymorphism is V
  VARIANT 75: note = Ancestral polymorphism is A, Derived polymorphism is V
  VARIANT 72: note = Ancestral polymorphism is R, Derived polymorphism is W
  VARIANT 65: note = Ancestral polymorphism is P, Derived polymorphism is L
  VARIANT 53..222: note = Derived polymorphism lacks residues 53 to 222
  VARIANT 52: note = Ancestral polymorphism is A, Derived polymorphism is T
  VARIANT 51: note = Ancestral polymorphism is A, Derived polymorphism is V
  VARIANT 49: note = Ancestral polymorphism is G, Derived polymorphism is R
  VARIANT 40: note = Ancestral polymorphism is L, Derived polymorphism is F
MCRATAIEGGFLRPPPSRRLDVRAFYLRLSSCSATTPAELTLAYHPAIGGAAQGLNGRALPPAAPAKVTLRRVAAAEGARFKVLVAAGEEVAAEGVFSAQREGVWHVECRGALASPKVCVAEVVVLAEGGVLMQDRARAAEPPGWRGYRRRTPPRASASGSAASATTTGGKWSGTRRRRSRRSRWRRCGGRWRWAVCLGVGLFATAACFLYVGVGPLGHHAR

SEQ ID NO: 14548 - protein, 543 aa, Zea mays
  VARIANT 26: note = Ancestral polymorphism is G, Derived polymorphism is D
MAAAGTQLGRLLVGGLWLLAALLQRGAAAAVAAVDGRRAIAATGENFVCATLDWWPPDKCDYGTCPWGRAGLLNLDLSNKVLLNAVRAFSPPLMLRLGGSLQDKVVYGTADLGRPCAPFAKNASEMHGFTQGCLTLRRWDELNAFFQKSGARIVFGINALNGRVPLPDGSMGGPWDYTNAASLIRYTANKGYRIHGWELGNELSGTGVGARVGAEQYGADVIALKTLVDDIYASHPSKPLVLAPGGFFDQAWFAQLIVRTRPNLLDVITHHIYNLGPGRDTHLIDKILNPSVLDGMRSTFSSLQGLLKSAGTSTVAWVGEAGGAYNSGRHLVTDAFVFSFWFLDQLGMSAKYDTKSYCRQSLIGGNYGLLNTTTFQPNPDYYSALLWHRLMGTKVLATTFSGTNKIRAYAHCARDSPGITLLLINLSGNTTTQVSVSVTTQGAVAAHKHGARKHVGGRKFRHVHVPSFDEAAGGVRDEYHLTPKDGNLRSQIMLLNGRALATDTAGNIPALEAVKMDAAQPIAVAPYSIVFARISHFNAPACS

SEQ ID NO: 14549 - protein, 133 aa, Zea mays
  VARIANT 34..133: note = Derived polymorphism lacks residues 34 to 133
  VARIANT 68: note = Ancestral polymorphism is M, Derived polymorphism is I
MGGCAGKVRRDDEEKLDFKGGNVHIITSNEGWDQKIAEANRDGKTVVANFSASWCGPCRVIAPVYAEMSKTYPQLMFLTIDVDDLMDFSSSWDIRATPTFFFLKNGQQIDKLVGANKPELEKKVLAAADASTS

SEQ ID NO: 14550 - protein, 355 aa, Zea mays
  VARIANT 288: note = Ancestral polymorphism is S, Derived polymorphism is F
  VARIANT 290: note = Ancestral polymorphism is G, Derived polymorphism is R
  VARIANT 328: note = Ancestral polymorphism is K, Derived polymorphism is R
  VARIANT 330: note = Ancestral polymorphism is L, Derived polymorphism is P
MGKRQNENIALAWATKFTTRDSIFDKNFSLLGTGDSKDSGHIVNDSNSDNIEKVCHLCFGLLDRVFERIQVLTVDPSQSNSEYLYYPAQHIQNIVDSVLRHPVITLSLSCSLSNCQNLAYGSLEHLEEALAIFATENLHLIDRFVLNLLALSETDLEIFHLMNEIESPVFQTITEVDHLWGASALKFREELKLDFSKSDTHNTENAEITEKRRALFRENIPVDSKLCAKTSLLYCYKRSTRASVFSLEQLQRDNFADSFESIPLFPTLLQSSSVHFKAERLWMLRLLSAGSNLADDAKIYKRGRVLELALAFCSSPVSDFESKVLVLKVLENCVKLPVLAHHLEIGIIDCCCKQQ

SEQ ID NO: 14551 - protein, 220 aa, Zea mays
  VARIANT 24: note = Ancestral polymorphism is A, Derived polymorphism is V
  VARIANT 100: note = Ancestral polymorphism is E, Derived polymorphism is D
  VARIANT 105: note = Ancestral polymorphism is D, Derived polymorphism is G
  VARIANT 110: note = Ancestral polymorphism is R, Derived polymorphism is Q
  VARIANT 111: note = Ancestral polymorphism is G, Derived polymorphism is D
  VARIANT 120: note = Ancestral polymorphism is S, Derived polymorphism is Y
  VARIANT 122: note = Ancestral polymorphism is G, Derived polymorphism is A
  VARIANT 126..220: note = Derived polymorphism lacks residues 126 to 220
  VARIANT 137: note = Ancestral polymorphism is D, Derived polymorphism is A
  VARIANT 141: note = Ancestral polymorphism is R, Derived polymorphism is H
  VARIANT 197: note = Ancestral polymorphism is A, Derived polymorphism is V
MFSDLTEYCILFVYSAKLVDQALASGKIYDGDGFNYIKESFENGTLHLIRLLSDGGVHSRLDQLQLLLKGVSERGAKKFVCTSLPMGVTFLDGSNVGFVETLENDLLELRGKGIDAQIASGGGRMYVTMDRYENDWDVVKRGWDAQVLGEAPYKFKSALEAVKTLRAQPKANDQYLPPFVIVDDIGKAVGPVLDGDAVVTINFWADRMVMLAKALTVCRF

SEQ ID NO: 14552 - protein, 83 aa, Zea mays
  VARIANT 63..83: note = Derived polymorphism lacks residues 63 to 83
  VARIANT 38: note = Ancestral polymorphism is A, Derived polymorphism is E
MESTVNPKAYPLADAQLTMGILDIIQHSTNYKQLKKGANEATITLNRGISEFVVMAADTEPLEILLHLPLLAEDKGTLQLAAE

SEQ ID NO: 14553 - protein, 154 aa, Zea mays
  VARIANT 17: note = Ancestral polymorphism is M, Derived polymorphism is I
  VARIANT 57: note = Ancestral polymorphism is K, Derived polymorphism is E
  VARIANT 107: note = Ancestral polymorphism is L, Derived polymorphism is H
MVITAFGRLGTMFGCDMYNIKPDLVSIAKALSSAYMPIGAILVSPEITDVIYSQSNKLGKSNPIMIRGLGLILGTEFVDNKSPNDPFPAEWGVGSIFGTECEKRGMLIRVAGDSIMLSPPLIMTPNEVEEIISKFGDALKATEERIGELKSRKN

SEQ ID NO: 14554 - protein, 227 aa, Zea mays
  VARIANT 93: note = Ancestral polymorphism is I, Derived polymorphism is T
  VARIANT 90: note = Ancestral polymorphism is T, Derived polymorphism is I
MAARRSTSPARHGVLPALLLILCSSLPSLAAAYRPGDIVPMLRSGQYHGSRSVWFDVVGRHCPAFAVNREVLMPIPKPTGFTGADPYKITFQIGHEKFHVPWLYVINRKTSEVPLIDFHLKYSGNDILGVTAKVVDMPHHYVEVHPDIKKNFWDPQNWPKYVLVRYTWEEQSEIDVTGGFYVLFGSGLVLSFILAIYVLQSSQEKLTRFVREAVADSSLPDGVAKVE

SEQ ID NO: 14555 - protein, 198 aa, Zea mays
  VARIANT 155: note = Ancestral polymorphism is G, Derived polymorphism is S
  VARIANT 106..198: note = Ancestral polymorphism lacks residues 106 to 198
  VARIANT 96..198: note = Derived polymorphism lacks residues 96 to 198
  VARIANT 49: note = Ancestral polymorphism is S, Derived polymorphism is G
  VARIANT 46..198: note = Derived polymorphism lacks residues 46 to 198
  VARIANT 32..198: note = Derived polymorphism lacks residues 32 to 198
MTHYEAIATQKTRNISSPSKFEHMDWERWIHWSRHRWTGRYEAHLWDNSCRKDGQTRKGKQGFAMTECDWLHAPHSISRSVNKKGYLFYLVIRWLRHRRQDNEGLRSGCSKILGPATHVNFPVENYRDELEEMKGMTRQEFVAHLRRRSSGFSRGASIYRGVTRHHQQGRWQSRIGRVAGNKDLYLDTFSKKDRSIWL

SEQ ID NO: 14556 - protein, 402 aa, Zea mays
  VARIANT 297: note = Ancestral polymorphism is I, Derived polymorphism is T
MECAAEGGGGRRPRASGAGRDAGVACRGEIWRRQARGGGDGMGEKWENPITAPRLHCYPSLPLCFPLPMESCSFRAATAPSPFPSAPSSSSSPRAPCPILRFPRPRKGRQIGVRRRASGFDAFASFAGKVFVDEAIGAEYGEGFETFRMDGPLKVDVDYLNEKLQECFLQRIRHAMKPDEAFGLIFSWDNVIADTDSLKLNAWRQLALEEGKDIPSGAHVRKSIIHGAADHVLRKVLYWAKEEDKMEKLKARLIELYYENLFKLDTPVEGLREWLDAVQTAGIPCAVASPLDRRCMIEALDRMALSKYFKLDRKPSKCVVFEDDPRGVTAAHNCTMMAVALIGAHPAYELVQADLAIAKYSELSVINLRRLFANKGISFMDLQKQIIEKSPPKRRLTVDTIF

SEQ ID NO: 14557 - protein, 212 aa, Zea mays
  VARIANT 102: note = Ancestral polymorphism is L, Derived polymorphism is V
MAKMVLLCVLVSFLLMPLASLALTQDFCVADLTCSDTPAGYPCKSSVTANDFYFHGLAGQGKINPLIKAAVTPAFVGQFPGVNGLGISAARLDIEVGGVVPLHTHPAGSELLFVTQGTVAAGFISSGSNTVYTKTLYAGDIMVFPQGLLHYQYNAGTGAAVGLVAFSSPNPGLQITDFALFANNLPSAVVEKVTFLDDAQVKKLKSVLGGSG

SEQ ID NO: 14558 - protein, 148 aa, Zea mays
  VARIANT 123: note = Ancestral polymorphism is R, Derived polymorphism is C
  VARIANT 85: note = Ancestral polymorphism is A, Derived polymorphism is T
  VARIANT 79: note = Ancestral polymorphism is L, Derived polymorphism is I
  VARIANT 78: note = Ancestral polymorphism is L, Derived polymorphism is P
  VARIANT 74: note = Ancestral polymorphism is R, Derived polymorphism is W
  VARIANT 72: note = Ancestral polymorphism is G, Derived polymorphism is E
  VARIANT 61: note = Ancestral polymorphism is R, Derived polymorphism is H
  VARIANT 43: note = Ancestral polymorphism is G, Derived polymorphism is R
  VARIANT 42: note = Ancestral polymorphism is A, Derived polymorphism is T
  VARIANT 41: note = Ancestral polymorphism is A, Derived polymorphism is T
  VARIANT 37: note = Ancestral polymorphism is A, Derived polymorphism is T
  VARIANT 19: note = Ancestral polymorphism is T, Derived polymorphism is M
  VARIANT 1: note = Ancestral polymorphism is M, Derived polymorphism is I
MPATASGGARPEEVLPAPTVSASASSCMGTRAKELTARLAAAGPSPGAGAGGEEVEHERVRALREIKNQIIGNRTKKLLYLRLGAVPSVVSALADPGASPAALVQATAAAGIFACGVEDCARRAGRRRCGAPHSAPRSPRREGSGDAI

SEQ ID NO: 14559 - protein, 440 aa, Zea mays
  VARIANT 316..440: note = Derived polymorphism lacks residues 316 to 440
MGSLGGSAGAGDGGKVGLPALDVTLAFPQATPASLFPPAVSDYYQFDDLLTDEEKALRKKVRGIMEKEIAPIMTEYWEKAEFPFHAIPSLASLGLAGGTIKGYGCPGLSLTASAISIAEVARVDASCSTFILVHSSLAMSTIVALCGSEAQKQKYLPSLTQFKTIGCWVSSLSNALTEPDYGSDASSLRTAATKVPGGWHLDGQKRWIGNSTFADVLIILARNADTNQLNGFIVKKGAPGLKATKIENKIGLRMVQNGDIILNKVFVPEEDRLTGINSFQDINKVLAMSRIMVAWQPIGISMGVYDICHRYLKERKQFGAPLAAFQLNQEKLVRMLGNIQAMLLVGWRLCKLYESGKMTPGRSSLGKAWTSKKAREVVSLGRELLGGNGILVDFLVAKAFCDVEPIFSYEGTYDINSLVAGREITGIASFKPAVSAKSRL

SEQ ID NO: 14560 - protein, 272 aa, Zea mays
  VARIANT 209: note = Ancestral polymorphism is A, Derived polymorphism is T
MASTASQPFQEGKQHLHLNHGGRALHSAYGGTAAWPASSVTPPLTRLETPASSSKSTAEARQALKIHSAAEKRRRERINAHLATLRRMIPDASQMDKATLLARVVCQLKDLKKKSAETTQPPLATIPGETNEIAVVCCTGTASTAYERAAATYIRASVSCDDRPGLHADLAGALRAMRLRPLRADMAALGGRAQCDFVLCREDGAGCRTLKALEEGVRQALAKAAFPETPPYGCNAARSRRQRLAGSHCVLHGHGHGHGHGHGLHVIGEHGW

SEQ ID NO: 14561 - protein, 363 aa, Zea mays
  VARIANT 287: note = Ancestral polymorphism is S, Derived polymorphism is L
MDGPRWTEEVDDLVDAGDVDGAIALLESVVSDLSTSAAPPATDLRLATALGDLAGLHASRGDTLRADELRARAIALRSRATVPGTGTLGDQELSEKCPSQECATGSKDSEVSANTNKSNEDEEDDWEAIADSGALDDTLVRSLEQGARVSSCSSPEKSSTPSSGPKRRGRGSFLYNKSVLYSDQCGSERELDNKQSKPQVGSKDHVNEPENNAVTAATQFGTRHVLVFYDFPPSTRTTDLERIFEKFGDHGVAIRWINDTSALAVFRTPSAANEAQACIPPRYKVRSLKPDDDLLTKIDGRDLDPPKPRPKTSARTAQRLIAHGMGLKQFTNFGSDELKKQEGERKDRIAARQAMRDEAWGSD

SEQ ID NO: 14562 - protein, 392 aa, Zea mays
  VARIANT 96..392: note = Derived polymorphism lacks residues 96 to 392
  VARIANT 103..392: note = Derived polymorphism lacks residues 103 to 392
  VARIANT 124..392: note = Derived polymorphism lacks residues 124 to 392
  VARIANT 131: note = Ancestral polymorphism is R, Derived polymorphism is C
  VARIANT 133: note = Ancestral polymorphism is W, Derived polymorphism is C
  VARIANT 135: note = Ancestral polymorphism is G, Derived polymorphism is D
  VARIANT 257..392: note = Derived polymorphism lacks residues 257 to 392
MDLAHQRISSFPRRAPSSIFSPGQPAIVPHRAPRHHTTSLSPNKEETRKKKTSRGGGARGIAGAGGAATGEGGARGGCPSVTTFFRGCWIAFSGNQEREANKEMVVYLVDASPKMFTPTTTQIREPNKRTRLWLGSFATAEEAALAYDEAARRLYGPDAFLNLPHLRASAVSSTAAHQRLRWLAASARGAAAVPAYDLLNLNAQHNIYNLLAHVPLMDFQKESTFDMWSTVGLSSKGENDSFKVLALIHQNVIPSMSNPSILCDFLTRSYDIGGVISVMALSGLFILMTQHGLEYRKFYEKLYALLTPVVFMAKHRSVFLQDKQLKSHPPKNVESEILCEHIKKEREAAKAGKRPYYLKKSELRERKLMNKYNELKEELMKVEEQSVELEMD

SEQ ID NO: 14563 - protein, 773 aa, Zea mays
  VARIANT 281..773: note = Derived polymorphism lacks residues 281 to 773
  VARIANT 333..773: note = Derived polymorphism lacks residues 333 to 773
MGTSGSKGIDGVGAVSGVGAGAAGLGGVGAGGDGGEGAAAEAWHGGAQLYVSLKMENALISGDLVPHVYGSEPIIGTWDPSRALAMERELASMWVLSFVVPPDHETLDFKFLLKPKDAETPCIIEEGPTRLLTGGMLEGDVRVALFKLNGDDEVLEFGVVNKADLVSPLELAASWRVYKENFQPSKVRGIPDISINVTPTNGAEEGSAATLELDLEHYVVPSPPTAPPNGYAANLAATPASVIQTEALLTNDILLSDGIQSPSSVSAKLEDCTNHKNIEAWATDSSKKIQNSGLIESKSVGTFTPMQKLDGQKGLFVDRGVGSSMLPKSASACSLASGFSFGSAKTMPEAAGAVAAAAVADRLHGSKEDRKLAIVLVGLPARGKTFTAVKLTRYLRWLGHETRHFNVGKYRRLKLGANQSADFFRDDNPEGIEARNEVAALAMEDMIDWMNGGGQVGIFDATNSTRKRRYMLMKMAEGNCKIIFLETICNDPNIIERNIRLKIQQSPDYAEQLDYEAGLEDFKERLINYEKVYEPVGEGSYIKMIDMVKGQDGQLQVNNISGYLPGRIVFFLVNSHLTPRPILLTRHGESLHNVRGRVGGDTVLSETGELYAKKLANFIEKRLKCEKTATIWTSTLQRTILTASPIVGFPKIQWRALDEINSGVCDGMTYEEIKKIMPEEFESRKKDKLRYRYPRGESYLDVIQRLEPVIIELERQRAPVVVISHQAVLRALYAYFADRPLREVPEIEMPLHTIIEIQMGVTGVEEKRYKLMD

SEQ ID NO: 14564 - protein, 182 aa, Zea mays
  VARIANT 107: note = Ancestral polymorphism is A, Derived polymorphism is T
MSLARYDANVLLAAVTALSAAVAFVAALHLYARCLLQRRVALAEGSPRVVALQRQRPPDGYVVEVVRIVEDASVCGQQAAGLDAKALRALPVFTLESEQAKEEGGVAAELHGQCVVCLGEMEDGELGRLLPGCRHVFHVECIDTWLGVSSTCPVCRTAATPAAPSAVGVDHGGGEESIAVEC

SEQ ID NO: 14565 - protein, 150 aa, Zea mays
  VARIANT 90: note = Ancestral polymorphism is F, Derived polymorphism is S
  VARIANT 24..150: note = Derived polymorphism lacks residues 24 to 150
  VARIANT 21: note = Ancestral polymorphism is R, Derived polymorphism is C
MEELGSRSYKAHKNNIKKPTCGCQTSTKGVTKSRSKRDSGLSSLHSQSTLGLTGLGMHMRSIPLDTSGHVIFGQIIYFSIQSRASLATFSDLSQSQCEVHRADEGDSYAEYSSGEKTKIGINVSMNKVEAWYMLFKKIGNTFIDDGLMMG

SEQ ID NO: 14566 - protein, 214 aa, Zea mays
  VARIANT 81: note = Ancestral polymorphism is T, Derived polymorphism is A
  VARIANT 53: note = Ancestral polymorphism is G, Derived polymorphism is A
MATKIYIVYYSTWGHVAALAEEIKKGADAVAGVEATVWRVAETLPEEVLGKMGAAPAREDHPVISPRQLADADAVLLGFPTRFGMMAAQMKAFLDATGGLWQGQALAGKPAGVFLCTGTQGGGQETTALTAVTQLAHHGMLFVPVGYTFGAGMFGIDQVRGGSPYGAGTFAGADGSRTPTEVELAMARHQGTYFAGIAKKLKAGAAALAAEALA

SEQ ID NO: 14567 - protein, 180 aa, Zea mays
  VARIANT 61: note = Ancestral polymorphism is C, Derived polymorphism is Y
  VARIANT 79..180: note = Derived polymorphism lacks residues 79 to 180
  VARIANT 101..180: note = Derived polymorphism lacks residues 101 to 180
MKREFGFVEFTDPRDADDARHDLDGRIFDGSHLIVEFARGAQRGPGGVPLDGKGPSFPGRCYNCGMDGHWVRDCKAGDWRDKCFRCGELGHIERNCKNSSKDLKYFLEFPNYLACSFLFKYLHVFTVSRSHSPRNNSKAYGEELPSTRSGYSRGPRRSSPPMERAECNGGSPMRGEARGK

SEQ ID NO: 14568 - protein, 836 aa, Zea mays
  VARIANT 302: note = Ancestral polymorphism is R, Derived polymorphism is L
MDSTVVGLKLVVLALSVAIWLFGTCCHADFTPADDYLINCGSTVDATVDHRVFVSDTSGAAILTTPTQSTAATTSPNLVSGFEGAMLYQTARIFVVPSSYAFMLKSHGRHFVRLHFFPFKYQSYDLTTATFKVSTQDVVLLDNFTAPSSSSPVFKEYSLNITRDMLILTFVPLGNNTPAFVNAIEVISVPDLITDSVLSLDPVGQYLGLSTQPLQTFYRINVGGPKVTPENDTLWRTWVTDQSSFVNSTPTTLANFPGKLNFQNGLATEEDAPDSVYNTARRLQNSTRSVSNMTWQFDVDARSSYLIRFHLCDIVSKAPYQLLFDVYVDSWSVVKDLDLSDKAFGNLATPYYIDAVLLSSDPSGKLSVSIGPSAVKIAAPDGILNGLEIMKMNISTGSVSIVAPPSVARSHLGVILGSVLGVVAAVVIAIVICIFFRRKNKLHPPAPSRPSSSWTPLNGLSFLTTGSRTTSRTTLTSGTTGDTSYRIPFVVLQDATNHFDEQMVIGVGGFGKVYKAVMQDGSKLAVKRGNQKSHQGLREFRTEIELLSGLRHRHLVSLIGYCDEHNEMILVYEYMEKGTLKSHLYGGDMPPLSWKKRLEICVGAARGLHYLHTGFAQSIIHRDVKSANILLDENLLAKVSDFGLSKVGPEFDQTHVSTAVKGSFGYLDPEYFRRQKLTDKSDVYSFGVVLLEVICARPVIDPTLPRDMINLAEWAIKWQKRGELDQIVDQRIAGTVRPEALRKFGETVEKCLAEYGVERPTMGDVLWNLEFVLQLQEAGPDMSNINSMNQISELPSNPKRVSSLDISSTDQSRVPIDYSDMSTSNAFSQLINAEGR

SEQ ID NO: 14569 - protein, 335 aa, Zea mays
  VARIANT 18: note = Ancestral polymorphism is R, Derived polymorphism is L
  VARIANT 25..335: note = Derived polymorphism lacks residues 25 to 335
  VARIANT 78..335: note = Derived polymorphism lacks residues 78 to 335
  VARIANT 92: note = Ancestral polymorphism is L, Derived polymorphism is R
  VARIANT 142..335: note = Derived polymorphism lacks residues 142 to 335
  VARIANT 256..335: note = Derived polymorphism lacks residues 256 to 335
MECEPEELQFLGVVGIYRFSAEILRGPHRPLFARIAAAFALPLSALFLLHVAISHALFTHIDSDDTALDASSPGTDTQRRLLSRLASDWLALLLFKSAYLLALLLLSLLSVAASVFSVASVYSAKRDALTFPRVLSVVPRVWRRLAATFLAAFALLFAYHAVAVLVFVGLLVAADNGSGLAGLLAFLVAVAYLLGLVYLGVVWHLASVVSVLEDHKGFAAMRKSKDLIRGKLVTAGAIFFTLNVVFAAVELGFRAWVVRGSGAASSRLLLGLIMLAALCCVVMLALVTQTVVYLVCKSYHHESLDKANISDHLEVYLGDYVPLKASDVQMEQFQV

SEQ ID NO: 14570 - protein, 225 aa, Zea mays
  VARIANT 8: note = Ancestral polymorphism is T, Derived polymorphism is I
  VARIANT 12: note = Ancestral polymorphism is A, Derived polymorphism is V
  VARIANT 20: note = Ancestral polymorphism is P, Derived polymorphism is S
  VARIANT 35: note = Ancestral polymorphism is D, Derived polymorphism is N
  VARIANT 47..225: note = Derived polymorphism lacks residues 47 to 225
  VARIANT 74: note = Ancestral polymorphism is S, Derived polymorphism is L
  VARIANT 161: note = Ancestral polymorphism is P, Derived polymorphism is S
MLQNSLATVIAALLSAANSPFLGCTALSPLMHLFDLTGLRSALDCRRSATMGTRGVALLLLTVVLLQALLPASSEGLVRVALKKQPVDQNGRVATCLSVEERQRLLLRGANALGSGGEDDSDVIALKNYMNAQYVGEIGVGSPQHKFTVIFDTGSSNLWVPSSKCYFLIACYFHSRYKSGQSSTYKKNGLTLPFLCCYCIVFPIFSLWTEICITFVIRLYFPAGF

SEQ ID NO: 14571 - protein, 360 aa, Zea mays
  VARIANT 194: note = Ancestral polymorphism is H, Derived polymorphism is R
MTTTKRHCLRFTTVLATTLLSATAACLDVGFYDRTCPTAETIVQQTVAAAFRNNSGVAPALIRMHFHDCFVRGCDGSVLIDTVGNLTAEKDAPPNNPSLRFFDVVDRAKASLEAQCPGVVSCADVLAFAARDSVVLSGGLGYQVPAGRRDGRISNDTEALNNLPPPFFNATELADRFASKNLTIEDLVVLSGAHTIGVSHCSGFAGPTDLNGPVDRLYNFSSPDGIDPTLSKAYAFLLKSICPANTSQFFPNTTVFMDLITPERFDNKYYVGLTNNLGLFKSDVALLTNATMKALVDSFVRSEATFRTKFARSMIKMGQIEVLTGTQGEIRRNCRVINPVSATDDVVLARPSGFTGVAAS

SEQ ID NO: 14572 - protein, 357 aa, Zea mays
  VARIANT 2: note = Ancestral polymorphism is T, Derived polymorphism is A
  VARIANT 306: note = Ancestral polymorphism is K, Derived polymorphism is N
MTTRCCLVVATLLAALLSVSASLEFGFYNKTCPSAETIVQQTVAAAFTNNSGVAPALLRMHFHDCFVRGCDGSVLIDSTANNKAEKDSIPNSPSLRFFDVVDRAKASLEARCPGVVSCADILAFAARDSVVLTGGLGYKVPSGRRDGRISNATQALNELPPPFFNATQLVDNFASKNLSLEDMVVLSGAHTIGVSHCSSFAGINNTGDRLYNFSGSSDGIDPALSKAYAFLLKSICPSNSGRFFPNTTTFMDLITPAKFDNKYYVGLTNNLGLFESDAALLTNATMKALVDSFVRSEATWKTKFAKSMLKMGQIEVLTGTQGEIRRNCRVINPANAAADVVLARQPGSSGSTGVATS

SEQ ID NO: 14573 - protein, 179 aa, Zea mays
  VARIANT 4: note = Ancestral polymorphism is V, Derived polymorphism is A
  VARIANT 6: note = Ancestral polymorphism is R, Derived polymorphism is H
  VARIANT 9: note = Ancestral polymorphism is V, Derived polymorphism is I
  VARIANT 16: note = Ancestral polymorphism is S, Derived polymorphism is L
  VARIANT 62: note = Ancestral polymorphism is T, Derived polymorphism is I
  VARIANT 72: note = Ancestral polymorphism is A, Derived polymorphism is V
  VARIANT 73: note = Ancestral polymorphism is V, Derived polymorphism is E
  VARIANT 79: note = Ancestral polymorphism is D, Derived polymorphism is N
  VARIANT 108: note = Ancestral polymorphism is A, Derived polymorphism is T
  VARIANT 113: note = Ancestral polymorphism is L, Derived polymorphism is P
  VARIANT 136..179: note = Derived polymorphism lacks residues 136 to 179
  VARIANT 142: note = Ancestral polymorphism is A, Derived polymorphism is V
  VARIANT 143: note = Ancestral polymorphism is G, Derived polymorphism is R
  VARIANT 155..179: note = Derived polymorphism lacks residues 155 to 179
  VARIANT 161: note = Ancestral polymorphism is S, Derived polymorphism is R
MQMVSRRGVVQLVLVSAITWVILGLVTLAFHLRPCISPVAFLSMPKCLELDGASVEQACLPTLHWKHDRAKAVDILVNDLKVFLTFNEEFYKEITQLLTLENFSVAAAVEPKLRCLLKADMVVVFCELVAQGEALQNFQHGAGFWSAMTSNVTFQSRNVLSKKFMVYPYMPSIFEMKPN

SEQ ID NO: 14574 - protein, 434 aa, Zea mays
  VARIANT 301..434: note = Derived polymorphism lacks residues 301 to 434
MASAASGGGGSLKRMGPLRVQYYIVMGAVAAAVVLATLRYMPGPAVPATTARTSGGGVVRSAPAAAAVPVPVPAVEVETGEDEQAQRRRRRRKKKGDGVVLFNFGDSNSDTGGVAAVMGIRIAPPEGRAYFHHPTGRLSDGRVILDFICESLGMPHLSPFMKPLGSNFSNGVNFAIAGSTAMPGVTTFSLDVQVDQFVFFKERCLDSIERGESAPIVEKAFPDAIYTMDIGHNDINGVLHLPYHTMLENLPPVIAEIKKAIERLHENGARKFWIHGTGALGCMPQKLSMPRDDDSDLDEHGCIASINNVCKKFNSLLSEALDELRLTLKSSTIVFVDMFAIKYDLVANHTKYGIEKPLMTCCGHGGPPYNYDPKESCMTSDKYLCKLGEKFISWDGVHFTDAANGIVASKVLSGEYNIPRVKLASLVPVPKSDD

SEQ ID NO: 14575 - protein, 1039 aa, Zea mays
  VARIANT 667..1039: note = Derived polymorphism lacks residues 667 to 1039
  VARIANT 596..1039: note = Derived polymorphism lacks residues 596 to 1039
  VARIANT 589..1039: note = Derived polymorphism lacks residues 589 to 1039
MFFSGDPSARRRVDLGGRSSKERDRKVLLEQTREERRRRQGLRLQNTSATKIQKFFRGKKALELARSEVRKNFCSTFGEHCERIEWNIFGTNSDFLRQLLFFFNANEDNDIAILCHVCNLLLQYVKQGGDVVTLFTGVNGSSLQPLVAHRVKKFALICVQAVYQKRHDWGSQLLTTPGTTSVPSVSLLETVGCLINPKFLWNCKVVGYLQQRKIYCLFRGIIVSVPQNVRNSGHFDSASVLEQVLMLVASHVGHHPCCCLKVDPRWSFSSQLLSIPFLWHRLPQLKKVFSVNGLNKYYIHQIACLLPSLVDVLPNDISANHPGYACVLANVLEAATWILSDAKLASDSAADIIAVCTSLLDTLPAVTTPTERADDDDEMPMDVNIKINLDVDLERQITAAIDSKLLQHLVNALFRGTLSTNDSDLSGPSDAEVDAVGSICAFLHVTFNTFPLERIMTVLAYRTEIVPALWKFIKRCHASRRWPFFLKFASSLPADSPGWLLPMSVFCPIYKHMLKIIDTGEFYEQEKPLSLKDLKSLVLILKQALWQLLWVIPSSSTQKVSPNPSGLKKLSVENVKTRARVGLSELLTQLQDWNSRLPFTAASDFYSQEATSENFVSQVWMPMLFWINRNAILGNTRASEIIKLAPFLAPFTSRVKIFTSQLTCSRQSTSHSALTRQRFKIRRSRLLEDAFDQLSLLSEEDLKGPIRVSFINEHGEEEVGIDGGGIFKDFMENITRAAFDVQYGLFKETADHLLYPNPGSGLVHELHLQYFHFLGSLLGKAMYEGILVDLPFATFFLSKLKQKYNFLNDLPSLDPELYRHLLFLKHYNGDISELELYFVIVNNEYGEQCEEELLPGGRHMRVTNDNVITFIHLVANHRLNYQIRAQSTHFLRGFQQLIPKDWIDMFNEHEIQVLISGSLESLDIDDLRSNTNYSAGYHPDHELIEMFWEVLKSLSSDNQKKFLKFVTGCSRGPLLGFQYLEPKFCIQRAGVPGLEEHADRLPTSATCMNLLKLPPYKSKEQMQTKLLYAINSEAGFDLS

SEQ ID NO: 14576 - protein, 121 aa, Zea mays
  VARIANT 106..121: note = Derived polymorphism lacks residues 106 to 121
  VARIANT 104..121: note = Derived polymorphism lacks residues 104 to 121
  VARIANT 61: note = Ancestral polymorphism is A, Derived polymorphism is V
  VARIANT 50..121: note = Derived polymorphism lacks residues 50 to 121
  VARIANT 47: note = Ancestral polymorphism is S, Derived polymorphism is L
  VARIANT 41: note = Ancestral polymorphism is E, Derived polymorphism is K
  VARIANT 20: note = Ancestral polymorphism is A, Derived polymorphism is S
MLEIVMDGSMEHMHWKEERAWPYKLLDATYVAENKLWYTPECTGNGSDGQAGPSPRAFHIAVVIDYNMFIFGGRSGGKRLGYFWMLDTDLWQWSEMTGFGDLPSPREFAAASAIGNKKIVM

SEQ ID NO: 14577 - protein, 76 aa, Zea mays
  VARIANT 70..76: note = Derived polymorphism lacks residues 70 to 76
  VARIANT 60..76: note = Derived polymorphism lacks residues 60 to 76
  VARIANT 31: note = Ancestral polymorphism is T, Derived polymorphism is I
  VARIANT 28: note = Ancestral polymorphism is V, Derived polymorphism is M
  VARIANT 26: note = Ancestral polymorphism is R, Derived polymorphism is W
  VARIANT 14: note = Ancestral polymorphism is G, Derived polymorphism is E
  VARIANT 5: note = Ancestral polymorphism is G, Derived polymorphism is D
MMTNGGGSAMLMKGEDMYLMNVGDNRAVLGTMDSVDLEEISGCSFNGLVGDGTLLLSALQLTSEHSTSVREEVCRI

SEQ ID NO: 14578 - protein, 242 aa, Zea mays
  VARIANT 13: note = Ancestral polymorphism is E, Derived polymorphism is K
  VARIANT 22: note = Ancestral polymorphism is P, Derived polymorphism is L
  VARIANT 77..242: note = Derived polymorphism lacks residues 77 to 242
  VARIANT 111: note = Ancestral polymorphism is E, Derived polymorphism is K
  VARIANT 142..242: note = Derived polymorphism lacks residues 142 to 242
MGDEKVCGVGTVEVVVDADEHPAPLLRHHDVDVVLAGLPLRPLQSGGGRAEIHRILKLIRPREKRVGKIPQAAAAVRETPAEWGTVPPPMQADVAVPRRGPDMSATSRGPERNPLSMGPERNPPPAPAGAQMGPDGNLGTGCSCTAANDSELSNLEEEEAGGCWGAWLREMEAGAGAAARMARGCYAHGGGGWGGSQGGCAHGRVPVAAGVAAGARGGNRTVSDGSGVGNRMVEMEAGAWLC

SEQ ID NO: 14579 - protein, 290 aa, Zea mays
  VARIANT 250: note = Ancestral polymorphism is V, Derived polymorphism is M
  VARIANT 249: note = Ancestral polymorphism is S, Derived polymorphism is G
  VARIANT 217: note = Ancestral polymorphism is A, Derived polymorphism is T
  VARIANT 215: note = Ancestral polymorphism is C, Derived polymorphism is Y
  VARIANT 214: note = Ancestral polymorphism is G, Derived polymorphism is S
  VARIANT 203: note = Ancestral polymorphism is S, Derived polymorphism is F
  VARIANT 194: note = Ancestral polymorphism is S, Derived polymorphism is F
  VARIANT 188: note = Ancestral polymorphism is I, Derived polymorphism is N
  VARIANT 186: note = Ancestral polymorphism is R, Derived polymorphism is I
  VARIANT 185: note = Ancestral polymorphism is L, Derived polymorphism is P
  VARIANT 159: note = Ancestral polymorphism is C, Derived polymorphism is S
  VARIANT 152: note = Ancestral polymorphism is W, Derived polymorphism is C
  VARIANT 147: note = Ancestral polymorphism is P, Derived polymorphism is L
  VARIANT 120: note = Ancestral polymorphism is S, Derived polymorphism is P
  VARIANT 83: note = Ancestral polymorphism is S, Derived polymorphism is F
  VARIANT 57: note = Ancestral polymorphism is Q, Derived polymorphism is H
  VARIANT 50: note = Ancestral polymorphism is S, Derived polymorphism is I
  VARIANT 47: note = Ancestral polymorphism is A, Derived polymorphism is V
  VARIANT 18: note = Ancestral polymorphism is R, Derived polymorphism is C
MDILSVRRKIDNETILKRDIVVADVNDLATRAGQELLDMVDSSPVVAIKSLKVFDFQGMSLSTIDRSTLEINPDLPEAKNLMSWYDSEGKDTSLVPISAEAGATRAGGFKSMYFDRVFLSYITSNPSMGQEKPVFFSLYAIISHIKPDQIMWYRACMTCNKKVTEVFRSGYWCEGCQKNDSECSLRYIMVIKVSDPTSEAWVSVFNEHAEKIIGCNADELDRIRKEQGDDIYVLKLKEATWVPHLFRVSVTQHEYMNEKRQRITVRGEAPVDYAAESKYLVEEIAKLTAY

SEQ ID NO: 14580 - protein, 171 aa, Zea mays
  VARIANT 120: note = Ancestral polymorphism is F, Derived polymorphism is I
  VARIANT 88: note = Ancestral polymorphism is S, Derived polymorphism is N
  VARIANT 86: note = Ancestral polymorphism is S, Derived polymorphism is L
  VARIANT 63: note = Ancestral polymorphism is P, Derived polymorphism is L
MGDEENIGKIGGAIGIENGNTGEARKWCGVVTSSYGRIAGHHRLRETHLLGRFILHACFRQVPILFDLHFSPLPLQHHSVLYALKSFSILLRIFFEHFAEGSKDVGASRIIGIDIDNKKIDVAASKVPTVAAWTTSSRVMLFPATTASKCYMMASSAGQIFINLGFHFYGV

SEQ ID NO: 14581 - protein, 149 aa, Zea mays
  VARIANT 4: note = Ancestral polymorphism is R, Derived polymorphism is Q
  VARIANT 142: note = Ancestral polymorphism is I, Derived polymorphism is N
MRLRLGGLCLSRSIGDQDVGEFIIPVPYVKQIKLHCWEVVLHHFRTKLNCKLSLYCLMLEAILLFQATVSGMLLTAEMAFKCARGLPPEAAAEPIVKEAVEAKGLRDDTTCIVIDIISPEKPKRTIQSQRTPGKGLVLLKKILFKENNI

SEQ ID NO: 14582 - protein, 77 aa, Zea mays
  VARIANT 24: note = Ancestral polymorphism is V, Derived polymorphism is G
  VARIANT 35: note = Ancestral polymorphism is R, Derived polymorphism is W
  VARIANT 65: note = Ancestral polymorphism is R, Derived polymorphism is W
MPLLWPCHVHFLPPLSAHPPPPRVRARITGGCGTRPDMLFGKHGKSGLVALNLDFDQVKEFIKERLGIEVEMGGCKA

SEQ ID NO: 14583 - protein, 413 aa, Zea mays
  VARIANT 49: note = Ancestral polymorphism is Q, Derived polymorphism is L
MTAHHRLVILASFVICILLPALPADAESLPGFRGTMIRRTGTTAINFTQAARDSYRRLSSLASRSSTSHLNSSDNNTQRIPLRMDDSGGAYDMEFSMGTPPQKLTALADTGSDLIWAKCGGACTTSCEPQGSPSYLPNASSTFAKLPCSDRLCSLLRSDSVAWCAAAGAECDYRYSYGLGDDDHHYTQGFLARETFTLGADAVPSVRFGCTTASEGGYGSGSGLVGLGRGPLSLVSQLNASTFMYCLTSDASKASPLLFGSLASLTGAQVQSTGLLASTTFYAVNLRSISIGSATTPGVGEPEGVVFDSGTTLTYLAEPAYSEAKAAFLSQTSLDQVEDTDGFEACFQKPANGRLSNAAVPTMVLHFDGADMALPVANYVVEVEDGVVCWIVQRSPSLSIIGNIMQSITVVGF

SEQ ID NO: 14584 - protein, 114 aa, Zea mays
  VARIANT 105: note = Ancestral polymorphism is M, Derived polymorphism is V
  VARIANT 94: note = Ancestral polymorphism is R, Derived polymorphism is T
MGAHTGSRCNPSASTARRTRPPPASSGMFLRRPSPAKPMSQGAAEGGKARTKSCGRRDMEVGEKMEVLRRLVPTGSCDDEVDGLLLHAASYIARLQAQVAVMQFMVDVLEDTKH

SEQ ID NO: 14585 - protein, 167 aa, Zea mays
  VARIANT 40: note = Ancestral polymorphism is L, Derived polymorphism is V
MAGAEGERWVGLATDFSEGSRAALRWAAANLLRAGDHLLLLHVIKEPDYEQSEAILWESTGSPLIPLSEFSDPIIAKKYGAKPDIETLDILNTTATQKDIVVVVKVLWGDPREKLCQVIHDTPLSCLVIGSRGLGKLKRVLLGSVSDYVVNNATCPVTVVKSTSTEG

SEQ ID NO: 14586 - protein, 175 aa, Zea mays
  VARIANT 130: note = Ancestral polymorphism is A, Derived polymorphism is V
  VARIANT 104: note = Ancestral polymorphism is L, Derived polymorphism is V
  VARIANT 43: note = Ancestral polymorphism is A, Derived polymorphism is T
MVFLEAEMSWNVLISPSQLDRKGLLLRKAIIVRLLEDVTNRRASKEHGYYIAVNQLKAISEGKVRELTGDVLFPVSFTCITQKPMKGEVMVGHVDRILKHGVFLKSGPVESIFLAEKSMSNYKYIGGENAMFMNDHSKLEKDTAVRFKVLGFRWMEADRQFQLLATIAGDFLGPL

SEQ ID NO: 14587 - protein, 241 aa, Zea mays
  VARIANT 225..241: note = Derived polymorphism lacks residues 225 to 241
  VARIANT 180..241: note = Derived polymorphism lacks residues 180 to 241
  VARIANT 158: note = Ancestral polymorphism is H, Derived polymorphism is Y
  VARIANT 127: note = Ancestral polymorphism is A, Derived polymorphism is V
  VARIANT 100: note = Ancestral polymorphism is G, Derived polymorphism is D
  VARIANT 95: note = Ancestral polymorphism is R, Derived polymorphism is Q
  VARIANT 89: note = Ancestral polymorphism is R, Derived polymorphism is C
  VARIANT 83: note = Ancestral polymorphism is G, Derived polymorphism is R
  VARIANT 60: note = Ancestral polymorphism is R, Derived polymorphism is K
  VARIANT 55: note = Ancestral polymorphism is F, Derived polymorphism is S
  VARIANT 50: note = Ancestral polymorphism is P, Derived polymorphism is T
  VARIANT 47..241: note = Derived polymorphism lacks residues 47 to 241
  VARIANT 45: note = Ancestral polymorphism is E, Derived polymorphism is K
  VARIANT 37: note = Ancestral polymorphism is R, Derived polymorphism is H
  VARIANT 34: note = Ancestral polymorphism is V, Derived polymorphism is A
  VARIANT 33: note = Ancestral polymorphism is R, Derived polymorphism is W
MIADGAAADNVPAPPVKMEEAILKTAGRLQGKRVIARSPFMTNPEQQLGPFLMCFSQLARKKGNTPSQLMHILIHLVRIPGSGADIQERGKLGLRWKFHGSERLDLPIGRRVRVTWDLHGWLFCPDATAAVFVLRFETSDAAEADDEGDTNENEAGPHVLRHPSFSFRNHQAHGSSDESWFSSDSDRTGWMRGPFRSGSDTSPSVSVASTSAASSAASVATVSEWAAMAAVASPRRVKSFA

SEQ ID NO: 14588 - protein, 235 aa, Zea mays
  VARIANT 133: note = Ancestral polymorphism is D, Derived polymorphism is G
  VARIANT 178: note = Ancestral polymorphism is A, Derived polymorphism is V
MASSPPSSASLRQRPAAAAATPDQQHEPPRLEDGLLPNQGGSPATSALSQALSSTANLANLLPTGTLLAFNLLAPTFTNHGACDATTSLLTRGLLALLALASALACFTDSLKSPHDGRVYYGVATRTGLWLIDYPPGAPPLPEGATGRYRLAFIDFVHAALSAAVFGVVAARDRDVVVCLYGPTPDRATQDLLDVLPLGVGVLCSLLFVAFPTTRHGIGYPVVANAVAAATATSS

SEQ ID NO: 14589 - protein, 469 aa, Zea mays
  VARIANT 64: note = Ancestral polymorphism is S, Derived polymorphism is F
  VARIANT 78..469: note = Derived polymorphism lacks residues 78 to 469
  VARIANT 110..469: note = Derived polymorphism lacks residues 110 to 469
  VARIANT 144: note = Ancestral polymorphism is G, Derived polymorphism is R
  VARIANT 206: note = Ancestral polymorphism is D, Derived polymorphism is E
  VARIANT 281..469: note = Derived polymorphism lacks residues 281 to 469
  VARIANT 299..469: note = Derived polymorphism lacks residues 299 to 469
MPREIITIQVGQCGNQIGMEFWKQLCLEHGIGKDGLLEDFATQGGDRKDVFFYQADDQHFIPRSLLIDLEPRVINGIQNSEYRNLYNHENIFVAEHGGGAGNNWASGYHQGEQVVDDIMDMVDREADGSDSLEGFVLCHSIAGGTGSGMGSYLLETLNDRYSKKLVQTYSVFPNQMETSDVVVQPYNSLLTLKRLTLNADCVVVLDNTALNRIAVERLHLSNPTFAQTNSLVSTVMSASTTTLRYPGYMNNDLVGLLASLIPTPRCHFLMTGYTPLTVERQVNMIRKTTVLDVMRRLLQTKNVMVSSYARTKEASQAKYISILNIIQGEVDPTQVHESLQRIRERKLVNFIDWAPASIQVALSRKSPYVQTTHRVSGLMLANHTSIRHLFGKCLGQYEKLRKKQAFLDNYRKFPMFADNDLSEFDESREIIESLVDEYKACESPDYIKWGMEDPGEANVAADLDSKLVV

SEQ ID NO: 14590 - protein, 688 aa, Zea mays
  VARIANT 263..688: note = Derived polymorphism lacks residues 263 to 688
MEMGMTPDVMYGQNVFVPATATPYQYGYAEVGSQMEWCNQSSSLGYDGQDNFYPTEGMQCVYYAAPDNGSVHPTYSSYPSDPSFVPDGSFMPQEYVADPANSTCQIAQTSYYIPAVLPYAQDSALGSATTHLHSNSNVAFLPGIPGYAATSANAAFPLIAPVTTKSDIVMHPHVQSTIVPSKQFQDYAKPPKVQLHNSVPQKQELPDRCMIPAKLPHASQVSAHLSGNNCLGCAAGSDLRKWAAAEKFQPSSKSSGHLNATGQKAHSLVDSEKPSNQRPAIIVKSHTTRLPVGNPDGTIVIRTDQYNRDDLRLDYMYAKFFVIKSIGEADVHKSIKYGVWSSSSSGNSKLDSAFRDADRISRRHSTKCPVFLFFSVNGSGHFCGMAEMVGPVDFHKDMDFWCQDKWTGCFPVRWHIVKDIPNGSLQHITLQNNENKPVTHSRDTQEVPYLPGMSVINIFKDIKVRYCLFDDFMSYEAEEAQKRAHRRCKLSSNAPDFVPVSQRTKDESGTEQRESRSVLVDRTSGIQNAAEKPHDTKVIKPQDPCVSEEQASEAEKENGPQGCRCSGNQGQEEAAKTATNHPPASGLKAAGAEGKQQQQRWKKVENPKQHADSVPAQCSQEEAPEKRLNGVSGCSSAVQEGCEEQRAAAKLASLKIGSRAAVEADRKTSAVGVVTIGSMPVRVDCCDV

SEQ ID NO: 14591 - protein, 566 aa, Zea mays
  VARIANT 111..566: note = Derived polymorphism lacks residues 111 to 566
MGVGAEPKDQAATAAGVPAEQDEAGGKEDKAAAVSCSICLDAVLAASGERSTARLHCGHEFHLDASLVSSGTHNVNLQGISVGNATLQLPTSTVDSDDSTMGYGDVQLAASDLIELGYDDFHCYFVKKLISTAIDKHEKEKEMASVLLSYLYGDVKVLKDNEPIPKLVSVVNPRNPSRAFIPRPMFEKISDLCKNADCIGSAFNAKGVMQCPNCRKIEKGNWLYANGSRSAHDVSMDEWAHDEDLYDVSYSDMPFRFHWCPFGRLTQLPSLFEEGESSPPVTFHDFMGQHVFTEQVAVSAAAGTTNPCPYVAYLHPLTPLTSLSSSHVPDRTMDRPAYHDHWNPMAGPSDVRSMQTMQPADFHHSHWAHVPHSYGQPNSNNEQPGIPFGARAVRVDGDSQRRASVVSPSYFSNGSGSRSRPPNVPPLMPQFMRAHGSISEQYQQNSSSSLFAGAHRSGGMRPAPTPLPENPTFTLFPPGSSGHSSMETDDAGGSRFYAWEGDRFAPYPLMPVDCETSWRTSQQQSHQSTSEPTSAPRRLFGQWLAVGRPSPSPEGSSYRQLHSPRM

SEQ ID NO: 14592 - protein, 300 aa, Zea mays
  VARIANT 42..300: note = Derived polymorphism lacks residues 42 to 300
  VARIANT 52: note = Ancestral polymorphism is L, Derived polymorphism is R
  VARIANT 67: note = Ancestral polymorphism is C, Derived polymorphism is Y
MMMTRAPMGPMEGAAVDEMVRRLVEGGRGGRQVQLSEAEIRQLCVEGKRVLLSQPNLLRIHAPVKICASTYVFLGDYVDRGKQSLETICLLLAYKIRYPENIFLLRGNHEDAKINRVYGFYDECKRRFNVRLWKIFSDCFNCLPIAALIDDKILCMHGGLSPELTSLDQIKDIERPAEIPDYGLLCDLLWSDPSPDGEGWGESDRGVSCTFGADKLVEFLEKNDLDLICRAHQVVEDGYEFFAQRRLVTIFSAPNYCGEFDNVGALLSIDESLMCSFQILKPTDMGPPHARKQIPNKLEV

SEQ ID NO: 14593 - protein, 230 aa, Zea mays
  VARIANT 37: note = Ancestral polymorphism is S, Derived polymorphism is I
  VARIANT 39: note = Ancestral polymorphism is G, Derived polymorphism is D
  VARIANT 54: note = Ancestral polymorphism is C, Derived polymorphism is Y
  VARIANT 63: note = Ancestral polymorphism is S, Derived polymorphism is P
MGIDLVAGGRNKKTKRTAPKSDDVYLKLLVKVSGVVIFDRSARGRVFGSENAVCHVVLRFCVSRDFDLCYARVQLYRFLVRRTKSNFNAVILKRLFMSKTNRPPISMRRLVKFMEGKEKNIAVIVGTVTDDKRIQEVPAMKVTALRFTETARARIVNAGGECLTFDQLALRAPLGENTVLLRGPKNAREAVRHFGKAPGVPHSHTKPYVRSKGRKFEKARGRRNSRGFKV

SEQ ID NO: 14594 - protein, 195 aa, Zea mays
  VARIANT 69: note = Ancestral polymorphism is R, Derived polymorphism is G
MAASLGLNPEAVFTSYTSSPPFMSDYVAASFLPPAVVDSTDFSAELDDLHHHLDYSSPAPTLAGARSDRSEKQMIRWCEGGGGEKRLGRIGFRTRSEVEILDDGFKWRKYGKKAVKSSPNPRNYYRCSSEGCGVKKRVERDRDDPRYVITTYDGVHNHASPAAAAIIQYGGGGGFYSPPHSGSPSAASYSGSFVL

SEQ ID NO: 14595 - protein, 201 aa, Zea mays
  VARIANT 73: note = Ancestral polymorphism is R, Derived polymorphism is T
MRTTGTIMNLHRDMDGREQMRTTIQNQEQVFRQQVHELHRLYHVQKQLMQVRQAHAPAPATRAPAVLDDAKPRRPQLDIWCSETARNPPQQQFISFNTATAPAPAAPAENCNLELTLATGPSSSGSCDAGRWQGKRLKASPNSGSAATAVSSTSTDSELARFGDIDVVATPVARFHGEVTRRMDEVAQGPWMYRCLSLKTA

SEQ ID NO: 14596 - protein, 394 aa, Zea mays
  VARIANT 360: note = Ancestral polymorphism is V, Derived polymorphism is G
  VARIANT 321: note = Ancestral polymorphism is G, Derived polymorphism is W
  VARIANT 264: note = Ancestral polymorphism is M, Derived polymorphism is T
  VARIANT 210..394: note = Derived polymorphism lacks residues 210 to 394
MSHQHLPDCYVVPTELVQRRCSESRPSLLSQPTVVHVLPHPNRPTRIQRRCRIPRRSPTRPCRSPRDPLPTHGVPAAAPAVLSVFSLLATTAAAQGRYRAVFSFGDSLVDAGNLVTEGIPDYLATARPPYGQTYFGYPTGRCSDGRLVVDFIAQELGLPLPPPSKAKNASFAQGANFAITGATALDTDFFRKRGLGSTVWNSGSLRTQIQWLRDLKPSLCSSAQGTRCKEFFAECLFVVGEFGGNDYNAPLFAGKDLREAYKLTPHVIRAISDGVEQLIAEGAKDLIVPGVMPSGCFPVYLTMYVDPKEGHGSRTSCLKRGRLRANRPQRLEVPRTSIHRFGRIGRLVLRIATSRDDIEVVAVNDPFIDAKYMVRKLILILVIIFHMSDSGRFI

SEQ ID NO: 14597 - protein, 198 aa, Zea mays
  VARIANT 7: note = Ancestral polymorphism is M, Derived polymorphism is K
  VARIANT 20: note = Ancestral polymorphism is Q, Derived polymorphism is H
  VARIANT 36: note = Ancestral polymorphism is M, Derived polymorphism is T
  VARIANT 42: note = Ancestral polymorphism is T, Derived polymorphism is K
  VARIANT 132: note = Ancestral polymorphism is K, Derived polymorphism is T
  VARIANT 178: note = Ancestral polymorphism is R, Derived polymorphism is M
MDDREQMRMTVLNQEQVFRHQVHELHRLYHVQKQLMMQQAHTPAPATRAPAVLDDAKAKPRRPHLDIWCSETARNPPQQRIISFNTATAPAPAPAPAPARAEDCNLELTLATGRPSSSSGSSSCDAGRRRGKRLKVSTNSDSGATAVSSTSTDSELAQFGDIDAANLPVVRFQGEVTRRMGEVGQGPWMYRCLSLKTA

SEQ ID NO: 14598 - protein, 324 aa, Zea mays
  VARIANT 186..324: note = Derived polymorphism lacks residues 186 to 324
MGAPILDPSLSVACRCRGTGAGEGIIIDIMTLESGLREDTHPMGAELRESKLMNKYNELKEAGKLDTFMERRRNSEDLDLSKEDLVKLLLEKDGSLKSKDKEFKDMKDKVLQQAWPCHNKRESENTKKYAIQRRRNSVDVPRRLLSCASVRRGEDGIFGRHLGTTTMGGAKWKEEEMVKTLRPSVWLTEDFPLSVDKFLSLLDILACHVCAVRWLRVLLTTKFPPGTFPVKVVCSLEQNISLMLNPSRLQSPNCIQICRILNPNKFLANHHACAGPPRHMAHPPLHLKAVTALNAHPGEALITVETEEMYNARSRNLLWHLVYS

SEQ ID NO: 14599 - protein, 299 aa, Zea mays
  VARIANT 41: note = Ancestral polymorphism is E, Derived polymorphism is G
MAMVQAGMGLTRVVVLVGAGVAGSVVLRNGRLAEILGELQGILDKGNKGKDGGGGDGETDLNEALTSQVRRLAMEIRQLANSQPITVLNGGSGQSGVSGLIVPAATVGALGYGYMWWKGISFSDLMYVTKRNMANAVSSMTKHLEQVQSSLAAAKRHLTQRIEKLDDKLDQQKALSGQIRDDVTDARLKLENIGSEIKNIKELVWGLDGKIDSMEAKQDFSCAGVMYLCQFMEQNGGKLPDRLEGSKMTTKRFGGQKFLQGLQLAIESGNCGKDTIDMLLKDADSSDKINRTSSIKSAS

SEQ ID NO: 14600 - protein, 638 aa, Zea mays
  VARIANT 572..638: note = Derived polymorphism lacks residues 572 to 638
MADAHHFNNISLGGRGGGHPGQFKLYSGGLAWKKQGGGKIIEVDKGDITNVAWMRIPKSYQLSVGTKEGLCYRFFGFREQDVSNLTNFIEKSTGITPEEKQLSVSGQNWGGIQINGNMLCFNVGSKEAFEVSLADVAQTQMQGKTDVVLEFHVDDTTGANEKDSLMDLSFHVPTSNTQFIGDEHRTSAQMLWQAISVEIDGGGSSEMAVVTFDGIAILTPRGRYSVELHQSFLRLQGQANDFKIQYSSILRLFVLPKSHNPHTFVVITLDPPIRKGQTLYPHIVIQFETEAVVERELTLSGEILAEKYKDRLESSYRGLIHEVFSKVLRGLSSAKVTRPSTFRSCLDGYAVKSSLKAEDGLLYPLEKGFFFLPKPPTLIPHEEIEYVEFERHGAGGASISSHYFDLLVKLTNDQELLFRNIQRNEYHNLFNFISGKHLKILNLGDGQGRTSGVTAVLQSTDDDSVDPHLERIKNQAGNEESDEEDEDFVADKDDSGSPTDDSDAEGSDASMSGGEKEKPSKKEASSSKPPVKKKQKSGPDEGSQKKKPKKKKDPNAPKRAIAPFMYFSKAERANIKSSNPELATTEIAKKLGERWQKMTAEERQPYVEQSQVDKQRYAEESAAYRGAAAQQGSGAGSE

SEQ ID NO: 14601 - protein, 371 aa, Zea mays
  VARIANT 326..371: note = Derived polymorphism lacks residues 326 to 371
  VARIANT 241..371: note = Derived polymorphism lacks residues 241 to 371
  VARIANT 216..371: note = Derived polymorphism lacks residues 216 to 371
  VARIANT 184: note = Ancestral polymorphism is Y, Derived polymorphism is F
MAMSFFSPTTTPSSSASLLPIRRQCATGPSVSFPLKPHRFRVHLKPPRSSRTRIHTLSTSSLKIPTESILSSVVSTSTTLLFVLVAGLLSLSGVRSLPALACAPAPTQQPQETEEQESKEKKQQEEAGERKEDVLPQLDEEDAEDDEVRMYSAILSRNSGDVDALKCALYAKMRRADWGGALRFARLLRDAEPSELEWRLMVAQLHELKGDLAEAERHFRELLAEEPLLVRALHGLALCMQKKPEGPAVFEMLENALQLATSERRVPEERNIKLLIAQMHVVMGQLDVASEKLQNLINEDPRDFRSHLCQGIVYALLDRKEDADMQFDVYRSLVPDEFPDKSFISDVILAARTESHDRLQKEFDSEFQAKK

SEQ ID NO: 14602 - protein, 447 aa, Zea mays
  VARIANT 139: note = Ancestral polymorphism is H, Derived polymorphism is Q
MESAAAAKTVERLAQRLVPPAEPTPTAPHRLSWLDRYPTQMALIESLHVFKPDPARDGLSPAETIERALARALVDYYPLAGRLAVSDSAGGLHVDCSAEGVWFIEAAVRCRLEDVDYLEYPLQIPKDELLPHPLPRPSHEEESKLILLVQLSDRCPDAYVQVTAFACGGFVVGFRFSHAVADGLGAAKFMGAVGELARGADQVSVAPTWARDAIPDPSGALVGSLPEPTGAKRLEYLAIDISADYIDHFKSQFAAATGGGRCSAFEVLIAKAWQSRTRAAGFEDPDTPVQLCFAMNARPLLGARLPRGGAGFYGNCYYIMRVASTADKVSSSSVTDVVKIIREGKKRLPLEFARWAAGEEGADGVDPYQITSDYRTLLVSDWTRLGFAEVDYGWGPPAHVVPLTNLDYIATCILVKPWAHKPGARLITQCVTPDRVSRFHDAMVDMN

SEQ ID NO: 14603 - protein, 208 aa, Zea mays
  VARIANT 35: note = Ancestral polymorphism is R, Derived polymorphism is H
  VARIANT 11: note = Ancestral polymorphism is G, Derived polymorphism is E
MVKHNNVIPNGHFKKHWQNYVKTWFNQPARKQRRRIARQKKAVKIFPRPTAGPLRPIVQCQTLKYNMKSRAGRGFTLEELKAAGIPKKLAPTIGISVDHRRKNKSLEGLQANVQRLKTYKAKLVIFPRRARKANAGDSTPEELATATQVQGDYMPITRGEKRSVEVVKVTDEMKSFAAYGKLRLERMNKKHLGARQKKAAEAEKDEKK

SEQ ID NO: 14604 - protein, 91 aa, Zea mays
  VARIANT 41: note = Ancestral polymorphism is R, Derived polymorphism is Q
  VARIANT 18..91: note = Derived polymorphism lacks residues 18 to 91
MELAASASASAVCSAYRQLSAPAAAADRGVGGDDAQETATRLDRRRRKRGGGCAGLRRRCYAVLKQQRTRLYILRRCVTMLLCWHQHDLSD

SEQ ID NO: 14605 - protein, 442 aa, Zea mays
  VARIANT 277..442: note = Derived polymorphism lacks residues 277 to 442
  VARIANT 168..442: note = Derived polymorphism lacks residues 168 to 442
MEIQTSGKPIDVLMEKVLSMNILSSDYFKELYRLKTYHEVIDEIYNTVKHVEPWMTGNCRGPSTAFCLLYKFFTMKLTVKQMHGLLKHPDSPHIRAVSFCFLPFCLLMLNVLLHGPIGFLYLRYVADPKVLWMWYEPYLRDDEEFSPGSNGRKTTMGVYVRDLILGQYYFDSLLPRIPLPVTRQITANLEKMKLPTKLSGATGDSSRQGSEDTARRPPSVKASLSVSFGQRAPHRASTRDSSPVRRTVTRDGHRSSYSPSRRSGSREGPDHDRSDRELDHSSRDRERARDRSNRDRYHSSRDLDRDKDARDYHRHERDSRDREYYRSRHSEERRDDRRDHESSRHRRSSSRHRSRSRSRSRSRSRSRRSRSRSTSRRSLNEQRSSPFRDANKEKAATVSSNLAKLKDLYGDITAKKEDSDAEKLHRDSCAEEVIRLGGPRWR

SEQ ID NO: 14606 - protein, 486 aa, Zea mays
  VARIANT 14: note = Ancestral polymorphism is P, Derived polymorphism is S
  VARIANT 180: note = Ancestral polymorphism is K, Derived polymorphism is T
MWKQFLGKISRKSPKSGGRGGSRPAKSPSSRGAANGAPPELSASSPAAAASPFPPPSGAETREDVFLRKLNVCCVVFDFAAERGKDSPEVERKRQVLVSLVDCVSEAEEPLTEAMLSACVRMFAINLFRVFPPKLRSGASAATDEDEPFFDPSWYHLQVVYELLLRFVMSPVVDVKVARKYMDNSFISRLLDLFDSDDPRERECLKTVLHRIYGKFMGNRPFIRKAVSNIFYRFVFETDHHNGIAELLEVFGSVITGFAKPLKEEHKLFLWKALIPLHKPKTVGVYLPQLTYCITQFIEKEPKLTGTVIRGLLKYWPVTNSQKEMMFLGELEEVLELTEMADFQKCAVPLFRRIAQCLNSSHFQVAERALFLWNNEHLFDLISQNCQVILPIIYPALERNARWHWNQSVLNVTMNVRKMFFDMDERLLLACQTNFQEEEKKRAASEERRRLVWEHLERNAAFHPVTGDIGFAVPPTSAPLVAPTMT

SEQ ID NO: 14607 - protein, 374 aa, Zea mays
  VARIANT 20: note = Ancestral polymorphism is D, Derived polymorphism is Y
  VARIANT 100: note = Ancestral polymorphism is A, Derived polymorphism is V
  VARIANT 152: note = Ancestral polymorphism is R, Derived polymorphism is P
  VARIANT 177: note = Ancestral polymorphism is A, Derived polymorphism is T
  VARIANT 256: note = Ancestral polymorphism is R, Derived polymorphism is C
  VARIANT 330: note = Ancestral polymorphism is A, Derived polymorphism is V
MQSSSSSASTPAAASGLVFDLGSAAGVPETHAWPGVNEYPSVESAGRDVVPVVDMGVACPDATRALARAADEWGVFLLVGHGVPREVAARAEEQVARLFVLPAPDKARAGRRPGEPTATGYGRPPLALRFSKLMWSEGYTFRAATVREEFRRVWPDGGDDYLRFCDVMEEYDREMRALGGRLLDLFFMALGLTDVQFATGETERRIRETWTATMHPILYPRCPEPERAIGLTAHTDSGFITLIMQSPVPGLQLLRRGPDRWVTVPAPPGALIVMLGDLFQVLTNGRFRSPIHRAVVSRERERISVPYFLCPPEDMTVAPLASALLPGRKAVFRAVTWPEYMEVKHKVFGTDAPALEMLQLQVDEEEQGERAATT

SEQ ID NO: 14608 - protein, 377 aa, Zea mays
  VARIANT 127..377: note = Derived polymorphism lacks residues 127 to 377
  VARIANT 239: note = Ancestral polymorphism is W, Derived polymorphism is C
MAAELHFVLVPVMAQGHLLPMLDLARLIAGHGARVTVVLTPVNAARSRPFLEHAARAGLAVEFVEFAFPGPALGLPQGCESIDMVTDLSLFVPFYEAMWLLAAPLEAYLRSLPRRPDCLVADTLGPWTAGVARRLGVPRLVLHGPSAFFLLAVHNLARHGTYDRAAGDMEPFEVPDFPVHVVVNRATSLGFFQWPGMEKFRRETLEAEATADGLLVNTCSALEGAFVEGYAAELGRKVWAVGPLCLIDTDADTMAGRGNRAAMDAEHIVSWLDARPAASVLYINFGSIARLSATQVGRDDLEKVVAELMDEGPACAARRAKVKELAHNTVAAVTEGGSSDIDVKNMLRHVVELSRKDEDLVLDAAEVAMKRKVDMDD

SEQ ID NO: 14609 - protein, 117 aa, Zea mays
  VARIANT 97: note = Ancestral polymorphism is T, Derived polymorphism is M
MAMAPSAACVVSFPARPAASTAGPRAAAGAGAVHAFAGSAEGAKWWAPLLGWSGKADYLEAPAPAPAGAQDEAPRRQFVGVMTEEKARELRARMAQTESFHDAMYHSAIASRLARSS

SEQ ID NO: 14610 - protein, 119 aa, Zea mays
  VARIANT 40: note = Ancestral polymorphism is E, Derived polymorphism is D
MAMAPCAPASVSSFPARPVRAPSAVRPRAAAIRATAAAAEGGRWWAPLLGWSGKADYLEAPAPVPAVLQDDDAAAARRQFVGGLTEEKARQLRARMAQTESFHDAMYHSAIASRLARSA

SEQ ID NO: 14611 - protein, 137 aa, Zea mays
  VARIANT 124: note = Ancestral polymorphism is S, Derived polymorphism is L
  VARIANT 123: note = Ancestral polymorphism is R, Derived polymorphism is W
  VARIANT 108: note = Ancestral polymorphism is G, Derived polymorphism is S
  VARIANT 96: note = Ancestral polymorphism is G, Derived polymorphism is R
  VARIANT 94: note = Ancestral polymorphism is G, Derived polymorphism is D
  VARIANT 83: note = Ancestral polymorphism is L, Derived polymorphism is P
  VARIANT 81: note = Ancestral polymorphism is V, Derived polymorphism is M
  VARIANT 77: note = Ancestral polymorphism is S, Derived polymorphism is L
  VARIANT 73: note = Ancestral polymorphism is G, Derived polymorphism is D
  VARIANT 68: note = Ancestral polymorphism is V, Derived polymorphism is M
  VARIANT 49: note = Ancestral polymorphism is G, Derived polymorphism is D
  VARIANT 47: note = Ancestral polymorphism is G, Derived polymorphism is R
  VARIANT 41: note = Ancestral polymorphism is G, Derived polymorphism is V
  VARIANT 36: note = Ancestral polymorphism is A, Derived polymorphism is T
  VARIANT 31: note = Ancestral polymorphism is S, Derived polymorphism is L
  VARIANT 28: note = Ancestral polymorphism is D, Derived polymorphism is G
  VARIANT 16: note = Ancestral polymorphism is P, Derived polymorphism is Q
  VARIANT 1: note = Ancestral polymorphism is M, Derived polymorphism is L
MTELFDTAVTSLLHLPEVLDRLATADGDRRSTGHHAAHDHGHGHVHGLGGGGGAPVDIVESPREYAFVLDVPGLSKSDIQVTLEEDRVLVMKGGSGKRKRDEEEDMNGEGCRYIRLERGAAPRSFVRKFRLPEDFVG

SEQ ID NO: 14612 - protein, 103 aa, Zea mays
  VARIANT 11..103: note = Derived polymorphism lacks residues 11 to 103
MTRMGKTTSQQKIISPAEEAVQKDREEKLAETLKNRLHITVQGNKAEFIQHAEAEAVQKDREEKLAETLKNRLHIYVQGNKAEFIQHAEAEVSKLRNAGFSHY

SEQ ID NO: 14613 - protein, 133 aa, Zea mays
  VARIANT 80: note = Ancestral polymorphism is A, Derived polymorphism is V
  VARIANT 69: note = Ancestral polymorphism is R, Derived polymorphism is C
MGGRAKCESMVAVERRLKEMGIPYVQRCVEEGGINVDQIFFHDPDAFMIEVCNCDNLPVVPLAAAADQRAPAVLGACKRAAAAVGVKQQQQQSSGGAVPSSAAPAAAAQRVPSAAQAPIVRVAEESTSHISCA

SEQ ID NO: 14614 - protein, 167 aa, Zea mays
  VARIANT 15: note = Ancestral polymorphism is P, Derived polymorphism is R
  VARIANT 69: note = Ancestral polymorphism is P, Derived polymorphism is S
  VARIANT 72: note = Ancestral polymorphism is N, Derived polymorphism is Y
  VARIANT 81: note = Ancestral polymorphism is R, Derived polymorphism is C
  VARIANT 108: note = Ancestral polymorphism is A, Derived polymorphism is S
  VARIANT 118: note = Ancestral polymorphism is G, Derived polymorphism is V
  VARIANT 120..167: note = Derived polymorphism lacks residues 120 to 167
  VARIANT 147: note = Ancestral polymorphism is C, Derived polymorphism is F
  VARIANT 152: note = Ancestral polymorphism is A, Derived polymorphism is V
MSIAKAIAIVMDRNPQLRQEGIAHEVLQWYLCRMEGWFATDADSISLQGWDQEVLLPGGHGLMVRGYRPVINTLAKGLDIRLNHKVLEIVRHRNRVEVTVSSGQTFVADTAVVTVPLGIWYGFFKEIDAKKKRGQVLRAPQYLKRVCYILKAVVWARRIRQELMTSG

SEQ ID NO: 14615 - protein, 251 aa, Zea mays
  VARIANT 180: note = Ancestral polymorphism is M, Derived polymorphism is I
MRALSRVGVGLAVVSALLLLALTAELYYIFVHKRRLRRRAAAISDASSSPSSSSRELLQLFCFKKPPALASTYAVPEAGDDADADDETVEAQLMRLGGVVGPTRLLFTIKEETREDLESEDGRGRSRSLGELMHCSETPPFLTPRASPSPAMDNSYNPLFESPAASPGPRPGPTVSPPPMFQFLKDAEEKLYRRALAEEAMRARRSPPPQQATSPAAGEEDGGYITIMVGKNSRVIIPVPSAPATGGGRHE

SEQ ID NO: 14616 - protein, 357 aa, Zea mays
  VARIANT 3..357: note = Derived polymorphism lacks residues 3 to 357
  VARIANT 180: note = Ancestral polymorphism is G, Derived polymorphism is D
  VARIANT 182: note = Ancestral polymorphism is G, Derived polymorphism is S
  VARIANT 232..357: note = Derived polymorphism lacks residues 232 to 357
  VARIANT 243: note = Ancestral polymorphism is R, Derived polymorphism is H
MGQCYARNVHGVDADDGGMEATTIMVSAAGGPEDAASVGGGQGGEGRRSARPSPAGKPRGGRAGATPERLSTAGSPWTGSPLDLPDGIAPSPATSVSMPRRFFRRPFAPPSPAKHIKASLARRLDHRSPPSASQVPRPPVEVPIPEQGASGAGEVERELDKSFGYDRHFAAKYELGKEVGRGHFGHTCLACPCKGDMRGQVMAVKVISTGVAIINFIFSLQNSPHSFVFLLQMTTAISIEDVRKEVKILKALSGHSNLVKFYDACEDALNVYIIMELCEGGELLDRILSRGGRYNEGDAKIIVEQILKVVAFCHLQGVVHRDLKPENFLFSTREDVKTILIQHFTLFTQIKASLTPP

SEQ ID NO: 14617 - protein, 202 aa, Zea mays
  VARIANT 156: note = Ancestral polymorphism is N, Derived polymorphism is I
  VARIANT 124..202: note = Ancestral polymorphism lacks residues 124 to 202
  VARIANT 116..202: note = Derived polymorphism lacks residues 116 to 202
MLPGPPSPSIGTRGDHPGFCRSRHETAHAILATLPAIPFIGAQWPPRWSPSLAPSNTALAPRLPINNLAKTSQPCTRYLAEPAKTTEHEDPDAYHSSASTCCLADARGDLPFPIPRGDTPPHAYPRSTEYCSHLVFERREQFLSKGDNKLHKLVFNVLFDGTKFEPEYHENCGNPDIDEKSPMSFEEMLQKVKPFVVAYEGI

SEQ ID NO: 14618 - protein, 981 aa, Zea mays
  VARIANT 99..981: note = Derived polymorphism lacks residues 99 to 981
  VARIANT 231..981: note = Derived polymorphism lacks residues 231 to 981
  VARIANT 340..981: note = Derived polymorphism lacks residues 340 to 981
  VARIANT 538..981: note = Derived polymorphism lacks residues 538 to 981
  VARIANT 575..981: note = Derived polymorphism lacks residues 575 to 981
  VARIANT 624..981: note = Derived polymorphism lacks residues 624 to 981
MELAVGASEATLKSLLSKLGALLAEEYALIRGVRGDIQFITDELASMQAFLSNLSKYEEGHDDQTEDWMKQIRDVAYDIEDCIDDFAHSLRPDPRGSGWVTAVRKILYEIRTWYPRRNIATQIVDLKNRAQHIGERRTRYGVRDPQPGKKKSNLGGATGYLAAENQDVTRQLVRAQQPVGVKDMPDLKKWIHEDGKREKTGVLSIVGFGGVGKTTIAMDLYTKYGPEFQRRAMVTVSQNSDPEAVVRNILNQVKPLSNNAERRGEDSSGAVSLGKKNPVIATILSRIRLPFPNQKQDNGGGRDKHEQIKKELKNCLADTRSRYLLLIDDVWSSSTWQSIWKYFPEENKKGSRIIVTTRFQAVATTCSAHKDQDHIHLVDVLSGEEANSLFIKTLSECRGNSARQSNQTKVPDRVWQMCGGLPLAIVTMAGVVASKPLMIRDEWIAVCNSLFPEPEKCHKPEEFMRIINYCYNDLPSDLKTCCLYLSIFPKGREVSRKRLIRRWIAEGFVSEKQGLSVEDVADTCFKQLIERKMMRPVEHNSNGSVKSCRVHDMVLEYIISKAAEENFITVVGSHWSMSTSSKKVRRLTIHGSDPKRAKNVDSMNLSHVRSLTVFENLDKLHFKSFKTGIVQVLDLEGCKGFRESDANVSDICEMILLKYLSLRKTDIKNLPNNISKLKYLETLDVRETEVKQLPTTVGQLERITNILGGDKRRQRTLKLPKELKGTMKSLRILSGVEIVEGSTAASDFSYFTTLRKLAIYRIHHNEDIFKNLLSSIQYLSGYSLQTLLIVDESSEFFKTLESMSPSHLTDLRALELSGKLLYLPKWLDTLQHLVKLTLSATALCTDNFLVIRKLNSLFSLTFSISEKQDPALAAILEKNKSASRGEIVVPAGGFSKLKLLRIFVPLLPSLTFSKNATPHLERIELRFKKLEGFHGVDELGKLQDVVLTVDGHASERTNSILDGLKQRLEGKCNLIVNKYHD

SEQ ID NO: 14619 - protein, 775 aa, Zea mays
  VARIANT 446..775: note = Derived polymorphism lacks residues 446 to 775
MAPKLPVLRRARSLPLLFLANFVVLQLQCSYGLPLQNEPRQIYIIYLGGRQSDDADLVTASHHDLLASVVGSKQEAVESIIYSYRHGFSGFAALLTKSQSTKIAGLPGVVSVTKNRVHHTRTTRSWDFVGLHYNDDQPNGLLAKAAKYGDDVIVGVIDSGFWPESPSYADHGYGPPPSRWKGVCQGGDDGSFGPNNCNRKVIGARWYAAGVSDDKERLKGEYMSPRDAEGHGTHTSSTAAGNVVGNVSFHGLAAGAARGGAPRARLAIYKACWGAPPLSGSCDDADVMKAMDDAVHDGVDVLSVSIGGPSETPGTLHVVASGVTVVYAAGNDGPVAQMVENSSPWLFTVAATTVDRMFPTAITLGNNQIVHGQSLYVGTQGREDHFHEVVPLVNSGCDPEYVNSSDVKGKIVFCITPDSLYPSATVTAVAQLVLDNGGKGFIFTGYNRDNIVRWEPVTSKMIPFILIDLEVAYHILQYCISTDGTPRAKISLAQTTFGTGVPAPKVAVFSSRGPSAVYPGVLKPDIAAPGVNILAAAPQIPYYKEQLGGVLYHFESGTSMATPHVSGIVALLKSLHPDWSPAALKSALMTTALTTDNNGIPIQADGNPVKIADAFDYGAGFVNPTKADDPGLIYDIQPSDYLRFFDCTGGLGTNDNCTAPRASVVDLNLPSIAIPSLKAPQTVTRTVTNVGRQTNAVYRAVLQPPPGVEMSVEPSVLVFDAKRKAQSFKVAFKATRRFQGDYTFGSLAWHDGGSHWVRIPVAVRIVIQDLYSTVS

SEQ ID NO: 14620 - protein, 207 aa, Zea mays
  VARIANT 191: note = Ancestral polymorphism is R, Derived polymorphism is G
  VARIANT 190: note = Ancestral polymorphism is M, Derived polymorphism is T
  VARIANT 187: note = Ancestral polymorphism is E, Derived polymorphism is D
  VARIANT 163: note = Ancestral polymorphism is P, Derived polymorphism is S
  VARIANT 150: note = Ancestral polymorphism is M, Derived polymorphism is I
  VARIANT 145: note = Ancestral polymorphism is S, Derived polymorphism is N
  VARIANT 119: note = Ancestral polymorphism is V, Derived polymorphism is I
  VARIANT 117: note = Ancestral polymorphism is H, Derived polymorphism is Y
  VARIANT 100: note = Ancestral polymorphism is D, Derived polymorphism is G
  VARIANT 60: note = Ancestral polymorphism is A, Derived polymorphism is V
  VARIANT 44: note = Ancestral polymorphism is E, Derived polymorphism is K
  VARIANT 41: note = Ancestral polymorphism is F, Derived polymorphism is S
  VARIANT 40: note = Ancestral polymorphism is T, Derived polymorphism is P
  VARIANT 23: note = Ancestral polymorphism is I, Derived polymorphism is T
MENLLASVDKNEAEISPSTLYAIACVTEGVSFINGSPQNTFVPEWQTKMKSVLVDFLVGARIKPTSIVSYNHLGNNNGMNLSAPQTFRSKEISKSNVVDDIVSSNAILYGPGEHPDHVVVIKYVPYVGDSKRAMDEYTSEIFMGSKNTIMLHNTCEDSLLTAPIILDLVPPGTPVVNALAKQRAMLENIMRACVGLAPENNMILEYK

SEQ ID NO: 14621 - protein, 315 aa, Zea mays
  VARIANT 21: note = Ancestral polymorphism is A, Derived polymorphism is T
  VARIANT 41: note = Ancestral polymorphism is E, Derived polymorphism is V
  VARIANT 235: note = Ancestral polymorphism is A, Derived polymorphism is V
MSFGRRSWQILALSMVLLSTAATAVSKRTGELTVFWGRNKEEGTLREACDTGLYNTVIISFYSVLGRGSYGVDLSGHPLDGVGTDIKRCQSKGIPVFLSIGSGGGGNGYSLSSSESAVAVADNLWNAYLGGGRSDVPRPFGDTVVDGIDFYIDNHQGAPDDLYDELARRLDGYNSQASVRKRVRLTATPRCALPQGRLETAMQTGLFERIHVRFYGDDECTHSNGAVDKHWDKWAARYPASQLYVGLAAAESGVPEGAAPPVEVYLKYLYYSLLPKVQSAPNYGGIMIWDRFSDKRTSYSGAVKGWASCSYAGCV

SEQ ID NO: 14622 - protein, 323 aa, Zea mays
  VARIANT 2: note = Ancestral polymorphism is A, Derived polymorphism is S
  VARIANT 169: note = Ancestral polymorphism is R, Derived polymorphism is P
MSSFGRNSWCILVLASVLLLSCLADTAVAKRTGELTVFWGRNKEEGTLREACDTGLYNTVIISFYSVFGHGRYALDLSGHPLDGVGADIKHCQSLGIPVFLSIGGGGNHYSIPSSASAEAVADNLWNAFLGGGNSDVPRPFGDAAVNGIDFYIDDHSAPGDHYDELARRLDYFNSMYYHATTKYVRLTATPRCAFPPDDPMARALRTGLFERIHVRFYGDADKCSYKNGDVSGVVDQWSKWTARYPKSQLYVGLAAAESGVPDHAPPPVEVYLKYLYYDLLPKVQKAPNYGGVMVWNRFTDNRTGYSGAVKGWAACSYAGCVN

SEQ ID NO: 14623 - protein, 709 aa, Zea mays
  VARIANT 672..709: note = Derived polymorphism lacks residues 672 to 709
MDSAPGPAPRSTPVCSSDNSGTVKAWVIVAVVGLFALHVLGSLRRRSSNSLLHATVMAVSTLSYSLVGYIVGEMRRSDFYYYDFAVWAVFVLLLLGSTDSLTACRLDDIDDWRSIYVKHLYKASLVVIVIVYTIGGNRDTKYLWWPLAAFLFVGVVKCYVRIASMRMVSKSYLCREVKVIAEYMQHKDNLLVPFDPVTMQGYSYIVDGEKYCVVAKKQPADGRTPWYRMNSNVTTVEQVWQCTGRLLHLGKRGKLLKDLCLSMALSKMLNRRFAGFELSESHLEKTHDLVFKGLLAGDDDAPHERAFRVIEEELAFIHDLYYTRYYYLHQKGRYMALCPPVVMFALCSWLTYVLIKNYNRSLNITVFITVVLAFLELYQLYLYIASGWFKVALILSYISTPSSQRNGCCLEMIIGRLVRLKAIQPWKDTLGQYCLLQDLGRRSSWFRDCCFHYATLGLMDKAPARKKKKGRKSSVKLSKNVKKAIAESLLGSNGYLTNGVTSLQNNGVHARLAWACDASSTQGSVTRTILVWHVATTLCWQLDDAAQAKDEEVATTTASTLSEYCMHLLAFAPRFLPDHSAISESILEQSVDEAGQLLKGAKNLEQRCKILMDSTTTNGGGAADEEAPLVVQGARLARHLMDGIQEPTLRWKVLSDFWAEMVLYVSPSDDARVHLEALARGGEFVTHLWALLTHAGVLKRGYTRPLDVV

SEQ ID NO: 14624 - protein, 99 aa, Zea mays
  VARIANT 68: note = Ancestral polymorphism is V, Derived polymorphism is L
  VARIANT 28: note = Ancestral polymorphism is A, Derived polymorphism is G
MAWRASLSRSLKEIRVLFCQSSPASAAAREFVKKNYGDIKARNPSLPFLVRECSGVQPQLWARYDMGVERCVNLDGLTEAQIDKKLEELAKAGESLKTK

SEQ ID NO: 14625 - protein, 106 aa, Zea mays
  VARIANT 20: note = Ancestral polymorphism is V, Derived polymorphism is I
MRCFKILLLVSLIPLVLRGVSLLGNVIPAPSPRGQPSSSSPRTNGAATVPSPLSSASSRVGVGRGRAQLPAAAVAQRRFGGDGGGGGFFRDDKRFSPTGSNPLHNL

SEQ ID NO: 14626 - protein, 151 aa, Zea mays
  VARIANT 28: note = Ancestral polymorphism is V, Derived polymorphism is I
  VARIANT 42: note = Ancestral polymorphism is R, Derived polymorphism is C
  VARIANT 55: note = Ancestral polymorphism is S, Derived polymorphism is F
  VARIANT 61: note = Ancestral polymorphism is T, Derived polymorphism is M
  VARIANT 74: note = Ancestral polymorphism is Q, Derived polymorphism is E
  VARIANT 78: note = Ancestral polymorphism is A, Derived polymorphism is T
  VARIANT 86: note = Ancestral polymorphism is H, Derived polymorphism is R
  VARIANT 88: note = Ancestral polymorphism is D, Derived polymorphism is N
  VARIANT 94: note = Ancestral polymorphism is L, Derived polymorphism is Q
MTVVAVESDEPRTESSLERGTIIYNLLVTLPFPSGLISRLRRAFLLYRFTNDLVSRSSLHMLQLLVLLHVSASQNATAHNDVHVMRTDIKEQKQRWPFILYGASRIHLLQKHHKSCLGHYTRASHSATWHSQSEVLEERQIQLPAYLVSGR

SEQ ID NO: 14627 - protein, 977 aa, Zea mays
  VARIANT 546..977: note = Derived polymorphism lacks residues 546 to 977
MAIKQSISFTLRVLADLSLLLFCVLLAPVCSATPATAPAVLLQVKSGLTDPGGVLSGWSLEADVCSWHGITCLPGEVSPGIVTGLNLSGHGLSGVIPPAMSGLVSIESIDLSSNSLTGPIPPELGALENLRTLLLFSNSLTGTIPPELGLLKNLKVLRIGDNGLHGEIPPHLGNCSELETLGLAYCHLNGTIPAELGNLKLLQKLALDNNALTGGIPEQIAGCVSLRFLSVSDNMLQGNIPSFVGSFSDLQSLNLANNQFSGGIPAEIGNLSSLTYLNLLGNSLTGSIPAELNRLGQLQVLDLSVNNISGKVSISAAQLKNLKYLVLSGNLLDGAIPEDLCAGDSSSLLENLFLAGNNLEGGIQALLSCTALQSIDVSNNSFTGVIPPGIDRLPGLINLALHNNSFTGALPSQIGSLGNLEVLSLFHNGLTGGIPPEIGRLQKLKLLFLYENQMSGTIPDELTNCTSLEEVDFFGNHFHGPIPERIGNLRNLTVLQLRQNDLSGPIPASLGECRSLQALALADNRLTGSLPETFGQLAELSVITLYNNSLAGPLPESLFQLKNLTVINFSHNQFTDSIVPLLGSTSLAVLALTDNSFSGVIPAVVARSRNMVRLQLGGNRLTGAIPAELGNLTRLSMLDLSLNKLSSDIPAELSNCVQLAHLKLDGNSLTGTVSAWLGSLRSLGELDLSWNALTGGIPPELGNCSDLLKLSLSDNHLTGSIPPEIGRLTSLNVLNLNKNSLTGAIPPALHQCDKLYELRLSENSLEGPIPPELGQLSELQVILDLSRNRLSGEIPASLGGLVKLERLNLSSNRLDGQIPSSLLQLTSLHRLNLSGNHLSGAVPAGLSGFPAASFVGNELCAAPLQPCGPRSPATARRLSGTEVVMIVAGIALVSAVVCVALLYTMLRVWSNWRAVSVSNSDGEESAHGGGGGKWVDGKYRKVGSSVSWSSEQKHNSGSETTSVLHGKSTEAAGAGKS

SEQ ID NO: 14628 - protein, 381 aa, Zea mays
  VARIANT 77..381: note = Derived polymorphism lacks residues 77 to 381
  VARIANT 79: note = Ancestral polymorphism is G, Derived polymorphism is D
  VARIANT 89: note = Ancestral polymorphism is C, Derived polymorphism is F
MSSSPSPANRRPRGPLALGLESSANKIGIGVVSLSGDILSNPRHTYVTPPGHGFLPRETAQHHLAHLLPLLRAALAESGVAPADLACVCYTKGPGMGGPLQVAAAAARALSLLWRKPLVAVNHCVAHIEMGRAVTGAVDPVVLYVSGGNTQVIAYSEGRYRIFGETIDIAVGNCLDRFARVLELSNDPSPGYNIEQLAKKGEKFIDVPYVVKGMDVSFSGILSFIEAAAIEKLKNNECTPADLCYSLQETIFAMLVEITERAMAHCDSKDVLIVGGVGCNERLQEMMKIMCSERGGRLFATDDRYCIDNGAMIAYTGLLAYAHGMTTPLEESTFTQRFRTDEVHAIWREKEMPVLNNTHSDAIAEVSKDEASMATPIVIDY

SEQ ID NO: 14629 - protein, 101 aa, Zea mays
  VARIANT 30: note = Ancestral polymorphism is A, Derived polymorphism is T
MTKPSQVLLAALAAWAVVLLLLCAAAPRGADAATACDATQLTPCAGAIIIGRSPSAACCSRLKEQQPCLCTYARDPNLQRYVNSPNGKKAMAACKVPVPSC

SEQ ID NO: 14630 - protein, 293 aa, Zea mays
  VARIANT 220: note = Ancestral polymorphism is T, Derived polymorphism is I
  VARIANT 243: note = Ancestral polymorphism is T, Derived polymorphism is S
MAMATAKLVLLMVLVAGSSSGGSAWGPLMSRLRMPTARSPVEVAKERLQEDYVVSAAAPLIHALRPLLGSAGDLGRRAGVPCDSWRLAVETYNKRDWTTVPASCERYVGHYMLGGHYRRDSRVVIDEAIAYAEGLKLGGNGKEVWVFDIDETSLSNLPYYATHGFGTKLYNATSFNEYVLEGSAPVLPETQRLFKKLVSLGIKPVFLTGRTEDQRAITVTNLRRQGYSGWMTLLLKPVGLKATAIAYKSGERQKLQDAGYVIVGNIGDQWSDILGAPEGARTFKLPDPLYYIG

SEQ ID NO: 14631 - protein, 276 aa, Zea mays
  VARIANT 38: note = Ancestral polymorphism is P, Derived polymorphism is L
MIPMMAKKHLAAVVLAILLALAAGATGMRASEIDDGMPLIHMLRPLLHSGGDLGRRGRVPCDSWRFAVETNTLRDWDTVPARCEKYVGNYMLGGHYRSDSRAVANEAIAYAEGLNLTGQGKEVWVFDVDETTLSNLPYYAKHGFGERRRVEPYNWSTFGAYVKEANAPVLPETQRLYKRLQALGIKPVILTGRREDKREATANNLAAAGYTGYLKLLLKPQNVKVSSIEFKSGERKKLQDAGYVIVGNIGDQWTDLLGEPEGGRTFKLPDPMYYIG

SEQ ID NO: 14632 - protein, 441 aa, Zea mays
  VARIANT 84: note = Ancestral polymorphism is A, Derived polymorphism is E
MTRRWPPFSARVAAAVFLLLLSPAATSQLGLGPAIAAWINGSPPPSPDAAAAAAAAASGPRSQEYAALQALKVAVTDDPKGALASWQGANVCAYKGVYCSAPPDGAAAAGASTVVAGIDLNRANLRGTLPDAVSLLAHLTFLHLNSNRLGGAVPDTLRDLQYLTELDLSNNLFSGPFPASTLLIPSLVYLDLRFNAFSGEVPPEVFAKELDAVFLNDNQFEGQIPDTLWASPATVITLANNHFTGAVPAAYEFGAGAGAGAGGRVREVLFLNNNLTGCVPEALGFLPSMQVLDLSYNALSGHLPGTLSCLSGIEVLNLAHNQLTGELPDLLCDLRRITNLSVSFNFFSGISQRCDRQLGSRGVFDFVGNCVPGRDMQRPQPECDEFPGEGGLSCLRIPGARPAGCGDAGVTIGVGVGVGIGGLPFGLPGAAAGGVVTVTVP

SEQ ID NO: 14633 - protein, 126 aa, Zea mays
  VARIANT 18: note = Ancestral polymorphism is P, Derived polymorphism is T
MHDFCLHEGPVNCLDVHPYEFLLATGSVDKTVKFWDLGTFELISSSGPELMIGFSDIMERLHKDGILSRASKDGYTVNQILWRGYIKMVYYQGQAKMVIQLIRSAPSEQNNSRDICYTNGYMSQWD

SEQ ID NO: 14634 - protein, 128 aa, Zea mays
  VARIANT 97..128: note = Derived polymorphism lacks residues 97 to 128
  VARIANT 89: note = Ancestral polymorphism is A, Derived polymorphism is T
  VARIANT 71: note = Ancestral polymorphism is A, Derived polymorphism is V
  VARIANT 54: note = Ancestral polymorphism is A, Derived polymorphism is V
  VARIANT 44..128: note = Derived polymorphism lacks residues 44 to 128
MVASASVASPTSHRCFDEEVLEGIRRAVVDSAYEVISLKGYTSWAIGYSVASLAASLLCDQRRIHPVSVLARGFHDIPDGNDVFLSLPARLGRVGIQGVTEMELTEEEAKRLRRSAKTIWENCQLLGL

SEQ ID NO: 14635 - protein, 247 aa, Zea mays
  VARIANT 64: note = Ancestral polymorphism is P, Derived polymorphism is S
MAWNGRFGDDEEGSGLELSLSLPGYFSGSPTQAAAGFEDKADGGSAAAAAAGRAKGSNGFKARPAAAAPVVGWPPVRAFRRNLASASSKPSRDPPPSHRGNESASVGAGGKAVEGGNKGLFVKVNMDGVPIGRKLDLGGHAGYDTLTAAVDHLFRGLLSAQTSGPGGERQAVAGILNGGGEYTLVYEDDEGDQMLVGDVPWQMFAATARRLRVLRSSDLNPSSVTKGSDQEESCSLVLRWRTLESQL

SEQ ID NO: 14636 - protein, 570 aa, Zea mays
  VARIANT 359: note = Ancestral polymorphism is A, Derived polymorphism is V
MAGGGVEDVYGEDRATEEQLITPWAFSVASGYTLLRDPRHNKGLAFSEAERDAHYLRGLLPPALASQELQEKKLMQNLRRYEQPLHRYIAMMDLQERNERLFYKLLIDNVEELLPVVYTPTVGEACQKYGSIYRRPQGLYISLRDKGKILEVLKNWPERSIQVIVVTDGERILGLGDLGCQGMGIPVGKLSLYTALGGVRPSACLPITIDVGTNNEALLKDEFYIGLRQRRATGEEYHELLEEFMTAVKQNYGEKVLTQFEDFANHNAFDLLEKYRESHLVFNDDIQGTASVVLAGLLAALKVVGGTLADHTYLFLGAGEAGTGIAELIALEMSKHTGSPIEECRPKIWLMDSKGLIVASRKDSLQAFKKPWAHEHEPVATLLEAVQSLKPTVLIGTSGKGGTFTKEVVEAMASQNEKPVIFALSNPTSHSECTAEQAYTWTKGRAVFASGSPFDSVELDGKVLVPGQSNNAYIFPGFGLGVVISGAIRVRDDMLLAASEALAEQVTEEHFAKGLIFPPFTNIRAISARIAAKVAAKAYELGLASRLPRPDDLVKYAESCMYTPIYRSYR

SEQ ID NO: 14637 - protein, 178 aa, Zea mays
  VARIANT 129: note = Ancestral polymorphism is R, Derived polymorphism is W
MDLRRQTISMKKSLFDQGYLDEQFSQLEELQDDSSPNFVEEVVALFFKDSSRLMANIEQALEKYPLDFYRLDSLVHQFKGSGSSIGALRMKNECSMLKAHCNGRNLEGYRVHLTTLPISLSFFACIERRCISFHGSLRCRRSLQKMKREHATLKQKLETYFQLLRQVGPPERAVNSWK

SEQ ID NO: 14638 - protein, 59 aa, Zea mays
  VARIANT 19: note = Ancestral polymorphism is T, Derived polymorphism is I
  VARIANT 12: note = Ancestral polymorphism is K, Derived polymorphism is E
MRDLVFVKFNSKLRGKERIGIDPLEREVDDAIGYDENEFITGIVLLPNDVVEPTQDRRS

SEQ ID NO: 14639 - protein, 137 aa, Zea mays
  VARIANT 37: note = Ancestral polymorphism is L, Derived polymorphism is M
MASGAGAAAAVAVFAIMVLSSLGHPRTGPLCSDCGSMCTANCTGEVATSCRSYCENPLAARQSCERQVLQACTVSFCCYGNCTRDCNLEAHNACQSVHDTTIDCQSCTGGIFQSCFPACNSNCNSTCVNKEHGCLRT

SEQ ID NO: 14640 - protein, 267 aa, Zea mays
  VARIANT 224: note = Ancestral polymorphism is A, Derived polymorphism is T
  VARIANT 222: note = Ancestral polymorphism is Q, Derived polymorphism is P
  VARIANT 132: note = Ancestral polymorphism is D, Derived polymorphism is V
  VARIANT 60..267: note = Derived polymorphism lacks residues 60 to 267
MNARVLGNEDGETVVLAHGYGGTRFVWDDVVPALAARFRVVVFDWSFSGAVAASGGGERYCSSYYALADELVALMDELGVRQAAFVGHSMAGMIGCIASVARRDLFSHLVLVGASPRYINEDGYEGGFERGDVDAMLAAVDEDFAAWVPCFAEVVVGPDHPGAVSKFAKQLGAMRPDAALRVLRSVLTSDFRGVLPDVAARCTIVHCTHDAVAPLAVARYMQRALAGCGGVGADTVVIESSGHFPQLTAPKEFVRVLEAILLDRESN

SEQ ID NO: 14641 - protein, 422 aa, Zea mays
  VARIANT 113: note = Ancestral polymorphism is L, Derived polymorphism is V
  VARIANT 101: note = Ancestral polymorphism is A, Derived polymorphism is P
  VARIANT 92: note = Ancestral polymorphism is D, Derived polymorphism is V
  VARIANT 91: note = Ancestral polymorphism is V, Derived polymorphism is G
  VARIANT 36: note = Ancestral polymorphism is C, Derived polymorphism is Y
  VARIANT 21: note = Ancestral polymorphism is H, Derived polymorphism is Q
MAAKHYQQHHFLIVTYPAQGHITPARHLARRLGSVCRGARVTICAPLSAFRKMFPGAAGVTVTEEECGDGDAKVKYVAYSDGYDGGFDIAVDSYARYMEQARMAGSRSLAGVLRRLRDDGRPVTCAVYTLLLPWVAGVARDHGVAATAVFWIQPATALTAYYHYFRGHRDAVVAAAASGDPCAEVGLPGLPPLRVRDLPSFLAVTSEDDPFAFVLPEFGELVDALERDDGSSEHPTYVLANTCDAMEPDALASLRPHVDVFPVKRPFLLVLRKDSRKGHDDDAVAAADADSAGGMVVEWCDQARVLSHPAVACFVTHCGWNSTLESAACGVPTVAVPQYSDQGTAAWLVAERMGTGVRAAARADGVVEAQELRRCVEAAASGAVAARAAAWKRKAWAAVADGGSSHRNLTEFLRQIGHGRGD

SEQ ID NO: 14642 - protein, 112 aa, Zea mays
  VARIANT 42: note = Ancestral polymorphism is P, Derived polymorphism is H
  VARIANT 58: note = Ancestral polymorphism is G, Derived polymorphism is C
MLNKSGFTWDPTKKMIQCEKQEYETHCKNNPDAKGLYGVSFHYYDELSMVYSMDMAIGEGVEDMTDAVKNLEEELVHVNVNDEKDGEDMTFVETPRRFIDSTSSSSKKRKKD

SEQ ID NO: 14643 - protein, 127 aa, Zea mays
  VARIANT 103: note = Ancestral polymorphism is Q, Derived polymorphism is K
  VARIANT 99: note = Ancestral polymorphism is G, Derived polymorphism is R
  VARIANT 97: note = Ancestral polymorphism is R, Derived polymorphism is Q
  VARIANT 77..127: note = Derived polymorphism lacks residues 77 to 127
  VARIANT 38: note = Ancestral polymorphism is N, Derived polymorphism is S
  VARIANT 1: note = Ancestral polymorphism is M, Derived polymorphism is V
MEETKTDMVVVVVLMAQRTSLLSNRYMSFGTVAWVDVNEYETLQPDKIAMDGGEQNLKELNSMFSKPVKEHLSTDEGEVDDLAVISMDSKGIDIRVQQGAQVQLSEKGAGALTTLAKVSTIMTSEKS

SEQ ID NO: 14644 - protein, 328 aa, Zea mays
  VARIANT 78..328: note = Derived polymorphism lacks residues 78 to 328
  VARIANT 72..328: note = Derived polymorphism lacks residues 72 to 328
MLLKRVAADDGSGAGAGAGVGRPRLFAMPRLLVGLEAPRCGAPDCDSPMTARSPTSPLDLRPFASLLRSPRSPRTRSWDSHRLGLGGLVDDTLAEPVACARSRLLGLGPQARQPFKLPQRLAKPLATQPRDCSHASSELGNVGTAAGCKPLPCSRSYGDVKSGPEVTVPGGAPPGASSHPADVGKFPAPGSLPVSIGGPRWYIGSVSATEVEQSEDYTCIIAHGPNPKTTRIFGDCILEPCTPSVSDGDGMDAMEVKEGAESYCGVRAFCRGNWRNQEVLAEQEDNIPAVSFSSAGSSSSFNDEVVMAEMVVVAAPVDVHYPESGKPG

SEQ ID NO: 14645 - protein, 108 aa, Zea mays
  VARIANT 81: note = Ancestral polymorphism is R, Derived polymorphism is Q
MAHSPSGSHVAATSVGNEAFTDAVAEDGGDSKLSALLFDVSQQVQDGLQSMLKTSSEIARCDGEIDAELERARDAVAENARALHDERERVQKAALAALDILSGGRCVI

SEQ ID NO: 14646 - protein, 197 aa, Zea mays
  VARIANT 90: note = Ancestral polymorphism is N, Derived polymorphism is K
MVGLVGGSTARAEHVVANAGGETEYVRRLHRHAPAEHQCTSTLVKHIKAPVHLVWELVRSFDQPQRYKPFVRNCVVRGDQLEVGSLRDVNVKTGLPATTSTERLEQLDDDLHILGVKFVGGDHRLQNYSSIITVHPESIDGRPGTLVIESFVVDVPDGNTKDETCYFVEAVIKCNLKSLAEVSEQLAVESPTSPIDQ

SEQ ID NO: 14647 - protein, 232 aa, Zea mays
  VARIANT 24: note = Ancestral polymorphism is A, Derived polymorphism is G
MAPKRRRADQGSSVPAPPPPLRKAKLQPVVIFAHGAGAPSSSDWMVHWKKMVQDALDAVAVVTFDYPYMSGGKRRAPPKAEKLVDHHLGIVKDAAVKYQGHPLILMGKSMGSRVSCMVASSTEVDVSAVVCLGYPLKGVNGAVRDETLLQLKVPTMFVQGSKDALCPLDKLLSTQKKMTCKNELHIIDGGDHSFKVGKKYLESKGLNQYDLEMEAVTKISQFFQDSFTESCT

SEQ ID NO: 14648 - protein, 476 aa, Zea mays
  VARIANT 168: note = Ancestral polymorphism is R, Derived polymorphism is W
  VARIANT 157: note = Ancestral polymorphism is P, Derived polymorphism is L
  VARIANT 71: note = Ancestral polymorphism is V, Derived polymorphism is I
  VARIANT 31: note = Ancestral polymorphism is A, Derived polymorphism is G
MGPACKTAARPRVLLLCSPCMGHLIPFAELARRLVADHGLSTTLLFASATSPPSEQYLAVAAAVPDAVDLIALPAPPPDALPPATAARERAELAVASNVPRVREIARELGAAAPLVALVVDMVGAAAARDVAAELGVPFYAFFTSPWMTLSLLLRLPEIDAARAGEHRDAAEPIRLPGCVPIHAHELPTSMLADRSSSAYAGFLSMAKGVAGVDGVLVNTFRELEPAVGGDGRLQLPVYPVGPLVWTRPAGVDTDHECMSWLDGQPRGSVAYVSFGSGGTITWQQTAELALGLELSQCRFIWAIKRPHQSSTIAAFFGTQRGDEHSPLDFLPEGFMERTRGMGLVAQSWAPQTAILGHPSIGCFVTHCGWNSVLESVINGVPMVAWPLYAEQNMNAAMMEVQVGVALRAKVGADRFIRKDEVANAIRRAIVGEEAERLRKRSSELRRQSAQALSKDGCSTRALAQIANAWKCASRK

SEQ ID NO: 14649 - protein, 341 aa, Zea mays
  VARIANT 274..341: note = Derived polymorphism lacks residues 274 to 341
MAATYQTGLVAEPQLLNTEIITRRATYFVADTNRKDKCVGYLDVFVHQARDIHNVCVYHKQDVNAKLCLTSSPDILCSTKVISHAGRNPVFEESLRLDVQTVDASFKCEIWMLSRVRNYLEDQLLGFALVPLVDIVIGNGKLVQEFSLTSTDICCPHLITQKSPSTVDDSGNDHVVPAQLEKIVFPDLNVEKEDEIMVSKYLEMTSNSETPIKVENDMSLHSTNDDDVPSKLEKIKFIDSGRTSVACDRSATRAEAALALAELCGNAGKAGLRQEAVVADAVSRLVWRLEAKPAGERDATARELAAVLGASGGCHKAFRKDECGVVNAVQLLDPSAPGVET

SEQ ID NO: 14650 - protein, 333 aa, Zea mays
  VARIANT 46: note = Ancestral polymorphism is A, Derived polymorphism is V
MVVLTKGELEQIALPAVQRASPPPPAAVPEVDLAAGDAAAAARAVAKACEDHGFFKVTGHGVPPHLLARLEAAAAAFFALPQREKDRAAGCPFGYASKRIGANGDLGWVEYLLLAVTAAGAAAAPGSACEGAEPSCFRAVLDEYVAAVRRMTCTVLQLMAQGLGLDDRDVFSRLVLDRDSDSMLRVNHYPPAAETRRLTGFGEHTDPQIISVLRSNDASGLEITLRDGTWVSVPSDTESFFVNVGDALQVLTNGRFRSVRHRVMVSSARPRVSVIFFGGPPPRERLAPLPGLVDREGGRRRYREFTWREYKNSAYRTKLADNRLCSFETMATS

SEQ ID NO: 14651 - protein, 308 aa, Zea mays
  VARIANT 213..308: note = Derived polymorphism lacks residues 213 to 308
MADAKQQQQQPQQAAAAATGVWKTVKPFVNGGASGMLATCVIQPIDMVKVRIQLGEGSAGQVTRNMLANEGVRSFYKGLSAGLLRQATYTTARLGSFRVLTNKAVEKNEGKPLPLIQKAFIGLTAGAIGACFGSPADLALIRMQADSTLPAAQRRNYKNAFHALYRISADEGVLALWKGAGPTVVRAMALNMGMLASYDQSVELFRDKFGAGEISTVVGASAVSGFFASACSLPFDYVKTQIQKMQPDANGKYPYTGSLDCAVKTFKSGGPFKFYTGFPVYCVRIAPHVMMTWIFLNQIQKFEKKIGI

SEQ ID NO: 14652 - protein, 87 aa, Zea mays
  VARIANT 62: note = Ancestral polymorphism is R, Derived polymorphism is G
MAPSHDRQHAQTDHQAAAHAKERESLPSPSSQQLTRDTAPSTTPPPAPPASNTEVAVAVAKGGEAMAQSAADGSVPSPGIGHHKMLQ

SEQ ID NO: 14653 - protein, 478 aa, Zea mays
  VARIANT 36..478: note = Derived polymorphism lacks residues 36 to 478
  VARIANT 73..478: note = Derived polymorphism lacks residues 73 to 478
  VARIANT 231..478: note = Derived polymorphism lacks residues 231 to 478
  VARIANT 233..478: note = Derived polymorphism lacks residues 233 to 478
  VARIANT 259: note = Ancestral polymorphism is D, Derived polymorphism is Y
MPDLHPPEHQVAGHRASASKLGPLIDGSGLFYKPLQAGDRGEHEVAFYEAFSAHAAVPARIRDTFFPRFHGTRLLPTEAQPGEPHPHLVLDDLLAGFEAPCVADIKIGAITWPPSSPEPYIAKYLAKDRGTTSVLLGFRVLRPSRRPRGRRVADGAPGGEGYGHRRRPPRAPALRVIRLPTRGWTARSRRRCTEEKVESCHSCASSRHGWRSRLCSTSTRRRFFWAMMLLQSQQAEVGVGDSLDAAFGSFLREDPDIFDLITKEALSAAKKESSSEDEDDSSEESSDDEPTKVEEKKAPKVSENIGSEDESSEDESDKDSEEPQACHHLTPQARHHFCFTTQKGAAAGSVHEVKDALKNMFPSEKEIVVKSQILAGGRGLGTFKSGLQSGVHIVKAEEAELIASKMLGQILITKQTGPEGKIVSKVYLCEKLSLTNEMYFAITLDRKTAGPSNSLLLAAGEENTIVDLNVQRMASDDA

SEQ ID NO: 14654 - protein, 171 aa, Zea mays
  VARIANT 35: note = Ancestral polymorphism is A, Derived polymorphism is S
  VARIANT 38: note = Ancestral polymorphism is K, Derived polymorphism is M
  VARIANT 56..171: note = Derived polymorphism lacks residues 56 to 171
  VARIANT 62: note = Ancestral polymorphism is R, Derived polymorphism is S
MVKYSTEPSNPTKSAKAMGRDLRVHFKNTRETAFALRKLSLTKAKSYLEDVIAHKQAIPFRRYCGGVGRTAQAKSRHSNGQGRWPVKSAKFILDLLKNAESNAEVKGLDVDTLYVSHIQVNQAQKQRRRTYRAHGRINPYMSSPCHIELILSEKEEPVKKEAESQIATRKA

SEQ ID NO: 14655 - protein, 147 aa, Zea mays
  VARIANT 103: note = Ancestral polymorphism is Q, Derived polymorphism is L
  VARIANT 55: note = Ancestral polymorphism is A, Derived polymorphism is P
  VARIANT 54: note = Ancestral polymorphism is V, Derived polymorphism is D
MEATVDHLSAAYDDFMAAAAAVVEARVQSGGEKKTAATDAALEAFKQRWEIFRVACDHAEELVESIRQRIGSECLVDEATGSASAGSVAAPGIKPISAVRLEQMSKAVRWLVIELQHGASAQGTGGSGGAATPNAGAGGQHPEEGAQ

SEQ ID NO: 14656 - protein, 243 aa, Zea mays
  VARIANT 132: note = Ancestral polymorphism is G, Derived polymorphism is V
  VARIANT 157..243: note = Derived polymorphism lacks residues 157 to 243
MALATNSAAAAAAVSGGAASQPRRAAAFLPLKRRTISAIHAADPSKNNGPVVPAAAGAKSSSSAVATPEKKPAAPGKWAVDSWRSKKALQLPEYPNAEELDAVLKTIEMFPPVVFAGEARHLEERMAEAAMGGAFMGVVLMFGGQVPVVKVGRMAGQFAKPRSEPFEEKDSVKLPSYRGGNVNGDDFTEKSRVSDPQRMIRAYAQSVATLNLLRAFATGGYAAMQRFTQWNLDFMDHHEQGDR

SEQ ID NO: 14657 - protein, 355 aa, Zea mays
  VARIANT 114: note = Ancestral polymorphism is I, Derived polymorphism is T
  VARIANT 36: note = Ancestral polymorphism is D, Derived polymorphism is Y
MSSASEQEVSSAAPPQRKWVALISIAAVLGNEDDRYKEVVIGTDVLLHLDEPPHTSFVAVRHRVSPYPRLTDDETRYAYILAADRSACILLQVVEGNHWDLFLCDTYKRAVSIIPPMSSEGLGFSPHHTIGLIADPHNRGHYEVVQLQSSTSDNQPNRLICYSTAKGYWFIRGLTLQQARMRNPFYDTTVLAHDGRLWWFAQANGVLFCDPCTPLLEPPQLRFLPLPADCELDGYVTFDPRVGALMEQRRCLRPSEGKLRFVEIHGLSYNVFDDVDPDNINATLWMWTLDEPEDPDPWTFEYEVAFAEIWDDNTYADAGLLPGKVPHVALVDPNDHHVVYFLQGSKIFGLNAHNV

SEQ ID NO: 14658 - protein, 400 aa, Zea mays
  VARIANT 205: note = Ancestral polymorphism is Y, Derived polymorphism is C
  VARIANT 113: note = Ancestral polymorphism is F, Derived polymorphism is I
  VARIANT 80: note = Ancestral polymorphism is S, Derived polymorphism is A
  VARIANT 2: note = Ancestral polymorphism is S, Derived polymorphism is L
MLKQEPKSEPQRKWVALVSIPVLLGHEDEWDQEVVIGTDVLLDLNVPPHPSYLVLRHRVGPDSRRTDEPRSAHILAADRAACILLQVVEGNRWDLFLCDTYKRAVTILPPVPIYIQSKSSEGLAISPHLSIGLIADPHNRGHYEVVQLQSSTSDDQPNRLLCYSTAKSWWFTRDLTLQQACLRNPFSETGVLAHDGRLWWLALAYGVFFCDPCTPLLEPPELRFIPLPADCELDDYVTFDPRIDQRRCVRPSEGKLRFVEIRGLSYNEFVDVAPAAKPTIWMWTLDDPEGPNPWRFEYEVAFAEIWHSKAYADVGLQPGEVPHVALVDPNDHHVVYLFQGSKIFGLNVRKKVILACKECLIDRDQQMFPSSRPIIDAWELPDDVAMTTLHKIVLLLEIST

SEQ ID NO: 14659 - protein, 248 aa, Zea mays
  VARIANT 25: note = Ancestral polymorphism is L, Derived polymorphism is V
  VARIANT 55: note = Ancestral polymorphism is G, Derived polymorphism is R
  VARIANT 163: note = Ancestral polymorphism is A, Derived polymorphism is T
MDLATTPARRAMEPGVARRVWHVVLAVCHMLRRGLSPKRIMMDVHLLLGRGKLAGRTLRGHLAHPSSHHRHGHGHGHLTTYGGGASRASSSSSSSTLASFYGHPREVEFSCTTTPSYPQQHYGLFPFKGLRGRGGARCGGEYGGLDAAAVARAFEMLSAEVDTGGGGTPAVAATTATPSPMLAWILGRSPAGVRPLRVTDSPFPAVPEDGCCNDRVDADADDFIRKFYEQLRLQPTAATPDAYLRRRG

SEQ ID NO: 14660 - protein, 607 aa, Zea mays
  VARIANT 58: note = Ancestral polymorphism is R, Derived polymorphism is C
  VARIANT 518: note = Ancestral polymorphism is R, Derived polymorphism is W
MDDGDSVVRSVEKAGAGPGDDGSTTPLPETVQIGNSPSYRIDRKLGKGGFGQVYVGRRISSPSVSDRTPGANALEVAIKFEHRTSKGCNYGAPYEWQVYNTLSGIHGVPRVHYKGKLGEYYIMIMDMLGPSLWDVWNNNSHSMPVEMVACIAIEAISILEKMHSKGYVHGDVKPENFLLGPPGTLQEKKLFLVDLGLATRWKDTGTGEHVEYDQRPDVFRGTVRYASVHAHLGRTGSRRDDLESLAYTLVFLLRGRLPWQGYQGENKGFLVCKKKMATSPESLCCFCPQPFRQFIEYVVNLKFDEEPNYAKYISLFDGIVGPNPDIRPINTDGAQKLVFQVGQKRGRLTMEEDDDEQPKKKIRMGMPATQWISVYNARRPMKQRYHYNVADCRLAQHISKGNEDGLFISSVASCSNLWALIMDAGTGFTSQVYELSPYFLHKEWIMEQWEKNFYITALAGANNGSSLVVMSRGTQYAQQSYKVSDSFPFKWINKKWKEGFYVTAMATAGSRWAVVMSRNSGFSAQVVELDFLYPSEGIHRRWDNGFRITATAATWDQAAFILSIPKRKPADETQETLRTSAFPSQHVKDKWGKNLYLASICYGRTVS

SEQ ID NO: 14661 - protein, 522 aa, Zea mays
  VARIANT 380: note = Ancestral polymorphism is F, Derived polymorphism is S
  VARIANT 342: note = Ancestral polymorphism is L, Derived polymorphism is I
  VARIANT 166: note = Ancestral polymorphism is S, Derived polymorphism is L
  VARIANT 155: note = Ancestral polymorphism is R, Derived polymorphism is G
  VARIANT 154: note = Ancestral polymorphism is R, Derived polymorphism is C
  VARIANT 93: note = Ancestral polymorphism is V, Derived polymorphism is A
  VARIANT 17: note = Ancestral polymorphism is G, Derived polymorphism is A
  VARIANT 12: note = Ancestral polymorphism is P, Derived polymorphism is A
MCPIRGGGCSWPASVVGSATAALLLAAVIVRLFVPRACSSGIIKGRRQVGAGAAGGARLPAGSLGWPLLGETLAFIRAAYSPRPESFVEKRRVLYGKVFKSHLWGSPAVVSSDPEVSRAVLQADASAFVPWYPRSLMELMGQSSILVLGGGLQRRVHGLAGAFFKSPQLKAQVTLDMQRRVGRAMDMWGRRRHRSMGDDSGGMPVRVQNEAKSIVFEILVRALIGLEEGDKMQYLRQQFQEFIAGLISLPVKLPGTQLYRSLKAKKRMTKLIKTIIQEKRKKMMSEGDDLRGGTHPRDMIDVLLGNGNDELTDELISDNMIDFMIPAEDSVPVLITLAVKYLSECPQALQQLEEENMELKRQKSGAGETLEWTDYMSLAFTQHVITETLRMGNIINGIMRKAVRDVEVRGHLVPKGWRVLVYFRAVHLDAAVHDDPHAFNPWRWKERPDVVAMSGGGGGGFTPFGGGQRLCPGLDLARLEASIFLHHLVTNFRWVAEEDTVVNFPTVRLKRGMPIAVTPRTC

SEQ ID NO: 14662 - protein, 102 aa, Zea mays
  VARIANT 94..102: note = Derived polymorphism lacks residues 94 to 102
  VARIANT 47: note = Ancestral polymorphism is R, Derived polymorphism is C
MLDKWEPSSLQMLEYSPNDKDMWEPDLRGGSGGGERRARAATGAVERDVEEEDSDSPSSEMSVDEPNSGVAPSFLGITRCGHTRPTVALGHHEQVVHDHGYR

SEQ ID NO: 14663 - protein, 295 aa, Zea mays
  VARIANT 74: note = Ancestral polymorphism is Q, Derived polymorphism is R
MSRGDDEFPVVVVCSNSSCDSDHLHRERGEQGLISSQLQQQLEQAMNIYMLMDMELEHELHLHHNVPPQGCSQRQLSSPFLPFAVSSDVTSSPVLTSSSTTTFCQQPAEASPSPLDTPFSPLPYSYSDTIPDLEEIMSRPRHKDGHAESGTSAFRQYVRHLRPKKKLKQGGCGQRAIKTAMSVLARMHSSRLSQWQRQISSTEMAAAVPSDESKNIQLLHVRSERKRREKINDSFEALKNALPPSCCKRDKTSILMRARDYINSLKSRVSELEENGKVLESQLCSSRGDNGGPLP

SEQ ID NO: 14664 - protein, 200 aa, Zea mays
  VARIANT 125: note = Ancestral polymorphism is G, Derived polymorphism is S
  VARIANT 124: note = Ancestral polymorphism is C, Derived polymorphism is Y
  VARIANT 101: note = Ancestral polymorphism is C, Derived polymorphism is Y
  VARIANT 99: note = Ancestral polymorphism is G, Derived polymorphism is S
  VARIANT 75: note = Ancestral polymorphism is P, Derived polymorphism is S
MDSDSPLVVDSLVAMDSDSLIAVDSLVDMDSDSPLAVAKDDVSSSLDSDMALDCVAPDSESIRFVPDSEPFELVPDSEAEEVAPEAKSGELELGPFLCGSCGVVHENRASWNRVHSAFRPCSRCGVINKENLIDALLHGAQEWVCKPECDAKASHIIEAELISIIRLLEVFIELIDILHHLESFVELVGIPHLLVVFVFN

SEQ ID NO: 14665 - protein, 131 aa, Zea mays
  VARIANT 62: note = Ancestral polymorphism is T, Derived polymorphism is R
MEAAEVAALVGMVAECLDAEDYDEYEGITEESVREVMSWFEVEIMLAAGANALPLPPSLDARVSERKESCKSSLSVPASVDGRAGVPPPPLAEPWSVPEPAAAAEEEDVDDEWVLQLLTDGPPLDGQHCGQ

SEQ ID NO: 14666 - protein, 122 aa, Zea mays
  VARIANT 118: note = Ancestral polymorphism is G, Derived polymorphism is V
  VARIANT 54: note = Ancestral polymorphism is Q, Derived polymorphism is K
  VARIANT 13: note = Ancestral polymorphism is G, Derived polymorphism is S
  VARIANT 11: note = Ancestral polymorphism is R, Derived polymorphism is Q
  VARIANT 1: note = Ancestral polymorphism is M, Derived polymorphism is I
MQGGVSCVGGRLGLTIDPAGDGEAPAERVGRLVRESPVVIFAWRGCCMCHVMRQLLAAVGAHATVIELEEAAEEAAASAAAAAAVPALFVGGAPVGGLDGLMGLHLSGLLVPRLREVGALCG

SEQ ID NO: 14667 - protein, 298 aa, Zea mays
  VARIANT 278..298: note = Derived polymorphism lacks residues 278 to 298
  VARIANT 238: note = Ancestral polymorphism is T, Derived polymorphism is I
  VARIANT 235: note = Ancestral polymorphism is L, Derived polymorphism is S
  VARIANT 215: note = Ancestral polymorphism is E, Derived polymorphism is G
  VARIANT 196: note = Ancestral polymorphism is A, Derived polymorphism is T
  VARIANT 192: note = Ancestral polymorphism is C, Derived polymorphism is Y
  VARIANT 168: note = Ancestral polymorphism is T, Derived polymorphism is I
  VARIANT 166..298: note = Derived polymorphism lacks residues 166 to 298
  VARIANT 165: note = Ancestral polymorphism is G, Derived polymorphism is R
  VARIANT 122: note = Ancestral polymorphism is P, Derived polymorphism is R
  VARIANT 121..298: note = Derived polymorphism lacks residues 121 to 298
  VARIANT 116: note = Ancestral polymorphism is G, Derived polymorphism is R
  VARIANT 111: note = Ancestral polymorphism is C, Derived polymorphism is Y
  VARIANT 108: note = Ancestral polymorphism is S, Derived polymorphism is N
  VARIANT 107: note = Ancestral polymorphism is C, Derived polymorphism is Y
  VARIANT 96: note = Ancestral polymorphism is R, Derived polymorphism is Q
MVLLPLPLSHAYIMVLLPLSHSYRHVPRPLPALPIQGNMMESTPATGDREAISTIIAPALNRAWIPFHPWRHWPFHPWRPTCTEFECTEFKGIGGRWYICGGHTLHCSKLYRILDGLFLQYPIATRPSTRTKIFLENHIVDSEISLTTTIILRNFLWMVTTTKSGWPTDVHREARDGVPEFERAFRERFSACTLAAKRHIDSTTIFNVQGVKHKEISKVEKDIVLRCVLMFTLHSRRTFYLKLNLSCKLVSKHSEYCDVWYFRSSHPFAKAINGAALQLFSFAETISIGRPPRNSSRS

SEQ ID NO: 14668 - protein, 536 aa, Zea mays
  VARIANT 132: note = Ancestral polymorphism is S, Derived polymorphism is N
MADSEDAPPAVHRRPPRPARGAAAAQGFAAALRRRLRSGAAVAARASFAADSGDESGPGEPSSSRRRDNSGGASSAAGGRAGAGDFSAFTFRAAAPVHRKAKESPLSSDAIFKQSHAGLFNLCIVVLVAVNSRLIIENLMKYGLLIRSGFWFNATSLRDWPLLMCCLSLPIFPLGAFAVEKLAFNNLISDPATTCFHILFTTFEIVYPVLVILKCDSAVLSGFVLMFIACIVWLKLVSFAHTNHDIRKLITSGKKVDNELTAAGIDNLQAPTLGSLTYFMMAPTLCYQPSYPRTPYVRKGWLVRQVILYLIFTGLQGFIIEQYINPIVVNSQHPLMGGLLNAVETVLKLSLPNVYLWLCMFYCLFHLWLNILAEILRFGDREFYKDWWNAKTIDEYWRKWNMVCLFFLGNNNSSKNVLPDMVYAVVPVHKWIVRHIYFPCMRNGISKEVAVFISFFVSAVLHELCVAVPCHILKFWAFLGIMLQIPLIILTSYLKNKFSDTMVGNMIFWFFFCIYGQPMCVLLYYHDVMNRTEKAK

SEQ ID NO: 14669 - protein, 362 aa, Zea mays
  VARIANT 21: note = Ancestral polymorphism is T, Derived polymorphism is R
  VARIANT 20: note = Ancestral polymorphism is R, Derived polymorphism is S
MAAPDQGSGATPEAAAALMSTETSYTCGGEEQPMHQHHERKLSSNASFSSLASSSPPPSSASSSPNYLPAASNKLSCDSIPCAGPDLGKLSSFSSTSTYESFFHIEALDSSDNIGLGNGNDNASAAGSNEFLDFEPTTRPPAAQTMTPQQSRQKKAEGAAAYDPKRLPSSMFRTRSTNPAEWSATSNGSLFSIQLSTSTDLTAQYADFYYDAAGFPRLPTLGRDAALALPSLSESSSERTGGLCMRHDCARCSSSSKTWKSVRFAATESVSGEGKHSVVVSTTYDGGCGGGNGDGGSGGVGVGNQGPCSRVVRVRVLFGIVVTDDVLASLLRMPRMWLPLQMLVLNLAGRDDCTPVVNRNEL

SEQ ID NO: 14670 - protein, 149 aa, Zea mays
  VARIANT 59: note = Ancestral polymorphism is R, Derived polymorphism is C
  VARIANT 36: note = Ancestral polymorphism is G, Derived polymorphism is E
  VARIANT 28: note = Ancestral polymorphism is R, Derived polymorphism is M
  VARIANT 15: note = Ancestral polymorphism is T, Derived polymorphism is I
MHTRQEAQELEEHMTCLQLLFEDAADERIFAKEELGAAVGKFLLRLTTRQQALTREYSRLANLKRPPDLSGMTEADRAAETEKLREEKLHKARKLQDQGDMSGAHECQGLARIIDFDVKHGGRYLNSICYVDDIYTFDHTEECKFLGQS

SEQ ID NO: 14671 - protein, 351 aa, Zea mays
  VARIANT 34: note = Ancestral polymorphism is T, Derived polymorphism is I
  VARIANT 35: note = Ancestral polymorphism is V, Derived polymorphism is I
  VARIANT 40: note = Ancestral polymorphism is D, Derived polymorphism is Y
  VARIANT 44: note = Ancestral polymorphism is P, Derived polymorphism is L
  VARIANT 50: note = Ancestral polymorphism is P, Derived polymorphism is S
  VARIANT 62: note = Ancestral polymorphism is G, Derived polymorphism is A
  VARIANT 67: note = Ancestral polymorphism is P, Derived polymorphism is T
  VARIANT 102..351: note = Derived polymorphism lacks residues 102 to 351
  VARIANT 142: note = Ancestral polymorphism is M, Derived polymorphism is K
MAESSGSGSVSVDVERISFGGKDHLVRTRCGSVTVAVYGDEDKPALITYPDVALNYLSCFQAFFFCPEVASLLLHNFCVYHINPQGHEVSDAGSIPVTRVLQMGAAPMSSDVPVPSVDDLADQVADVLDFFSHTSFSLGSVMCLGVTAGAYVLTLFAVLLNLLYYYGNQGLVKECLLQRYFSKLLDDKQGENIWRFLHSINEYVAIRLFFFIFFNERIHLWNLDAHTGFLSTRRHDLTDSLKKLQCRTLIFVGESSQFHEDAIHMATKLDRRYCALVEVQDCGSLVTEEQPHAMVMPMEYFLMGYGLYRPYQLSSSPRSPLSPCCISPELLSPESMGVKLKPIKTRVGISL

SEQ ID NO: 14672 - protein, 515 aa, Zea mays
  VARIANT 379..515: note = Derived polymorphism lacks residues 379 to 515
  VARIANT 358..515: note = Derived polymorphism lacks residues 358 to 515
  VARIANT 278: note = Ancestral polymorphism is P, Derived polymorphism is L
MARLGRLPTPAEQPRQQPQRSRSSTTAADSADPPPSASLTIALCHPKPPPPAPSGSPPRPVCHRRRRLSPAVTTKHRRTADENIREEAARHPAPKQGLSAWYEPFPPAPNGDPNERYSLDEIVYRSSSGGLLDVRHDMEALARFSGAYWRDLFDSRIGRTTWPYGSGVWSKKEFVLPEIEPDHIVSLFEGNSNLFWAERLGRDHLGGMNDLWVKHCGISHTGSFKDLGMTVLVSQVNRLRAPLSRPIAGVGCASTGDTSAALSAYCAAAGIPAIVFLPANRISLEQLIQPIANGATVLSLDTDFDGCMRLIREFDWEVPDWVIVPGGNLRNIYAFYKGFEMCRVLGLVDRVPRLVCAQAANANPLYGYYKSGWAEFQPQVARPTFASAIQIGDPVSVDRAVVALKATDGIVEEATEEELMNAMSLADRTGMFACPYTGVALAALFKLRDQRVIGTNDRTVVVSTAHGLKFSQSKIDYHDSKIEDMACKYSNPPVSVKADFGAVMDVLKKRLKGKL

SEQ ID NO: 14673 - protein, 394 aa, Zea mays
  VARIANT 128: note = Ancestral polymorphism is K, Derived polymorphism is N
MMMMMGERAHAPPWQRSPAASGVTDADDASPYALLAALQHYLPSNEVAAYDEDDEEAALAAATAAVDAYACDEFRMYEFKVRRCSRGRNHDWTACPYAHPGEKARRRDPRRYHYSGAACPDFRKGGCKRGDACEFAHGVFECWLHPSRYRTQPCKDGTGCRRRVCFFAHTPDQLRVPPPRQSSPRGAAAAASPLAESYDGSPLRRQAFESYLTKSGIVSSPPPTSTLVSPPRSPPSESPPMSPDAAAALRRGSWPGVGSPVNEVLASMRQLRLGGGSPRSAPSGGSFLGGGYPFGSPKSPAGLYSLPSTPTRPSPVTVTTASGATVLTVERLNLGLIGDEEPVMERVESGRALREKVFERLSKEAAVPSDTAASANVEGAAPAPDVGWVSDLIN

SEQ ID NO: 14674 - protein, 400 aa, Zea mays
  VARIANT 243: note = Ancestral polymorphism is L, Derived polymorphism is P
  VARIANT 253..400: note = Derived polymorphism lacks residues 253 to 400
MATDRLLHLLRAPTGSPAAATTRAAGWGRPRTQRVDVWQVAAGIRRASVSCSSTSSGGQGGLTYKDAGVDIDAGAELVRRIARMAPGIGGFGGLFPYNDDYLVASTDGVGTKLKLAFETGIHDTIGIDLVAMSVNDIVTLGAKPLFFLDYYATSKLDVDLAEKVIKGIRDGCEQSDCALLGGETAEMPGFYAEGEYDLSGFAVGVVKKDKVIDGKNIVKGDVLIGLPSSGVHSNGFSLVRRVLEKSGLSLDDQLPRNDGITTTVGEALMAPTFIYVKQVLEIISKGGVKGLAHITGGGFTDNIPRVFPSGCGAKIFTGSWEIPPIFSCLQQARTNDLQTLPLISAGNIDDAEMRRTFNMGIGMVLVVSRESADRIIEDTHGSNPAYRIGEVIEGDGVQYV

SEQ ID NO: 14675 - protein, 627 aa, Zea mays
  VARIANT 354: note = Ancestral polymorphism is A, Derived polymorphism is V
  VARIANT 379: note = Ancestral polymorphism is T, Derived polymorphism is M
  VARIANT 411: note = Ancestral polymorphism is R, Derived polymorphism is G
  VARIANT 542..627: note = Derived polymorphism lacks residues 542 to 627
MVLNEQVIKTKWKGQKAKEVEGTGFKLWYTGTAANKNGVGVLIDKSLKDGVVDVKRLGDRIILVKLVIGDLVLNVISVYAPQVGLNENSKREFWEGLEDMVSSVPVGEKLFIGGDLNGHVGTSSTSFEGVHGGFGFGTRNQGEEILNFALAYDMFISNTFFRKRKSHLVTFSSGQHTSQIDFVLLRKEDRHACLDCKVIPGECVCVDNIEKYRIAKKSAKRAVSRARGQAYDDLYQRLDTKQGEKDIYRMAKIRERKTRDVNQVKCIKDEANQLLVKNEEIKNRWKEYFNKLFNGGNESSIIELDEPFDDNNRGFVRRIQEYEVKEALKRMKVGKAMGPDGIPIEVWRCLGDIAIVWLTKLFNTIFRTNRMPDEWRRSTLIPIFKNKGDVQSCTNYRGIKLMSHTMKLWERVIEHCLRKMTSVTQNQFGFMPGRSTMEAIFLLRQLMERFREQKKDLHMVFIDLEKAYDKALEAKCFRLSRSKTKYMKCDFSAMGYEDGDVSLDGQVVPKKDTFRYLGSMLQKEGDIDEDASHRIKARWLKWRQAAGVLCDPRVPHKLKGKFYRTAIRSAMLYGAECWPTKRRHVQQLSVAEMRMLHWIYGHTRRHRVRNDDIRERVGVAPIEEKLM

SEQ ID NO: 14676 - protein, 218 aa, Zea mays
  VARIANT 81: note = Ancestral polymorphism is D, Derived polymorphism is H
MAATSIKVAHLTTLALFSPTPNPFGPKSSKHRARAPPPISISMDPALVDPAHLQALMLACGHSCTLRLSPALSVSAVEPVDLSKLRTALAHSFVVVSVFCGARFFTHDREREGEGQRFLGLEIGLDLQGERRLVGFGRAVSDLGLTASVHDIVVHPLLQRRGIGQKIVNKITRVLHSRGIYDISALCTAKERPFFEACGFGDDMMGSTTMLYTRKTQK

SEQ ID NO: 14677 - protein, 255 aa, Zea mays
  VARIANT 175: note = Ancestral polymorphism is R, Derived polymorphism is L
MAKLMNKLVDSFEHDEILDVGCVRAVLAELVLTFLFVFTGVSAAMAAGSDGKPGDAMPMATLAAVAIAHALAAGVLVTAGFHVSGGHLNPAVTVGLMVRGHITKLRAVLYVAAQLLASSAACVLLRFLSGGMVTPVHALGRGISPMQGLVMEVILTFSLLFVTYAMILDPRSQVRAIGPLLTGLIVGANSLAGGNFTGASMNPARSFGPALATGDWTNHWVYWIGPLLGGPLAGFVYESLFLVQKMHEPLLNGEV

SEQ ID NO: 14678 - protein, 831 aa, Zea mays
  VARIANT 83: note = Ancestral polymorphism is T, Derived polymorphism is I
MEAFGGFFVDEKAVRVENIFLEFLKRFKESDGAGEPFYEAEMEAMRSRESTTMYVDFAHVMRFNDVLQKAISEEYLRLRELGTAEIGKLTAVMGVVTRTSEVRPELLQGTFKCLDCGNVVKNVEQQFKYTEPIICVNATCQNRTKWALLRQESKFTDWQRVRMQETSKEIPAGSLPRSLDVILRHEIVEKARAGDTVIFTGTVVAVPDVMALTSPGERAECRREAPQRKMGGVQEGVKGLKSLGVRDLSYRLAFVANSVQVADGRREGDIRDRDTDGDDSGRQKFTEEEEDEVVRMRNTPDFFNKIVDSICPTVFGHQEIKRAVLLMLLGGVHKITHEGINLRGDINVCIVGDPSCAKSQFLKYTAGIVPRSVYTSGKSSSAAGLTATVAKEPETGEFCIEAGALMLADNGICCIDEFDKMDIKDQVAIHEAMEQQTISITKAGIQATLNARTSILAAANPTGGRYDKSKPLKYNVALPPAILSRFDLVYIMIDEPDENTDYHIAHHIVRVHQKREEALAPAFSTAQLKRYISFAKSLKPQLSSEAKKVLVESYVTLRRGDSTPGTRVAYRMTVRQLEALIRLSEAIARSHLERVVSLLIHFYYDESSSSCTTSLSVLMESWNILSHLPFHGQCHQPIFDLHAVLPAHVRLAVKLLKTSIISVESSEVDLSDFQDAEDGTNVPSENDAGQPAEEGAAPQQQDAENDQAADNGKKKLVITEEHFQRVTQALVMRLRQHEESVKKDGDGMAGMKQGDLIIWYVEQQNAKGAYSSTAEVKEEVKCIKAIIERLIQREGHLIVIDEGTAATAEDGSRSRTSESRILAVNPNYVID

SEQ ID NO: 14679 - protein, 817 aa, Zea mays
  VARIANT 21: note = Ancestral polymorphism is L, Derived polymorphism is P
  VARIANT 43..817: note = Derived polymorphism lacks residues 43 to 817
  VARIANT 410..817: note = Derived polymorphism lacks residues 410 to 817
  VARIANT 472..817: note = Derived polymorphism lacks residues 472 to 817
MPRPLAALLSTACILSFFIALFPRAASSRDILPLGSSLVVESYESSTLQSSDGTFSSGFYEVYTHAFTFSVWYSKTEAAAANNKTIVWSANPDRPVHARRSALTLQKDGNMVLTDYDGAAVWRADGNNFTGVQRARLLDTGNLVIEDSGGNTVWQSFDSPTDTFLPTQLITAATRLVPTTQSRSPGNYIFRFSDLSVLSLIYHVPQVSDIYWPDPDQNLYQDGRNQYNSTRLGMLTDSGVLASSDFADGQALVASDVGPGVKRRLTLDPDGNLRLYSMNDSDGSWSVSMVAMTQPCNIHGLCGPNGICHYSPTPTCSCPPGYATRNPGNWTEGCMAIVNTTCDRYDKRSMRFVRLPNTDFWGSDQQHLLSVSLRTCRDICISDCTCKGFQYQEGTGSCYPKAYLFSGRTYPTSDVRTIYLKLPTGVSVSNALIPRSDVFDSVPRRLDCDRMNKSIREPFPDVHKTGGGESKWFYFYGFIAAFFVVEVSFISFAWFFVLKRELRPSELWASEKGYKAMTSNFRRYSYRELVKATRKFKVELGRGESGTVYKGVLEDDRHVAVKKLENVRQGKEVFQAELSVIGRINHMNLVRIWGFCSEGSHRLLVSEYVENGSLANILFSEGGNILLDWEGRFNIALGVAKGLAYLHHECLEWVIHCDVKPENILLDQAFEPKITDFGLVKLLNRGGSTQNVSHVRGTLGYIAPEWVSSLPITAKVDVYSYGVVLLELLTGTRVSELVGGTDEVHSMLRKLVRMLSAKLEGEEQSWIDGYLDSKLNRPVNYVQARTLIKLAVSCLEEDRSKRPTMEHAVQTLLSADD

SEQ ID NO: 14680 - protein, 696 aa, Zea mays
  VARIANT 11..696: note = Derived polymorphism lacks residues 11 to 696
MLHQILVIFLQKDSILCVGILDSKSNHTGAMARPYKPKNILITGAAGFIASHVAIRITKKYPDYKIIVLDKLDYCSNLKNLLPVSSSPNFKFVKGDIASVDLVNFLLVTENIDTIMHFAAQTHVDNSFGNSFEFTKNNIYGTHVLLEACRISGQIKRFIHVSTDEVYGETDEDAVVGNHEASQLLPTNPYAATKAGAEMLVMAYGRSYGLPVITTRGNNVYGPNQFPEKLIPKFILLAMRGEPLPIHGDGVNVRSYLYCEDVAEAFEVILHHGEVGHVYNIGTKRERTVLDVAKDVCRLFNLEPDKVIMFVENRPFNDQRYFLDDEKLKSLGWAERTPWEEGLKKTMEWYVANSDYWGDVSGALLPHPRTLMMPGCEGSEEIKGILSRFNNIQTKVGSTSDNAPEPHAFKFLIYGRTGWIGGLLGKICEKKGIPYEYGNGRLQERSSLVLDIQTIKPTHVFNAAGVTGRPNVDWCESHKPDTIRTNVVGTLNLADVCRKHGLLMMNYATGCIFEYDAHHPEGSGIGFKEEDTPNFTGSFYSKTKAMVEELLKEYENVCTLRVRMPISSDLSNPRNFVTKISRYNKVVNIPNSMTILDELLPISVEMAKRNLRGIYNFTNPGVVSHNEILEMYKQYIDPSFKWTNFTLEEQAKVIVAPRSNNEMDATKLKNEFPELLSIKDSLIKYVFEPNRKVPTD

SEQ ID NO: 14681 - protein, 200 aa, Zea mays
  VARIANT 152: note = Ancestral polymorphism is E, Derived polymorphism is K
  VARIANT 134..200: note = Derived polymorphism lacks residues 134 to 200
  VARIANT 123: note = Ancestral polymorphism is R, Derived polymorphism is C
  VARIANT 117..200: note = Derived polymorphism lacks residues 117 to 200
  VARIANT 107: note = Ancestral polymorphism is G, Derived polymorphism is S
  VARIANT 99: note = Ancestral polymorphism is K, Derived polymorphism is E
MSGYDDIPSLITNSIAAPPSLPPSIECIKTTSVPITTATKILTTLPLPASATTQAPSVPIHQIAFPHSPSPIPGPYCSTSMGPFLEAPSHTHGVTRFHKLSFPTFDGKDDPFGWLNRCDQFFRSQRTLEGDKVWPASYHMVGAAQTWYYMLELNLELPISWPHFKELCHNTSTLRYNTILWAHWHASIFAPPSRNTESVS

SEQ ID NO: 14682 - protein, 149 aa, Zea mays
  VARIANT 60: note = Ancestral polymorphism is M, Derived polymorphism is I
MYHPFETSLQPTFLNLARCTPQSSLWADKGPTVAFKFFDLLFFVIVGAEQEGTQLSALDMQPLLDFVKRGNLQTELFSVGLNQHLVTSIHENWFCARCINSTKPEGEGVIVMQIGACLLVTMYAGSLAAASQAMVAADQFAIQFNRRSH

SEQ ID NO: 14683 - protein, 293 aa, Zea mays
  VARIANT 281..293: note = Ancestral polymorphism lacks residues 281 to 293
  VARIANT 176: note = Ancestral polymorphism is I, Derived polymorphism is T
  VARIANT 108: note = Ancestral polymorphism is K, Derived polymorphism is E
MAYLLKSRSKPVQQLLVPASSEEQQRRVNEVRELLGDLPTEMPNFLSDATIRRFLRARNWSTMKATKSLKEATSWRRQYKPEKIRWESIADSENEARRAYIPDYLDKKGRMVFVTLPTIKSKSSEKDHLKYLVYNLENLLIDCADAEEDNVVWISDFKGWSISSTPFSLTRQSLHIIQQYYPGLIAVGILTNAPKIFESFWKIMKHFLEPKMDEKVKFVYNDSSESQKILGDMFDLDELEHIFGGRNTADFDINVYAERMKRRDRIRGASTEDNGEATSSRCWTKTTRNSSSV

SEQ ID NO: 14684 - protein, 492 aa, Zea mays
  VARIANT 391..492: note = Derived polymorphism lacks residues 391 to 492
MPGRNFATTAVAIAVVVVAALASASAGADDDEQGHLRREADRIVRLPGQPDDGVDFPMYSGYVTVDEGAGRALFYWLQEAAAEAQPAPLVLWLNGGPGCSSVAYGASEELGAFRIRPDGATLFLNAYRWNRAANILFLDSPAGVGFSYTNTTSDLYDSGDRRTAHDSYKFLARWFERFPQYKYRDFYIAGESYAGHYVPQLSQIVYRKNKGVEKPIMNLKGFMVGNAVTDDYHDQVGTFESWWNHGLISDATYRLLDASCVHDSGEHPSPRCNAAYDKATAEQGDIDPYSIYTPTCNQTSTSSSSSTPRRMRLKGRYPWMRGSSYDPCTERHSTVYYNRPEVQRALHANVTAGAGGAMNYTWATCSDTINNNWGDSPKSVLHIYKELIAAGLRIWVFSGDTDAVVPLTATRYSIDALNLPTVVSWYPWYDAKEQQKQQQEVGGWSQVYEGLTLVTVRGAGHEVPLHRPRQALILFRHFLRGKPMPPKNGTVV

SEQ ID NO: 14685 - protein, 199 aa, Zea mays
  VARIANT 108: note = Ancestral polymorphism is G, Derived polymorphism is R
MASSRIPDALAAPALTPAPAAVPLEVQAQNPSIAPADPPSPEMETTAEALTREEVLRRRRRRAARLAGVYRQLYWAMAEEVRARHRQYVWDLARSPLEAEQPPAPPGGPIPAAGELPRLAPVPRRNKCGFPGCKVRAMATTRFCHSHILSDPKQRLYKPCAYINKRFVLLPTLHVIWKKEAVDLGPLGFTDSVALLVCI

SEQ ID NO: 14686 - protein, 732 aa, Zea mays
  VARIANT 452: note = Ancestral polymorphism is R, Derived polymorphism is L
  VARIANT 443..732: note = Derived polymorphism lacks residues 443 to 732
  VARIANT 371: note = Ancestral polymorphism is P, Derived polymorphism is L
  VARIANT 351..732: note = Derived polymorphism lacks residues 351 to 732
  VARIANT 338..732: note = Derived polymorphism lacks residues 338 to 732
  VARIANT 288..732: note = Derived polymorphism lacks residues 288 to 732
  VARIANT 238..732: note = Derived polymorphism lacks residues 238 to 732
  VARIANT 215..732: note = Derived polymorphism lacks residues 215 to 732
  VARIANT 128..732: note = Derived polymorphism lacks residues 128 to 732
  VARIANT 85..732: note = Derived polymorphism lacks residues 85 to 732
  VARIANT 72..732: note = Derived polymorphism lacks residues 72 to 732
MLPKKSLSGYQKRKKRKHEDQLVESQKGALDKFFVVSSNVDVNEVERRESDPAHDDEQQDHNEEHDHNLNTEDEVNEDGSMEENLIAAIDAVEDSMMRENLQPSSDHENSNDDEQDASGLSIFDPRTWDNLDNNKRDILIEKGPIRESNLVFPKDSIGRHFSYAYYSKNLSNGESVDRKWLVYSKHVNKVYCFCCKLFKSNKSKSLLASDGVRDWQRLSTRLKEHDSCVEHLTNMNTWNELRLRLSKNKTIDNDLQRGISKERERWRQVLLRIVSAIKFLAKHNLAFRGRNEKLYQANNGNFLGTIEMMGEFHPVIQDHIRRIENSEIHHHYLGHRIQNEIISLLADCVKQTILKVIKSAKYFSVICDCTPDVSHEEQMTMIIRCVNMSGNVVRVEEFFLEFLKVDDTSGLGLFDELKSVLASLDLNIADVRGQGYDNGSNMKGKHQGVQTRMLQINPRALYMPCACHSLNLTLCDMGKSCRQAITFFGIIQRIYTLFAKSTKRWKLFVDNVPGLTVKSWSNTRWESRIKSVQAIRYQTPQIRSALKALEEMSALDNDPSTVSDCQSLVSALENFEFLVGLVIWHDILFSINKVSKKLQSKIVSIDATLKHIEGVITYFKKYRDEGFTSSIDTAKIISSELDVEPIFPTKRKGKRKKHFDEQDDEDEEMQQSAIDLFRREYFLVMIDAAIASLTSRFEQMKAFDNVFGFLFNSENLKSLDEQRNSILLCTRL

SEQ ID NO: 14687 - protein, 251 aa, Zea mays
  VARIANT 38: note = Ancestral polymorphism is N, Derived polymorphism is K
MQRSLWRHTSSPACVHAIESSDDGSRRSTDEEPRKKVNKKVMKLLLLPLKHRQRIPQAFRSLSWGAKKEDASKKDGSPREREESDDADTFASANSSELRSSSRGIDDDSQAPSFRLSAPPIFPTGSVERRPPPASPVKIVRKLPFGYVIGRQLDAPALQPPPSVTTLSRNVKTVVMPLMAWLHLRSRSLALKKKAGRAFKKACQRGSRRDEREGVQETDDGCCGNDDEDVFWKKDVKGLRCRQVQDDDAPY

SEQ ID NO: 14688 - protein, 541 aa, Zea mays
  VARIANT 321: note = Ancestral polymorphism is I, Derived polymorphism is N
MQTYLYSLLNSPSFSSAFASSASLAFLRPSLCSPPAAETLAASAVMASSNVSTVYISVIDDVISKVREDFITYGVGDAVLNELQALWEMKMLHCGAISGNIERTKAAAASAGGTSGTTPPVHDLNVPYEATSEEYATPTADMLFPPTPLQTPIQTPLPGTDTGMYNIPTGPSDYAPSPISDIRNGMTINGADPKAGRPSPYMPPPSPWMNQRPLGVDVNVAYVEGREDPDRGVQPQPLTQDSKIFVMILKLMDFLTMSSGKRKRDEYPGQLPSGSFVPQQDGSADQIVEFVVSKFAHYSHGMPYFNMVFVMCEYKIQLVAIRYLANLGGTRWHSIKEKIGTQSFEEELNLGDVVADNRGEEQHTSIQLVQVLIIDGQRATNPAQKENANQHWSSIINKLETPTKTVTPVIPQCDGIQDDYNDQFFFPGVPTEDYNTPGESAEYRAPTPAVGTPKPRNDAGDDNDDDDDDEEPPLNEDDDDDDDLDDLEEGEDEPNTQHLVLAQFDKVTRTKNRWKCTLKDGIMHLNGRDVLFNKATGEFDF

SEQ ID NO: 14689 - protein, 465 aa, Zea mays
  VARIANT 263: note = Ancestral polymorphism is S, Derived polymorphism is F
MAMTEGLVPITRTYLARYYDKYPLPPLPDATTDLAARLRALSADLAAVAPIAPDEELLEQEAAGIPAHKIDENLWKNREQMEEILFLINTSHRPVALQQKSTPEDAEIVCTLDDIEAKLKDMLKNLEQFQLKNADNVFNTVMTYMPQDFRGTLIRQQRERSERNKQAEVDALVSAGGSIHDRYALLWKQQMERRVQLAQLGSATGVYKTLVRYLVGVPQVLLDFIRQINDDNGPMEEQRERYGPALYTLTKLVLAIRLYLHVSLARYGQRKIEKDDAAVLQQAVVIYTKEFLKFTEFIGEVFVNAPFFISAEDAGAVDARTEIYFLPPLLVGKVMSTKKLLFQLERHMRYTSLVDLGYLLYLLVILSVEAVNSYIAWDFSLQQGALNMVLDIGFHVEYISPSGEKTLILPYRRYEADQGNFCTVSSGSYKLVWDNSYSSFFKKVLRYKVDAVPPVVEPALSATEL

SEQ ID NO: 14690 - protein, 1198 aa, Zea mays
  VARIANT 1021..1198: note = Derived polymorphism lacks residues 1021 to 1198
  VARIANT 905..1198: note = Derived polymorphism lacks residues 905 to 1198
MLQISMNPLLTLLLLLITSLHAPPCSSASTTTAATATDTLAAGQALASGDRLVSRNGKFALGFFQPTTAVVAGGKSGNITSSPNWYLGIWFNTIPVLTTVWVANRETPIPGPSLKHARLQISSDGKSLAILINQASPGGTMLWSTPSPSAANWSSGASSNTAVLMDTGNLALLGAESPSSSNNNVTTLLWQSFDYPTDVVLPGAKFGRNKVTGFSRQGVTRKSLIDPGLGSYSVEIDASGVVLKRRSPSSVVYWRWSSSSTSTLKLIPILKSILDLDPRTRGLIDPTYVDDSQEEYYMYTSLNESSSRLTFVSLDISGQIKMNVWSHALQSWQAIYSQPADPCTPYATCGAFTTCNGGTTSSSSSFCDCMPGFSRKSPQDWELDDRAGGCVRNTPLHYCTTTSEKNATTTGSTDIFLPIPRVTLPYNHLQSVDGAAAASQSDCEEACRASCSCTAYSYNSSRCSVWHGELFSVNRNDGIDNNSEQVLYLRLASDDSPPGSAGNRRRKPSAGVVAAASIVGGGLLLVLILLLTIWRKRSWRCGTPLYGSQGGGGGVVAFRYTDLSHATKNFSEKLGAGGFGCVFKGVLTGGSTAIAVKRLDGAARQGEKQFRAEVSSLGLIQHINLVKLIGFCCKGHKIRLLVYEHMSNGSLDSHLFQSDGAAAAAALGWNTRYQIAIGVARGLSYLHQSCRECIIHCDIKPENILLDASFAPKIADFGMAAFVGRDFSRVLTTFRGTAGYLAPEWLGGVAITSKVDVYSFGLVLLEIERKAKIRNGAIEDGPPFNLFPDSGQPDDVVLSVATSIWLPRLGDHVFAFGRDKKWEVLSHDNQVQEVSRIPNGSNPGNCISLLRKVLDTGISIKEGPSFQQMKMLSVGECVKIQLTGFMEKNTVKFMKELWSLLLSAQQNASGVPQQFLDEKEAEIHQKKDGDVGNSRSYGDPVASALNSTNFNIEEEKDNDFKRTSRPKNRFVITFLHNLVGFYYNLDACFALDVLTRCPYLGCKDATKMMLVVKEIFTCQIQVVDKVVELDETKKEALIVKTTIHDIMNQMIRELPITNPIYLMLGTSFGSSAKGTGLKALEFALSICDSFDMYGFTVDPGYKEWTRYFSEVRKGHTPLHGRAYYQMMECLGLVKIHSPMRGDPGRTVRWLPTKATIEAARVASEKLLKRPGAGSDDPLGTCTMIKKRRKGKAPNRSGL

SEQ ID NO: 14691 - protein, 495 aa, Zea mays
  VARIANT 411..495: note = Derived polymorphism lacks residues 411 to 495
MMLYLTVEDPYGGTYQSWQQNAPPPPPPEHVVTTLPAYANPPPQPPPPPTAAAMLNSSGGSGSNYSGGEILPPPSPGAALGFSKSTFTYEELMRATDGFSDANLLGQGGFGYVHRGLLPNGKEIAVKQLKLGSGQGERNDRPTMEWPTRLKIALGAAKGLAYLHEDCHPKIIHRDIKASNILLDFKFEAMVADFGLAKFTTDNNTHVSTRVMGTFGYLAPEYAASGKLTEKSDVFSFGVMLLELITGRRPIDTTQTYMDDSLVDWARPLLMRALEDGEYDALVDPRLGKDFNPNEMARMIACAAACVVRALEGDVSLEDLNEGVRPGHSRFFGSYSSSDYDSGQYNEDMQKFRKTAFNNNTYTSSQYSAPTSEYGQVPSGSSSEGRQTQEMEESGAVKKGGYSGYSSGYSGASGSTGANQPTFANVWIGLLRRMGRTRVECSTQMRVSGQNEWTTDHANPHLGRVGSAASATVRGLARAGGAAVRGRESCAWLSA

SEQ ID NO: 14692 - protein, 397 aa, Zea mays
  VARIANT 371: note = Ancestral polymorphism is T, Derived polymorphism is A
MSSWSPAAAAAAAVAKAAKPLHRSVSSTPVSPHLSMSSSHRTPPLAMAAGGSGAVAPSSLLVADQGHRESVLLAARASMGNCLGETRLDLSVSGLRLAAKGKVRDVYESGQHLVLVTTDRQSAFDRVLASIPFKGQVLNETSLWWFNQTRHITPNAVVSSPDKNVTIAKRCTVFPVEFVVRGFVTGSTDTSLWTVYNKGVRNYCGNVLPDGMVKNEKLSSNILTPTTKAADHDVPVTPDEIIESGLMSKEDFHEAGSKALSLFAYGQKVALENGLILVDTKYEFGKTPDGTIVLIDEVHTPDSSRYWIANSYEDRFKSGLEPENVDKEFLRLWFKNNCNPYEDAVLPEAPEELVCELAWRYIFLFETITKTKFEILEAQEPIHERISRNVAQALRDL

SEQ ID NO: 14693 - protein, 512 aa, Zea mays
  VARIANT 5: note = Ancestral polymorphism is R, Derived polymorphism is S
  VARIANT 194..512: note = Derived polymorphism lacks residues 194 to 512
  VARIANT 240: note = Ancestral polymorphism is C, Derived polymorphism is F
  VARIANT 271..512: note = Derived polymorphism lacks residues 271 to 512
  VARIANT 307..512: note = Derived polymorphism lacks residues 307 to 512
  VARIANT 362..512: note = Derived polymorphism lacks residues 362 to 512
MASPRGRMSFPLRSFLMICLMAQLGASNVVLMANNTTLSFDDVEAIFTPAVKGSGVNGVLYAVEPMDACSPLKTKAIGGSVSPFALVIRGGCHFDDKVRNAQNAGFKAAVVYDTEDNGVLVSMAGSSSGVHIYAVFVSKASGEELKKYSGQTDAELWIIPTYANSAWSIMAISFISLLVMSAVLAACFFARRHQIRRDRARLPQTREFHGMNSRLVKAMPSLIFTKVQEDDCTSATCAICLEDYSAGEKLRVLPCRHKFHAACVDLWLTSWRTFCPVCKRDANAGTPDPPVSESTPLLSSSAIRLPEPTASASFRSTVAAAASPPRPISRHPSPSRSISRKHSVSGSSIPGTPIPRFHASSSSPTCTSGSSLDLANMPSSPWPRASHLASAHSSCGGRLSPPIHIRNTSAAHVSRSAYGSPSRYVGSSHMSRGSPSCYYLGSSSGQQHPYLRHCTLSGTSLFTMVPQSPQQNQLQHGGDSEKDLSAAAPFRQLYYLQHCPDSGTSSQSLPGC

SEQ ID NO: 14694 - protein, 214 aa, Zea mays
  VARIANT 24: note = Ancestral polymorphism is S, Derived polymorphism is C
  VARIANT 30..214: note = Derived polymorphism lacks residues 30 to 214
  VARIANT 118: note = Ancestral polymorphism is S, Derived polymorphism is F
MDPTFRVLDIGSPPPPLKSSSRISRSLLCQRSYTRAAICSVCPALPGLVERRSALGSPHLRAGAVGSGGKQSNPPAAESGERGRMAEEDRQQRRRFANLRSVQCQIDLSILPASPGASVDKLRHAAADSRRRYVSLRRRLMVDPHLPKEEDRSSNLVVDNPLSQNPANECSIEVPGVLNVQRLQQLLLTLATLIKRELCDSSFLVIGYIMKKIL

SEQ ID NO: 14695 - protein, 278 aa, Zea mays
  VARIANT 51: note = Ancestral polymorphism is R, Derived polymorphism is C
  VARIANT 56: note = Ancestral polymorphism is V, Derived polymorphism is I
  VARIANT 61: note = Ancestral polymorphism is S, Derived polymorphism is N
  VARIANT 66: note = Ancestral polymorphism is R, Derived polymorphism is Q
  VARIANT 68: note = Ancestral polymorphism is S, Derived polymorphism is T
  VARIANT 76: note = Ancestral polymorphism is M, Derived polymorphism is T
  VARIANT 91: note = Ancestral polymorphism is V, Derived polymorphism is I
  VARIANT 92: note = Ancestral polymorphism is S, Derived polymorphism is L
  VARIANT 106: note = Ancestral polymorphism is L, Derived polymorphism is P
  VARIANT 107: note = Ancestral polymorphism is S, Derived polymorphism is G
  VARIANT 112: note = Ancestral polymorphism is S, Derived polymorphism is N
  VARIANT 117: note = Ancestral polymorphism is M, Derived polymorphism is I
  VARIANT 124: note = Ancestral polymorphism is L, Derived polymorphism is P
  VARIANT 154: note = Ancestral polymorphism is G, Derived polymorphism is V
  VARIANT 169: note = Ancestral polymorphism is S, Derived polymorphism is I
MTLHSTTLNFFFPGNGESLLQALSKETPRLWDQIVAMITRDRNSFGGLCTRRLDEVLRIISSCETQRSMQLLGDAMLQWMSHNQMKYLLPVSKRLKMLQAFIMSSLSVTKNSMYQMMQPQIDILLFEIIFPLMCFNDNDQKLWEEDPHEYVRKGYGEFTALYIIEDLYIPRTTAMDFVSELIRKRGKNNLQKFIHFIVDIFRRYDEAPADLKPYRQKDGALLAIGTLCDKLKQTNPYKTELESMLVRHVFPEFNSRVGHLRAKVEYISSSLVNNDIED

SEQ ID NO: 14696 - protein, 829 aa, Zea mays
  VARIANT 120..829: note = Derived polymorphism lacks residues 120 to 829
  VARIANT 166: note = Ancestral polymorphism is E, Derived polymorphism is V
MATVRSTLPPSLPPPSPSSPPAHTLAATSRHRKPLTTTAAGQAALQPSEAAALLTAAARARDIHLGRALQGHLLRTGSLLETDAVVANSLLTLYSKCSAVAAARSVFDGMPVGLRDLVSWTAMASCLSRNGAEAEALRLFGETLEEGLLPNAFTLCAATQACFASELFHLAGGAVLGLVFKLGFWGTDVSVGCALIDMFAKNGDLVAMRRVFDGLFERTVVVWTLLITRYAQSGYSDEAVELFLDMLENGFQPDQYTLSSMLSACTELGSFRLGQQLHSLALRLGLESDSCVSCGLVDMYAKSHNGQSLHNAREVFNRMPKHNVMAWTALLSGYVQRGSQDNQVMILFCKMLNEGIRPNHITYSSMLKACANLGDQDSGRQIHTHCVKSNLADLNVVGNALVSMYAESGSIEEARHAFDQLYEKNMVSFSGNLDGDGRSNTYQDYQIERMELGISTFTFGSLISAAASVGMLTKGQRLHALSLKAGFGSDRAIGNSLVSMYSRCGYLVDACQVFDEMNDHNVISWTSMISGLAKHGYAARALELFHDMIAAGVKPNDVTYIAVLSACSHAGLVKEGKEHFRMMQKHHGLIPRMEHYACMVDLLGRSGLVEDALDFINEMPCQVDALVWKTLLGACKTHNNMDIGEIAANHVIQLEPQDPAPYVLLSNLYAEAGLWDQVARIRSLMRDKNLMKEKGLSWMHVDNTIHEFRAGDTSHPQAEEIYTKLETLIREIKVMGYVPDTSVVLHDMSDELKELCLLQHSEKIAVAFGLISCTSATKPIRIFKNLRVCVDCHSALKYVSKATGREIILRDSNRFHRMKDGECSCGEYW

SEQ ID NO: 14697 - protein, 185 aa, Zea mays
  VARIANT 71: note = Ancestral polymorphism is N, Derived polymorphism is I
  VARIANT 90: note = Ancestral polymorphism is R, Derived polymorphism is S
MGQASRLVLLAVVALLSAGLLPQALGKGRGGRGHGGAVNPQVAGICSRTPFPEVCTSTAGRHASKYPVIDNLAVLNMQVDAFAKRTAQARKHVAKSARTIPPQQTQALTFCDTMYMNTQDTIGAAQRAITFKDTGTAKIMLQLAVQDFDSCDRPFTQAGVPNPMGKFDKELNQMANNCMALANMI

SEQ ID NO: 14698 - protein, 248 aa, Zea mays
  VARIANT 232: note = Ancestral polymorphism is A, Derived polymorphism is V
  VARIANT 220: note = Ancestral polymorphism is R, Derived polymorphism is H
  VARIANT 219..248: note = Derived polymorphism lacks residues 219 to 248
  VARIANT 145..248: note = Derived polymorphism lacks residues 145 to 248
  VARIANT 113: note = Ancestral polymorphism is A, Derived polymorphism is T
  VARIANT 91..248: note = Derived polymorphism lacks residues 91 to 248
  VARIANT 59: note = Ancestral polymorphism is R, Derived polymorphism is W
  VARIANT 51: note = Ancestral polymorphism is T, Derived polymorphism is N
  VARIANT 17: note = Ancestral polymorphism is R, Derived polymorphism is H
  VARIANT 5: note = Ancestral polymorphism is E, Derived polymorphism is G
MARRERVFKVVIKFAARADLHHLAMFLAGRQADAPQEALQVLDIVLRELPTARYSPVGRSFYSPNLGRRQKLDMSSTAFIEPLPMIDFVAQLLNRDILVRPLSDSDRVKIKKTLRGVKVEVTHRGNMRRKYRISGLTSQATRELSFPVDDRGTVKTVVQYFMETYGFSIQHTTLPCLQVGNQQRPNYLPMEVCKIVEGQRYSKRLNEKQITSLLKVTCQRPQERELDILQVVVYHMFYQCLHLMISNV

SEQ ID NO: 14699 - protein, 150 aa, Zea mays
  VARIANT 42: note = Ancestral polymorphism is S, Derived polymorphism is N
MATVLGSPRAPAFFFSPSSLRAAPAPTAVALPAAKVGIMGRSASSRGRLRAQATYNVKLITPEGEVELQVPDDVYILDQAEEDGIDLPYSCRAGSCSSCAGKVVSGSVDQSDQSYLDDGQIAAGWVLTCHAYPTSDVVIETHKEEELTGA

SEQ ID NO: 14700 - protein, 308 aa, Zea mays
  VARIANT 182: note = Ancestral polymorphism is G, Derived polymorphism is E
  VARIANT 72: note = Ancestral polymorphism is K, Derived polymorphism is R
  VARIANT 71..308: note = Derived polymorphism lacks residues 71 to 308
MMHKYIGSDVTSLVTLPVIIFEPMTMLQKMAELMEYCELLDKADECEDPYMRMVYASTWAVSVYFAYQRTWKPFNLILGETYEMVNHQGITFLAEQVSHHPPMGVAHCENEHFTYDITSKVKTKFLGNSLEFYPVGRTRVTLKKSGVVLDLVPPLTKVNNLIFGRTWVDSPGEMVMTNLTIGDKVVLYFQPCGWFDCRYPNEGSDGDNAPETSSDVSNESDNDNGRSIGRTTQCLAQNICTDQERLSSDDCDSSNQEPPPVFQYMEHDAPYGRQPLANMVSHIPDTNRTYATRSRCLLFNIPFTVNNT

SEQ ID NO: 14701 - protein, 368 aa, Zea mays
  VARIANT 254..368: note = Derived polymorphism lacks residues 254 to 368
  VARIANT 53: note = Ancestral polymorphism is G, Derived polymorphism is V
MGRGQALVIHGCSYVTAMTNDQDLEFELCHVKHFAFHDLQSATDNFNSKNILGQGGFGIVYKGCLRNGTLVVVKRLKDPDVIGEVQFQTEVELIGLAVHRNLLRLYGFCMTSKERLLVYPYMPNGSVADRLRDYRNGKPSLDWSKRMRIALGTARGLLYLHEQCNPKIIHRDVKAANILLDGNFEAIVGDFGLAKLLDRQESHVTTAIRGTIGHIAPEYLSTGQSSEKTDVYGIGILLLELITGPKTLSNGHGQSQKGMILDWVRELKEDKRLDKLVDRDLRDSFDILELECSVDVIIQCTQTNPMLWPKLSEILHALEANVTLAETSVELNREPLPYGVPCSSSMRHEDPHDSSSFIIEPIELSGPR

SEQ ID NO: 14702 - protein, 108 aa, Zea mays
  VARIANT 40: note = Ancestral polymorphism is A, Derived polymorphism is T
  VARIANT 1: note = Ancestral polymorphism is V, Derived polymorphism is M
MRNYRKNTLAVATASRSKAPTEEAASGAGPMYVKVSMDGAPYLRKVDIKMYSSYEDFSLALEKMFSCFIASQSGLHKSSSKDRLTNGSKVDALKDQEYVLTYEDKDAD

SEQ ID NO: 14703 - protein, 138 aa, Zea mays
  VARIANT 57: note = Ancestral polymorphism is L, Derived polymorphism is M
  VARIANT 56: note = Ancestral polymorphism is E, Derived polymorphism is D
  VARIANT 39: note = Ancestral polymorphism is R, Derived polymorphism is C
MATVLSSPRAPAFSFSLRAAPAPTTVAMTRGGGASSRLRAQATYNVKLITPEGEVELQVPDDVYILDYAEEEGIDLPYSCRAGSCSSCAGKVVSGSVDQSDQSYLDDGQIAAGWVLTCVAYPTSDVVIETHKEDDLIS

SEQ ID NO: 14704 - protein, 191 aa, Zea mays
  VARIANT 170: note = Ancestral polymorphism is L, Derived polymorphism is S
  VARIANT 65..191: note = Derived polymorphism lacks residues 65 to 191
MWIIGPSLSGGFILQMVCGSVPEAMSLAASLQYKKTQLCPLLVRRSVCRGFLLPSIRKILFLSPQKCFHSTFGQVNCKEMICSQLVLSGDSITEQPFAPVAAMSHWLTPARNCITTSMFHRACRFAMRKNKFMGSNKNQAKKIDINCDATLKSLFGGRDKVGMLEISKLLSRDFPKISKLLWSMEPGMALW

SEQ ID NO: 14705 - protein, 1322 aa, Zea mays
  VARIANT 583..1322: note = Derived polymorphism lacks residues 583 to 1322
  VARIANT 613..1322: note = Derived polymorphism lacks residues 613 to 1322
MPTQIPRAISTTEVPKTSSHAGGPMAAVAELERRVMAAVKASAERGDPPLLQAAEAARCIREAPAFTPGGLALSQALVANLCFAHNTAAMWKLLDQAMLSRLVDPLHTLALLTPRVVPNRREQPEAYMLYLELLGRYAVAPVYPERMENKDMLAKSIDGAMQLSHRFGFQHLDFGHTVILFVLSLVDMLIDCILDDCGLPVTSADEHGNRKDMNFNGKGRSFDRGDEHREHLRRKNILMSIEVVEKVTANKITQVFLRLVNRNTYDDRPENFNYLLRKLHLIGALKKKNALSPCNLLDSLIVNIQNAISTGYQLDRKRLLGVPVSIQPCSSAIYSIFVTGKGSCWIPFDMFMENAMDGRHLHTISSVEYLTELSKTLQVLNRATWQETFQALWISALRLVQRGPDASEGPFPHLDSRMCMLLAIIPLSIATIVKEEAGNLKGETTSVIRGQLVSSLQILRQFFGLLSPPPATVHLANAAARKAAVVLSNLKTGSENMYSSFKDSSSIKAVGNMLHLIVEACIARNLIDASAYFWPGYVVPLKESSPVQASPWSSLVEGSPLIELKDALMVTPASSVEELEKLYSFAVSGSPEEKLAASKILCGASLLRGWNIQEHVVQMVLKLLSTFLPLDSGSEGRYVQHMPMLHALVSGISSIDTVHILSLYGLVPEVASMLMPLCENFGSLPPSDHRSCKLEEASVYSVFSCAFLSLLRLWKFHRPPIESALSRRGVSVWSELRLDFLLLLRNSHSSLKNLSNVTQSSIFELDPPFQKPLYIDSFPKLRAWYFQNQACIASTLSSACSRTTVLHVANMILKIICHNKVPKGGVLSVNPQSTANSTTSSSPAGVQEDMCQWPTLPAWEILEAVPFVLEAMLTSCAHGRLSSRDLVTGLRDLADFLPASLAAIVSYFSAEVTSGIWKPVMLNGMDWPSPAATLPVVESEIKEALAFAGVHINICPRPRSAMPMLPLPIAALMSLSITVKMEEFSHLHGIISQGIEICATSSSWPTMQIIGALWSQKARRWHDFIILTCSQSPFTRDNTAVAQLIRSCFSSFLGPLVDGRSCSVANRGVANLLGQSSDEKAHRLAVAPGFLYMRSCRLFPNNTFVCEEILEVVIERAHALANDRSSDRPARLRSECLPLSAASSLVEQIASLAATMLCHAGGVNLIRLLYEQIMPTLLLSGGEAKLGSGGMVCSIIEGYTLAYVLLFSGATVWGVGETSPAYTLIYTSKRQRVLDRHLEFMARVMEGNIVLGCGDATWRSYVLCFVNLLVSFVPAWVPEVKLNTLQKLASGLRRWHEGDLALSLLELGGAKTVTSVVESLLR

SEQ ID NO: 14706 - protein, 726 aa, Zea mays
  VARIANT 379: note = Ancestral polymorphism is R, Derived polymorphism is I
MAATTSTAAAAVSFSLPSPPHCRGARRRRAPSLLRAASTAAPPSPDLSIQLSPRASPPASTNGAATALGPPVSASFARDRAEDLQAEARAMARAAGATVYSPELLAARYGSRPFKAGAPGSDLHQFWEVLSKLASFGVKVLLDERRGESSSERRRARAVELRTIFTRLGPTFVKIGQGLSTRPDLCPAEYLEELAELQDSLPTFPDEEAFACIERELGFTLDSIYSTISPSPIAAASLGQVYKARLKYSGKLVAVKVQRPSIEKAIGLDFYLLRGLGFLINKYVDIVTSDVVALIDEFARRVFQELNYVQEGQNARRFKKLYADKQDVLVPDIFWDYTSAKVLTMEWIEGVKLNQQAVIESQGLKVLDLVNIGIQCSLRQLLEYGYFHADPHPGNILATPEGKLAFLDFGMMSETPEDARVAIIGHVVHLVNRDYEAMARDYYALDFLEPDVDVSPIVPALKNFFDDALNATVSELNFKTIVDGLGAVLYQYPFNVPAYYALILRSLTVLEGLALYADPDFKVLAASYPYFAKRLLTDPNPYLRDALIELVFKDGKFRQVPAHLWNRLENLLVQGRQDREFAAKDALQPVLKLLLGPGGEELRALVVKEAVRVTEAIAIGTLVDSYNAAPSFLKPLISSGNLAEPFKFSETEQEQMMELRDQVFRVWGLLRSSNNFDPSLLQPIVQVLQEPEARVLGSRVAGGVTQRLAARLLQQLLRTPPAPGSS

SEQ ID NO: 14707 - protein, 235 aa, Zea mays
  VARIANT 56: note = Ancestral polymorphism is M, Derived polymorphism is T
  VARIANT 172: note = Ancestral polymorphism is S, Derived polymorphism is L
MALRTLASKKVLSFPFGGAGRPLAAAASARGVTTVTLPDLSYDFIALEPAISGEIMRLHHQKHHATYVANYNKALEQLDTAVSKGDASAVVQLQGAIKFNGGGHVNHSIFWKNLKPISEGGGEPPHGKLGWAIDEDFGSFEALVKKMNAEGAALQGSGWVWLALDKEAKKLSVETTANQDPLVTKGASLVPLLGIDVWEHAYYLQYKNVRPDYLNNIWKVMNWKYAGEVYENVLA

SEQ ID NO: 14708 - protein, 422 aa, Zea mays
  VARIANT 95: note = Ancestral polymorphism is A, Derived polymorphism is V
  VARIANT 10: note = Ancestral polymorphism is R, Derived polymorphism is H
MAAAAISLPRSPSLLQPTRRRSAPPACTQSERGVSFDPGSAFYRSDSAAGRDLAVLAATLHRRRGRPDPSAPFLCLDAMCGCGVRALRYLAQAGADFVWANDASEALRPIILANLCRFERGSPEAVAGCRRWVVSHNDATRLLAERYLRREYFDVIDVDSFGGDAAYVRAALLALKIGGLLYLTSTDWRSARGYGSRSSLSSYGAYVRPMPYPNEVGLRMVIGGAAREASLLGFHITPLFSYFAYHGPIYRVMVQLCNGKDDGISNYGFICHCKSCGQSQTFGFDELGQISCGCTDTTDADSITVVGPLWTGPLHDASFLTEMLGLANEWGWACTIENGVSLEKLLGMMIEESDPRLPPGYIRLDEISRRAKVNSPPLGTLINSLRKEGFSACRSHISANTIKTNCSMASCIDVARGIRNSR

SEQ ID NO: 14709 - protein, 503 aa, Zea mays
  VARIANT 431: note = Ancestral polymorphism is K, Derived polymorphism is M
  VARIANT 441: note = Ancestral polymorphism is V, Derived polymorphism is A
MGKAQWLSVALGCAAAVTCAVATALVARRAVARSRWSRAVAVVRRFEEDCATPTERLQRIVNSLSVEMFAGLASEGASKVRMLLTCVDTLPDGSEEGVYYSVDLGGTSFRVMKLELGPGSTIINKKVEHQPIPEDLTKGTSEDLFNLIALALKNFIGREGGGDEGRALGFTFSFPVRHISISSGSLIRWTKEFSIEEAVEKDVAQCLNEALVRNGLNLQVTALVNNAVGTLAMGHYYDEDTVAAVVIGAGTNASYIERNAAIAKSEGLLDKSDDITVVNVEWGSFRSPLIPLTPYDICTSEAKRNQYDQAFEKMISGVYLGEIARLVFQGMAQESDLFGPSVNCLSTPFVLSTPSLATIREDDSPDLRVVGRVLEEHLKMQDVPMKTRRLVVRVCDIVTRRAARLAAAGIVAVLQKIGRDGSLCGTTLVRKIRGEPKRSVVAIEGGLYQGYSVFKEYVNEAVDEILGDEIASTVSLRVMEDGSVIGAALVAASYSSSARKNSV

SEQ ID NO: 14710 - protein, 42 aa, Zea mays
  VARIANT 5: note = Ancestral polymorphism is G, Derived polymorphism is D
  VARIANT 6: note = Ancestral polymorphism is R, Derived polymorphism is K
  VARIANT 10: note = Ancestral polymorphism is R, Derived polymorphism is W
  VARIANT 14: note = Ancestral polymorphism is P, Derived polymorphism is L
  VARIANT 15: note = Ancestral polymorphism is V, Derived polymorphism is I
  VARIANT 16: note = Ancestral polymorphism is R, Derived polymorphism is H
  VARIANT 19: note = Ancestral polymorphism is Y, Derived polymorphism is C
  VARIANT 31..42: note = Derived polymorphism lacks residues 31 to 42
  VARIANT 33: note = Ancestral polymorphism is P, Derived polymorphism is H
MEVLGKVEHRNVLPVRAYYFSKDEKLLVYDYLPNGSLSAMHH

SEQ ID NO: 14711 - protein, 438 aa, Zea mays
  VARIANT 402..438: note = Derived polymorphism lacks residues 402 to 438
  VARIANT 398..438: note = Derived polymorphism lacks residues 398 to 438
  VARIANT 374..438: note = Derived polymorphism lacks residues 374 to 438
  VARIANT 342: note = Ancestral polymorphism is T, Derived polymorphism is I
  VARIANT 126: note = Ancestral polymorphism is C, Derived polymorphism is Y
MGEVHEADKNIEIWRVKKLIKALDAARGNGTSMISLIMPPRDQIARVTKMLGDEYGTASNIKSRVNRQSVLAAITSAQQRLKLYSRVPPNGLVLYTGTIVTDDGKEKKVTFDFEPFRPINASLYLCDNKFHTESLNELLTSDDKFGFIIIDGNGTLYGTLSGNSREVLYKFSVDLPKKHGRGGQSAVRFARLRMERRHNYLRKVAELATQYFINPGTNQPNIVGLILAGSADFKSELGKSEMFDPRLQAKVVKMIDVSYGGDSGFNQAIEMSAEVLSDVKFVQEKKLIGKYFEEISQDTGKYVLGIQDTITALEMGAVEILIVWENLDVRRYELKNSATGETVVKYLNPAQEADQSNFTDEATSGDLEVIDNTQLLEWFAENYHQFGCTLEFVTNKSQEGSQFCRGFGGIGGILRYPADVSAYQDGDLSDGEYDEDLE

SEQ ID NO: 14712 - protein, 235 aa, Zea mays
  VARIANT 1: note = Ancestral polymorphism is M, Derived polymorphism is V
  VARIANT 23: note = Ancestral polymorphism is E, Derived polymorphism is K
  VARIANT 132..235: note = Derived polymorphism lacks residues 132 to 235
  VARIANT 146: note = Ancestral polymorphism is T, Derived polymorphism is I
  VARIANT 152: note = Ancestral polymorphism is G, Derived polymorphism is V
MESMWGLGVRVRKDEKGLVTRDKVERCIKDVMDGDSKDKYRKSATMWMQKAKAAMQNGGSSDKNITEFIAKRPHAASSGRDSLHGGGVTLNREPLQGRHLHAISVYVSRILTVRETLLFAAEFRLPCALSSERKRVGVDQLGLFYTADTIIGNRGHHGTSSAAATCTRCVLVMQVAAWAWAWAAYTRSCTTTSLVYVSRPLGGGPSGGSSGSSSTARRGEEERPLPYGPGPDAHV

SEQ ID NO: 14713 - protein, 589 aa, Zea mays
  VARIANT 504..589: note = Derived polymorphism lacks residues 504 to 589
  VARIANT 470: note = Ancestral polymorphism is L, Derived polymorphism is F
  VARIANT 391..589: note = Derived polymorphism lacks residues 391 to 589
  VARIANT 365: note = Ancestral polymorphism is P, Derived polymorphism is L
MGGCFSVHGDVRGGMEGVGGGARTQGGAASSSAQQGGPNDAVDYFFQTRGLRGLYTPIELSFSASKLRNTDSFSKSDPMLVVYTNIKGKLEEIGRTEVILNSLEPSWITKVTMSYQFEIVQPLIFRIYDVDTKYHNTPVKTLNLTQQDFLGVACCNLSEIVTKFNRSLTLNLQSDCGHGLHGTMTVHAEESDSSRMAVEMTLRCVNLENKDVFSKSDPFLRISKLVETAGPIPICKTEVVPDNLNPVWRPITLTSQQYGSKDNPLLVECFDFNSSGDHELIGAFQTTITQLENLYTSKSAAIFYNHKGQRKMKEQLFVDKFQETVQHTFLDYISSGFELNFMVAIDFTASNGDPRVPQSLHYIDPSGRPNSYQQAMLGVGEVLQFYDNDRRFPTWGFGARVHGYVSHCFNLNTATNDSEVVGVEGIMSAYTSSLYSVSLAGPTMFGPVINKAADIASQSLQYSNNKYFVLLIITDGVLTDIQETKDCIVRASDLPLSILIVGVGNADFKQMEILDADNGKRLESSTGRIATRDIVQFVPMREVQGGEISVVQSLLEELPGQFLQYMRTRGIKPQRAPGLASAPVYPPQQ

SEQ ID NO: 14714 - protein, 451 aa, Zea mays
  VARIANT 243..451: note = Derived polymorphism lacks residues 243 to 451
  VARIANT 1: note = Ancestral polymorphism is M, Derived polymorphism is L
MGKEKSHINIVVIGHVDSGKSTTTGHLIYKLGGIDKRVIERFEKEAAEMNKRSFKYAWVLDKLKAERERGITIDIALWKFETTKYYCTVIDAPGHRDFIKNMITGTSQADCAVLIIDSTTGGFEAGISKDGQTREHALLAFTLGVKQMICCCNKVCFQMDATTPKYSKARYDEIVKEVSSYLKKVGYNPDKIAFVPISGFEGDNMIERSTNLDWYKGPTLLEALDQITEPKRPSDKPLRLPLQDVYKIGGIGTVPVGRVETGVIKPGMVVTFGPTGLTTEVKSVEMHHEALQEALPGDNVGFNVKNVAVKDLKRGFVASNSKDDPAKEAASFTSQVIIMNHPGQIGNGYAPVLDCHTSHIAVKFAELITKIDRRSGKELEKEPKFLKNGDAGMVKMIPTKPMVVETFSAYPPLGRFAVRDMRQTVAVGVIKSVEKKDPTGAKVTKAAAKKK

SEQ ID NO: 14715 - protein, 146 aa, Zea mays
  VARIANT 79: note = Ancestral polymorphism is R, Derived polymorphism is Q
  VARIANT 84: note = Ancestral polymorphism is A, Derived polymorphism is V
  VARIANT 89: note = Ancestral polymorphism is A, Derived polymorphism is T
MESTFGEDALKRNPLLSALVSNLHSVLAACRPSAAEVSTAATASEAEALAQEAEASDSLTRDGMPARPIVLLTYAEGIRTAGLAALIDALVAIGRCDVHVCAPKSYVTSGINTGSNCGYEKIDPPSISSKKVSGTKNYSIDAKDAK

SEQ ID NO: 14716 - protein, 451 aa, Zea mays
  VARIANT 25..451: note = Derived polymorphism lacks residues 25 to 451
  VARIANT 19: note = Ancestral polymorphism is G, Derived polymorphism is D
MGKEKSHINIVVIGHVDSGKSTTTGHLIYKLGGIDKRVIERFEKEAAEMNKRSFKYAWVLDKLKAERERGITIDIALWKFETTKYYCTVIDAPGHRDFIKNMITGTSQADCAVLIIDSTTGGFEAGISKDGQTREHALLAFTLGVKQMICCCNKVCFQMDATTPKYSKARYEEIVKEVSSYLKKVGYNPDKIAFVPISGFEGDNMIERSTNLDWYKGPTLLEALDQITEPKRPSDKPLRLPLQDVYKIGGIGTVPVGRVETGVIKPGMVVTFGPTGLTTEVKSVEMHHEALQEALPGDNVGFNVKNVAVKDLKRGFVASNSKDDPAKEAASFTSQVIIMNHPGQIGNGYAPVLDCHTSHIAVKFAELITKIDRRSGKELEKEPKFLKNGDAGMVKMIPTKPMVVETFSAYPPLGRFAVRDMRQTVAVGVIKSVEKKDPTGAKVTKAAAKKK

SEQ ID NO: 14717 - protein, 185 aa, Zea mays
  VARIANT 122: note = Ancestral polymorphism is G, Derived polymorphism is D
  VARIANT 112: note = Ancestral polymorphism is A, Derived polymorphism is V
  VARIANT 96: note = Ancestral polymorphism is R, Derived polymorphism is S
  VARIANT 83: note = Ancestral polymorphism is T, Derived polymorphism is S
  VARIANT 78: note = Ancestral polymorphism is W, Derived polymorphism is R
  VARIANT 76: note = Ancestral polymorphism is A, Derived polymorphism is S
  VARIANT 67: note = Ancestral polymorphism is R, Derived polymorphism is C
  VARIANT 60: note = Ancestral polymorphism is L, Derived polymorphism is F
  VARIANT 41: note = Ancestral polymorphism is R, Derived polymorphism is K
  VARIANT 40: note = Ancestral polymorphism is E, Derived polymorphism is K
  VARIANT 37: note = Ancestral polymorphism is R, Derived polymorphism is G
  VARIANT 19: note = Ancestral polymorphism is G, Derived polymorphism is S
  VARIANT 16: note = Ancestral polymorphism is V, Derived polymorphism is I
MGKEKSHINIVVIGHVDSGKSTTTGHLIYKLGGVDKRVIERFEKQAAEMNKRSFKYAWVLDKLKAERERGITIDIALWKFETTKYYCTIIDAPGHRDFIKNMITGTSQADCAVLIIDSTTGGFEAGISKDGQTREHALLAFTLGVKQMICCCNKMDATTPKYSKARYDEIVKEVSSYLKKSWIQP

SEQ ID NO: 14718 - protein, 80 aa, Zea mays
  VARIANT 59: note = Ancestral polymorphism is R, Derived polymorphism is H
MQNEEGKTVDLYVPRKCSATNRIITAKDHASVQINIGHLDANGLYDGHFTTFALSGFVRAQGDADSSLDRLWQKKADIKQ

SEQ ID NO: 14719 - protein, 134 aa, Zea mays
  VARIANT 1: note = Ancestral polymorphism is M, Derived polymorphism is I
MGRGRGRGKKQTTVRSHEDKGSSGEEVVPVKKRRGRPQKLFASKIDQADVENFVEQVDADQEEADDAKLKNNTTAGGTKRGRPLKEGSNIAVEDTNSTIRLSSDESMRTNGFRQIGSRRKNKPRRASETGLECK

SEQ ID NO: 14720 - protein, 212 aa, Zea mays
  VARIANT 58: note = Ancestral polymorphism is T, Derived polymorphism is A
  VARIANT 57: note = Ancestral polymorphism is A, Derived polymorphism is V
MACRTLELTLVSARDLRAVNLVSKMEVYAVAYEAGDPRSRQRVPADRAGGRNPTWNATVLLTVPASAGTGSRAVRILLRTERALGGDRDVGEVLLPLADVLAGAGDGPTTDATVACFPVRRIGGSSKPQGVLNLSYKLGGVVQPDHLAARTEGTPRVQAAGGPCPTMAYLAAAATAYSAARPPQDLPPTAYAAPPVGATSTSMRSSRWKLAA

SEQ ID NO: 14721 - protein, 280 aa, Zea mays
  VARIANT 40..280: note = Derived polymorphism lacks residues 40 to 280
  VARIANT 95..280: note = Derived polymorphism lacks residues 95 to 280
  VARIANT 161..280: note = Derived polymorphism lacks residues 161 to 280
MRCLSLREGKKSLPALHISQKLARNLYCVVSGAPRLAYEQFVFCDIFHQKKSGWRDCSFCGKCLHCGCVVSKNSYDLLDSGGIQCVTCMKNSAAQSASGQVVPKLFPCPNNLLFFGKSDELLSSRKFGQPPSLMLDSRNDDIAIVNKSNHLFMVSDIEAGQSSNILRQKEIENGPRQIKWEQPTLNIGDMGRPLLTRSQSALESPQCTRRDDNKDPITDSTTSESFPEACLSMNLGITNNGNRMEATSTAERSMLSPTTAIVEGRDLATALSPHKGLDIS

SEQ ID NO: 14722 - protein, 113 aa, Zea mays
  VARIANT 86: note = Ancestral polymorphism is E, Derived polymorphism is K
  VARIANT 18..113: note = Derived polymorphism lacks residues 18 to 113
MFLKKDILLCCTMNEKLSNYFLLVHQSLVIFFFFRVMQIRLMSFMRLLPQRLPQLIRQVEQDVETVIHVLQPGPIGIVEHKFTDTEILEARATVKRAVDNWRRNWTLEKNVGR

SEQ ID NO: 14723 - protein, 222 aa, Zea mays
  VARIANT 70: note = Ancestral polymorphism is R, Derived polymorphism is C
MASWILARSKAHPLAAALTRGAAYAAPPIAGARALSSLPHYPSAPSSHGLGKVLGYEPTSHVSGAQVLPRWFSSLPSNGSQVQKSRISETYNKSGGEMKQSDARKSSEEATPTPKVVAFSPQEAAIAEPRSSPLTIESWKVRRSEIATKVTFYMIPALLLVSKNSMSTSLLVGAVFHQVYMFQKEILLDYVHHDITRKWALIYLKLLVLVMAKNTIMYFHPF

SEQ ID NO: 14724 - protein, 462 aa, Zea mays
  VARIANT 61: note = Ancestral polymorphism is V, Derived polymorphism is I
  VARIANT 126: note = Ancestral polymorphism is L, Derived polymorphism is V
  VARIANT 259: note = Ancestral polymorphism is A, Derived polymorphism is T
  VARIANT 296: note = Ancestral polymorphism is A, Derived polymorphism is V
MPVEAVPLMAVGSGEPAVRSSAEAMPAAATMAAAAAAAVIRPGGSQSQQLDKSLILLVKCVMQHCVRAMEAGNTEASNNALAALSSVSSLDGDPIQRLTSAFTEALARRALEPLLQGLPWAIKEQLRRPPPPAYADVARQWFHTLSPLLRAAGLAANHAIVKALEGEQDVHVVDLGGANPRQWVELLRLLAARPGGAPSSSLRLTIVSDHACFLSCATGLLTAEATRLHVPLALNPVRSHIDNFSAAVIAALGVQRGQAVVISSTLQLHRLIADTTIVSHRHAGRQHDETMTRADALLHVLRDLSPKLLVLTEQEADHNDGEGRGLWDRVDSAFDYYAVLFNDLEVSRVPRESLDRAVVERLLLREEIVDIIARDGAARRERHEKLLRWVPRMLAAGFQPALVGMDGFKETTRLADRLSDGDGQRPLYRVVKVKEKGCFFVHSCWTPMFSVSLWQPAPGDHE

SEQ ID NO: 14725 - protein, 236 aa, Zea mays
  VARIANT 19: note = Ancestral polymorphism is A, Derived polymorphism is D
  VARIANT 31: note = Ancestral polymorphism is A, Derived polymorphism is S
  VARIANT 98: note = Ancestral polymorphism is S, Derived polymorphism is G
  VARIANT 171: note = Ancestral polymorphism is E, Derived polymorphism is D
MELSSAGRWTDLPEDIALAVASRLQEADVCALGGCSRTWRRACDADCIWERLFRCRWPAAVAEASASSSRMQGWKALYISQHRRMAAAISNVVEFVGGSLNNGSLESEYYLKAIADLAMILDIGFLDVQFFLFSRNHSAIINLIGLHYSIASLHVLPAEVSKALQAHRVSERMVCVNLLKLGRWFYGFRLPDEYESRKISLGELTTAEGAEILAILNRGAVHEVFRLRIGLVNVDK

SEQ ID NO: 14726 - protein, 317 aa, Zea mays
  VARIANT 293..317: note = Derived polymorphism lacks residues 293 to 317
  VARIANT 251..317: note = Derived polymorphism lacks residues 251 to 317
  VARIANT 215..317: note = Derived polymorphism lacks residues 215 to 317
  VARIANT 151..317: note = Derived polymorphism lacks residues 151 to 317
  VARIANT 120..317: note = Derived polymorphism lacks residues 120 to 317
  VARIANT 111: note = Ancestral polymorphism is T, Derived polymorphism is M
  VARIANT 90..317: note = Derived polymorphism lacks residues 90 to 317
  VARIANT 43: note = Ancestral polymorphism is R, Derived polymorphism is C
  VARIANT 15: note = Ancestral polymorphism is R, Derived polymorphism is W
MDDPSSASNKHKRKRGRKPKASPPSPDRSSPSPSVAPAPAGRRSRKPRRHEALADADATRPPSPPRREEPKPVANGGDVEAVAESGPASWDEVVRVVPCMDAVVKVFCVHTEPNISLPWQRKRQYSSSSSGFIISGRRVLTNAHSVEHYTQVKLKKRGSDTKYLATVLAIGTECDIEKYTKIIFYGIYETSEAIASFELWHGVSPIEFGTLPVLQDAVTVVGYPIGGDTISVTSGVVSRIEILSYVHGSTELLGLQSLKHEDAENIGYVIPTPVITHFIEDYKKSGEYTAHTQFDTLSFCASTPLGYMCMTYSSLCI

SEQ ID NO: 14727 - protein, 526 aa, Zea mays
  VARIANT 461: note = Ancestral polymorphism is I, Derived polymorphism is S
METATVVVTPAPVSITHPPQHKFMKSSPARKPAKKKLASGRGGYVLEDVPHLTDYLPELKSYRNPLQDHPAYSVVKQYFVGPDDTVAKKIVVHRSSARGTHFRRAGPRKRVYFEPDEVRAAIVTCGGLCPGLNTVVRELVCGLHDMYGVTSIYGIEGGYKGFYARNTVELTPRSVNDIHKRGGTVLGTSRGGHDTAKIVNSIQDRGINQVYIIGGDGTQKGAASVHEEVQRRGLKCAVVGVPKTIDNDIAVIDRSFGFDSAVEEARRAIDAAHVEAESAENGIGVVKLMGRNSGFIAMHATLASRDVDCCLIPESPFYLDGKGGLLEFAEKRLRDNGHMVIVVAEGAGQDLVAESTRFADTHDASGNKALLDVGLWLSQKIKDHFKKKPSFPITLKYIDPAYMIRAVPSNASDNVYCTLLAHSALHGAMAGYTGFTVGPVNGRQAYIPFYRITEKQNKVVITDQMWALVLCSTNQPCFLTHEDDVERALMMDEEEPHMPLVEGENALFANPSMCNGNGHLCNGHKA

SEQ ID NO: 14728 - protein, 234 aa, Zea mays
  VARIANT 156: note = Ancestral polymorphism is S, Derived polymorphism is C
MSAAAASSVTKFIKCVTVGDGAVGKTCMLICYTCNKFPTVECSHLFTTTSLFFLSSDYIPTVFDNFSANVSVGGSIVNLGLWDTAGQEDYSRLRPLSYRGADVFILSFSLVSRASYENVLKKWMPELRRFSPTVPVVLVGTKLDLREDRSYLADHSAASIISTEQGEELRKQIGAVAYIECSSKTQRNVKAVFDTAIKVVLQPPRRREVTRKKMKARSNQSLRRYLCGSGCFTS

SEQ ID NO: 14729 - protein, 221 aa, Zea mays
  VARIANT 71..221: note = Derived polymorphism lacks residues 71 to 221
MGPRSPSTSAGCPCSPPPAPSRPPSAPPRSRRCSRWSPVYFSRGAKAVVKYEPRALAVSVAASTLDLGKHEVNLTRLLPLSFEDLEDDGDSGFEKWSTSFRLSGPVRGARLNVTFSCSLLAGGGTSEQHRGGEVAGLRRGSMARAVSVQVPTPLPARSRGVRVLHEVLPSLRSARPVPSSVADGGPDARKEEVAAPDCTEEGSPEAKHCTSVEPVFVSFGG

SEQ ID NO: 14730 - protein, 161 aa, Zea mays
  VARIANT 138: note = Ancestral polymorphism is G, Derived polymorphism is C
  VARIANT 111: note = Ancestral polymorphism is G, Derived polymorphism is W
MDATPASKKATPAAAVADAVPLAAQQAAEQLSSPESVAGVRASGSEDDDEQVERFYALLDNIRAMRGMVSTGGAAPGRKRARDDEPPWRPAFRMEDFELEEFDSGSAGCDGGKKKRESSIAKRPADEEEQAEVVEAKGPRCGPRPPQSHKPRREGVRAVDT

SEQ ID NO: 14731 - protein, 262 aa, Zea mays
  VARIANT 117: note = Ancestral polymorphism is S, Derived polymorphism is L
  VARIANT 110: note = Ancestral polymorphism is P, Derived polymorphism is L
  VARIANT 97: note = Ancestral polymorphism is T, Derived polymorphism is I
  VARIANT 30: note = Ancestral polymorphism is G, Derived polymorphism is R
MAAEHHLPPEHADHHRGGRKGVRADDLKPGWWRRSPRYSYYYGGGEGGGAVRALCFAVLVLLLAAGITLLVLYVVYRPSHPTFAVTSAAVLALYNATANVAAGAGAGPAPATALAASFQFTLVLGNPSGRSAARYDRLAAYVAYRGEAVTAPTPMPPLAQDAGTAVAAAPVLGAGVAAPVPVSPDAAAALAADVANAVLPLRVVLLGRVRFVHEPFHRGWRSLYARCDLLIGVRKIGIGNGGAAGGVPLAPLLGDPSCNVDM

SEQ ID NO: 14732 - protein, 248 aa, Zea mays
  VARIANT 147: note = Ancestral polymorphism is I, Derived polymorphism is T
MAPTAPTQRPTMRHSSAFLLPSTAPSSPAPGPDDAAVAVVVLNQPLPRFAPLLWSRAAVRVCADGGANRVFDGMPALLPGQDPDEVRASYKPDGTRIVDESHDQDTTDLHKCIAFIAENYSATNKSNLSILVLGALGGRFDHEMGNINVLHLFPSINIVLLSDDCLIFLLSKMHTHEIHVEKSIEGPHCGLIPIGMPSTSTTTTGLRWNLDNTSMSFGGLISTSNIVEEDKVTVTSDSDLMWTTSLRK

SEQ ID NO: 14733 - protein, 189 aa, Zea mays
  VARIANT 10: note = Ancestral polymorphism is R, Derived polymorphism is C
  VARIANT 47..189: note = Derived polymorphism lacks residues 47 to 189
MGGSRRKLKRSRTKVRVGLPRRKPNEFKAAFELPEALAAAAGAGAGWDAEGSVVKNYAAFGVVANPNLLGAHSRGTPRLVQSAALQAPDVAAAHAPVPEFEPIDTGSDLEDDDLKSALGKKRKDGKSAPLQPLTKVQRVCIGRLIEKYGDDYKAMFMDTKLNAMQHSVGTLKKLCERHHVDGKIFVYPL

SEQ ID NO: 14734 - protein, 532 aa, Zea mays
  VARIANT 500: note = Ancestral polymorphism is S, Derived polymorphism is Y
  VARIANT 465: note = Ancestral polymorphism is W, Derived polymorphism is S
MGGPGRPWHRHVFLVVSLQLLLVAPWQDETAARALNFTRQDFPRAFVFGAGTSAYQYEGATDEDGRSPSIWDNFTHAGRMPDKSTGDLGADGYHKYKGDVQLMSDTGLEAYRFSISWSRLIPRGRGAINPKGLEYYNNLINELVKRGIEIHVTLSHLDYPQILEDEYHGWLSPRMVDDFEAYADVCFREFGDRVRHWTTMDEPNVNSIAAYDNGAFPPGRCSPPFGFGTNCTAGGNSSVEPYVVTHNCILAHAAVAALYTRSYRAEQQGVVGINIYTFWNYPFSPAPADVQATQRSLDFMIGWMVNPLVYGDYPQVMKRIVGSRLPRFTKRQSEMVRGTADFIGINHYTSVYVSDRPNDAAADTTGPRDYNADLSATFRFSRDDPATGQFVPINMPSDPQGLQCMLEYLSQTYNNIPVYVQENGYGALFNDSIHDHERAEYLSAYMGSALAALRNGANVKGYFVWSFLDVFELLAGYYSRYGLYHVDFQDPELPRTPKLSALWYSKFLKNEIDIIENVVSDTDDARSHAAEQ

SEQ ID NO: 14735 - protein, 475 aa, Zea mays
  VARIANT 279: note = Ancestral polymorphism is T, Derived polymorphism is I
MEANGAVDLEVDIIGPGAAGSKLTSVDDPDATECSSSFGDTLSGSEDGARPSEISDIEVDSPFCRYPSNCDAAALLDAAASDNSDRLLKKKKVTDHWRKYVSPLMWRCQWLELRMKDLQSQVSKYDKELAVLKHEKELQTKMIELDCSSSRSVPFSSLCCRKTMKRRRRKRNEDKIDTSSYISNHTVLSYFEIRVAFLISRFNCPAEKMEADGHSIEDNANLVDDNTKANNDADWLLGIEGGDTTVEQILLSIQAAQDRVFSLRSNLKQAMARKNKGITLKINTSVIGTHSSNCSPGKGKVAGLHERSPQDTSECDMDDSGMPDSALSSYGEASNMDIFESTMSLLSEGPHQMGEFRESSEDVLIDNQAAEEGYRNFEVISHPSKRLRVSVKREAGPHSEDESVAPVVGVKREETHEEATTSFSLHGAFLKPCFTGKRQERKPKKQMKRRRGGPTAAAAALISWRSKRIRKKKQL

SEQ ID NO: 14736 - protein, 338 aa, Zea mays
  VARIANT 31: note = Ancestral polymorphism is P, Derived polymorphism is L
  VARIANT 83..338: note = Derived polymorphism lacks residues 83 to 338
  VARIANT 100: note = Ancestral polymorphism is G, Derived polymorphism is R
  VARIANT 134: note = Ancestral polymorphism is G, Derived polymorphism is D
  VARIANT 139: note = Ancestral polymorphism is A, Derived polymorphism is V
  VARIANT 160..338: note = Derived polymorphism lacks residues 160 to 338
  VARIANT 301: note = Ancestral polymorphism is G, Derived polymorphism is R
MNALQILRETVRVLCGDPHTFTSILFLLLCLTSGCLLLSAAALVCALYSPPSTPAIGPVRDISTARHGRFPRIPHPPPPHLSWPWGFPASIAVAFPLTVRDTIGEEVLRMFLKERQLHDDFVTKISDMVWRRNGGNVDAVEATTDQGSAIEVAQPEDNWQNESDKRKELNLLKYEALKDELLLLTTGIGAACSLYCLLVFSLETDVSYALGVGFSCLYLQLLCQHADNLSKQDIPQVFLKKKVKKIGITSEDLKNTIEKTLGGGGVALSSPRLVIPTVIFGLSALIDHFKNSFFSFEVLPRMMGFLAYKVAALVQVYRDNEDLRLILHEEEDADREST

SEQ ID NO: 14737 - protein, 185 aa, Zea mays
  VARIANT 90: note = Ancestral polymorphism is F, Derived polymorphism is S
  VARIANT 99: note = Ancestral polymorphism is L, Derived polymorphism is F
  VARIANT 109: note = Ancestral polymorphism is S, Derived polymorphism is N
  VARIANT 114: note = Ancestral polymorphism is P, Derived polymorphism is L
  VARIANT 128: note = Ancestral polymorphism is S, Derived polymorphism is G
  VARIANT 135: note = Ancestral polymorphism is P, Derived polymorphism is T
  VARIANT 149: note = Ancestral polymorphism is E, Derived polymorphism is Q
  VARIANT 155: note = Ancestral polymorphism is P, Derived polymorphism is L
  VARIANT 156: note = Ancestral polymorphism is V, Derived polymorphism is A
MNLLGTGSEPRPRPGSPPSSPPTLVRTLARGCWLSRRPSGIGRWAAACRGGRRQAEGVGPQVWMATGGGRLAEGVGQQGWKTTESCFLEFSVKVLQDYLDAKFKEIGHNNMYSPHATPQLIVLLYVTSEILRLNPGYKTPENYKPVLRETKIPVPVCEILRLNPGYKTPENYKPVLRETKILVPV

SEQ ID NO: 14738 - protein, 162 aa, Zea mays
  VARIANT 12: note = Ancestral polymorphism is T, Derived polymorphism is I
  VARIANT 18: note = Ancestral polymorphism is Q, Derived polymorphism is H
  VARIANT 21: note = Ancestral polymorphism is N, Derived polymorphism is S
  VARIANT 31: note = Ancestral polymorphism is G, Derived polymorphism is A
  VARIANT 39: note = Ancestral polymorphism is V, Derived polymorphism is I
  VARIANT 41: note = Ancestral polymorphism is E, Derived polymorphism is K
  VARIANT 42: note = Ancestral polymorphism is F, Derived polymorphism is L
  VARIANT 48: note = Ancestral polymorphism is M, Derived polymorphism is K
  VARIANT 60: note = Ancestral polymorphism is F, Derived polymorphism is I
  VARIANT 63: note = Ancestral polymorphism is G, Derived polymorphism is V
  VARIANT 71: note = Ancestral polymorphism is A, Derived polymorphism is V
  VARIANT 76: note = Ancestral polymorphism is N, Derived polymorphism is T
  VARIANT 98..162: note = Derived polymorphism lacks residues 98 to 162
MGLEEYIKDVSTDDAAEQASNLRFQINILWGMLLYERSVVEFKLGLSMWEDCLMAAIEKFKLGGASATYIAVLVKNHYANETAQDGLGFKIDEIVQAWNEMTLIAETEKAADALQTAAAMNPFAQASLVEARKLVLVKEVYMKHWYSGKRSIYVLLLTSFCS

SEQ ID NO: 14739 - protein, 216 aa, Zea mays
  VARIANT 146: note = Ancestral polymorphism is A, Derived polymorphism is V
  VARIANT 140: note = Ancestral polymorphism is M, Derived polymorphism is T
  VARIANT 138: note = Ancestral polymorphism is E, Derived polymorphism is K
  VARIANT 123: note = Ancestral polymorphism is G, Derived polymorphism is E
  VARIANT 109: note = Ancestral polymorphism is A, Derived polymorphism is T
  VARIANT 87: note = Ancestral polymorphism is S, Derived polymorphism is G
  VARIANT 78: note = Ancestral polymorphism is R, Derived polymorphism is C
  VARIANT 77..216: note = Derived polymorphism lacks residues 77 to 216
  VARIANT 76: note = Ancestral polymorphism is A, Derived polymorphism is T
  VARIANT 62: note = Ancestral polymorphism is A, Derived polymorphism is V
  VARIANT 60: note = Ancestral polymorphism is L, Derived polymorphism is P
  VARIANT 56: note = Ancestral polymorphism is R, Derived polymorphism is C
  VARIANT 50: note = Ancestral polymorphism is S, Derived polymorphism is R
  VARIANT 40: note = Ancestral polymorphism is V, Derived polymorphism is M
  VARIANT 36: note = Ancestral polymorphism is V, Derived polymorphism is M
  VARIANT 35: note = Ancestral polymorphism is S, Derived polymorphism is F
  VARIANT 19: note = Ancestral polymorphism is D, Derived polymorphism is Y
  VARIANT 4: note = Ancestral polymorphism is D, Derived polymorphism is G
MTRDPNLLEFVRADAVFLDTTYCNPKFTFPSQEDSVDYIVNAIKRVKEESSVSGERVLCLIVTYVVGKEKILLEVTQRCGCSIHVDSRKMKILTLLGFGGKNSVFTEDATGTDVHVLGWNLLGETSPYFQPNFVKLKEIMMERGYAKVVGFVPTGWMYETKKEGFAVRVKDSLEIHLVPYICRASAAFSVSAISVLEIKNLSSSYLPEKIEKLKHI

SEQ ID NO: 14740 - protein, 199 aa, Zea mays
  VARIANT 149: note = Ancestral polymorphism is L, Derived polymorphism is I
  VARIANT 147: note = Ancestral polymorphism is Y, Derived polymorphism is C
  VARIANT 8..199: note = Derived polymorphism lacks residues 8 to 199
MAEVEQPQDAVKLFNRWTFDDVQVNDISLNDYLAVTAAKHATFLPHSAGRYSKKRFRKAQCAIVERLTNSLMMHGRNNGKKVMAVRIMKHTLEIIHLLTDANPIQVVVDAIINSGPREDATRIGSAGVVRRQAVDISPLRRVNQAIYLLTTGARESAFRNIKTIAECLADELINAAKGSSNSYAIKKKDEIERVAKANR

SEQ ID NO: 14741 - protein, 112 aa, Zea mays
  VARIANT 76: note = Ancestral polymorphism is A, Derived polymorphism is P
  VARIANT 66: note = Ancestral polymorphism is P, Derived polymorphism is S
  VARIANT 46: note = Ancestral polymorphism is R, Derived polymorphism is Q
  VARIANT 40: note = Ancestral polymorphism is R, Derived polymorphism is C
  VARIANT 36..112: note = Derived polymorphism lacks residues 36 to 112
MTIANNKVGLIIGKGGKTIKSIQAKSGARIQVVEIWGMICMVVTARIVMPRAMVRLSTGRILFSMPEQAVSFLGGANSIFVNEKLLTTVNNNFDMDHAMFTFRSPIYAYAIY

SEQ ID NO: 14742 - protein, 140 aa, Zea mays
  VARIANT 60: note = Ancestral polymorphism is L, Derived polymorphism is M
MAATALSMSILRAPPPCFSSPLRLRVAVAKPLAAPMRRQLLRAQATYNVKLITPEGEVELQVPDDVYILDFAEEEGIDLPFSCRAGSCSSCAGKVVSGSVDQSDQSFLNDNQVADGWVLTCAAYPTSDVVIETHKEDDLL

SEQ ID NO: 14743 - protein, 451 aa, Zea mays
  VARIANT 49: note = Ancestral polymorphism is L, Derived polymorphism is F
  VARIANT 29: note = Ancestral polymorphism is P, Derived polymorphism is L
MLLKFRDFARCFVGSERAPASAARVSAAPSSAVVAAVPVHLPDNDDLLLEILLRLPPLPSSLPRASLVCRRWRRVVADPDFLRRFRRRHARAAPPLLGYFSSGPHGPVFAPTLAPPDRVPPERFSFSPPRPRPPAGERLFLLGCRHGLALLIDRRRLEAVVWNPVSGRRAAVAYPPELTTDNGAHCCRGTVLSASASAAVDDEGDGGHYLRPFKVVLVRTDVGDGGRIRVLVCVYASETARWGHAVSTVVPSSSVSNLPSVLVRDALCGFLLWPNGILEYDLERHSLGVVRTPKRRHPIDRSFFQVVRAQDGELGLAILTELGMEMELWARRRKASSCASDGGGDVDGGWVLEKTIRLDSLLSLPRRSSSTMDDGILLSARILGFDEDNNVIHVSTCTGAFAIRLDDSMQFTELFEVSRIGSYHSCHPYAGFYTGGGVPGLLTNSNYICSE

SEQ ID NO: 14744 - protein, 93 aa, Zea mays
  VARIANT 30: note = Ancestral polymorphism is E, Derived polymorphism is D
MARAASSYVSRRGLSAAMTVAAESVKKVEEKAVKLGTVAKDIASAMATTTEEKTAFWEPDPETGYYRPVTGTKEVDAADLRAEMLKRRILQDD

SEQ ID NO: 14745 - protein, 173 aa, Zea mays
  VARIANT 68: note = Ancestral polymorphism is S, Derived polymorphism is Y
  VARIANT 31: note = Ancestral polymorphism is D, Derived polymorphism is H
MLAHRLLLLLAVAAASGTAFAKPTAYEALADYDFPPGILPKGVVAYTLDNATGAFTATLDASASGSGSSVCEFSIQGSYSLRYQTKITGKIAPDHLTDLEGVSVKVLFFWLNIVEVTRRGDNLEFSVGIVSADFGIENFLECPTCGCGFDCNNLLMLQKPGAATAKLRLRGAF

SEQ ID NO: 14746 - protein, 110 aa, Zea mays
  VARIANT 84..110: note = Derived polymorphism lacks residues 84 to 110
  VARIANT 60..110: note = Derived polymorphism lacks residues 60 to 110
  VARIANT 35: note = Ancestral polymorphism is V, Derived polymorphism is M
MASAAVPLAASSGSAASVATAGLTALHASSFILSVSWRGSQRIFYSHTVLTQKSRWAPCGSPRTSSSSSNVRFFRASGGGLKVQCSLWPPAQMQWNHATQGQSCEELVPN

SEQ ID NO: 14747 - protein, 115 aa, Zea mays
  VARIANT 13: note = Ancestral polymorphism is R, Derived polymorphism is H
  VARIANT 14: note = Ancestral polymorphism is K, Derived polymorphism is N
  VARIANT 25..115: note = Derived polymorphism lacks residues 25 to 115
  VARIANT 63: note = Ancestral polymorphism is V, Derived polymorphism is F
  VARIANT 72: note = Ancestral polymorphism is Q, Derived polymorphism is P
  VARIANT 104: note = Ancestral polymorphism is M, Derived polymorphism is T
MAAARDETKRCLRKFDANSDEQISQSGLVALFEDQYFAIEFMSGLYVQSLQISSVKLNANRLVIGTLRGFDQFMNLVINNTVDVSGNYNTHNGMVFIRGNRVVMIEALELISKSQ

SEQ ID NO: 14748 - protein, 197 aa, Zea mays
  VARIANT 158..197: note = Derived polymorphism lacks residues 158 to 197
MSTAGSGSLRPAVVEDTGRHWAPHGPVLTACVVAINVLMILLVFVFFWRYFSGKRGPSASSGGGDGDDDDASSSASLPVASPWAWSSRRRSSKDHGPQPVDDDVASALPVYVYSSSAGGEGGKAPECAVCILELRDGDSARLLPRCGHRFHADCVGAWLRLHATCPLCRASVVAPRAVAAADGSSRDAKDDGADCLV

SEQ ID NO: 14749 - protein, 353 aa, Zea mays
  VARIANT 143..353: note = Derived polymorphism lacks residues 143 to 353
  VARIANT 161: note = Ancestral polymorphism is S, Derived polymorphism is R
  VARIANT 180: note = Ancestral polymorphism is G, Derived polymorphism is R
  VARIANT 285: note = Ancestral polymorphism is Q, Derived polymorphism is L
MRQISSLLQGLARSLSVGRDRDRDRDRKGNGAGDRKTAVPAVLRTSGTLWGDGSDTFAAVCSRRGEKGINQDCSIVWEGFGCQEGTIFCGIFDGHGQWGHYVAKAVRDSLPPSLLCHWQEALALASLIDDGEKKLGDCQFDLWKRSYVAACAAVDDELRRSRRLDAVQSGCTALSIVKQGDLMIVANVGDSRAVLGTTSDDGAIAAVQLTVDLKPNLPQEKERIRRCNGQVYCLADEPGVHRVWQPSRESPGLAMSRAFGDYCVKDCGVISTPEVTQKRISSSDQFIILATDGVWDVLSNDEAVHIVAGTPDRAKAAKRLVECAVRAWRRKRRDIAVDDCSAICLFFHPPPPS

SEQ ID NO: 14750 - protein, 328 aa, Zea mays
  VARIANT 276: note = Ancestral polymorphism is T, Derived polymorphism is R
  VARIANT 248: note = Ancestral polymorphism is P, Derived polymorphism is S
  VARIANT 106: note = Ancestral polymorphism is G, Derived polymorphism is D
MAHGFARPRPTIDDTFLELRARRSGASSLAAPSVADTLRADQRRAEYILRRVSGHGSGAPQLWDSKAAATTTVPASWGYDIDTLNYVVTASLGTPGVAQTMEVDTGSDLSWVQCKPCAAAPSCYSQKDPLFDPAQSSSYAVVPYGDGSNTTGVYSSDTLTLSASSAVQGFFFGCGHAQSGLFNGVDGLLGLGREQSSLVEQTAGTYGGVFSYCLPTKPSTAGYLTLGGPAGAASGFSTTQLLPSPNAPTYYVVMLTGISVGGQQLSVPASAFAGGTAMTQLLKGINSYMSSLKVPTLSENKNAACLAEQLTRQFKGQECTNTSVQGGH

SEQ ID NO: 14751 - protein, 161 aa, Zea mays
  VARIANT 49: note = Ancestral polymorphism is Q, Derived polymorphism is H
MPRAIGGGAAYKGGIKGYWKRRGYDRIDAAAAQRRPRLPTAELGGGEAHPQPAGGRRRRGWRVRRRAGVLGRRLLRALSPRRLLARLRDAYVNAMLRLASSAAVAGYGGAGPYCTAADPFARPRPLTREYDEKALVEIYRSILARGEAGPVVAAARLPAVL

SEQ ID NO: 14752 - protein, 86 aa, Zea mays
  VARIANT 41..86: note = Derived polymorphism lacks residues 41 to 86
  VARIANT 26: note = Ancestral polymorphism is N, Derived polymorphism is H
  VARIANT 8: note = Ancestral polymorphism is L, Derived polymorphism is F
  VARIANT 5: note = Ancestral polymorphism is G, Derived polymorphism is D
  VARIANT 1: note = Ancestral polymorphism is M, Derived polymorphism is I
MQPEGGGLPEGGVLQHIEKDFGSFTNFREEFIRSALQLLGYGWVWLVFKRNERKLSVVHTRNVIFPLAFGDIVCSYTKNDIEPPKS

SEQ ID NO: 14753 - protein, 644 aa, Zea mays
  VARIANT 380: note = Ancestral polymorphism is G, Derived polymorphism is R
MISARTAAASPASLWKQGGRSEGGGSCDGCRTYRNTLRRAAAAKVRALPSRAVEAVKMGSAAEMEQEEAEVAAAAAGVVVEDHYGEDSATEELPILPWAFSVASGYTLLRDPHHNKGLAFMEKERDAHHLRGLLPPAVVPQELQIKKIMHNLRQYQVPLQRYMAMMDLQERNERLFYKLLIDNVEELLPVVYTPTVGEACQKYGSIFRQPQGLYVSLRDKGKVLEVLRNWPHRNIQVICVTDGERILGLGDLGSQGMGIPVGKLALYTALGGVRPSACLPITIDVGTNNEKLLNDEFYIGLRQKRATGEEYHELMEEFMAAVKQIYGEKVLIQFEDFANHNAFNLLAKYSKSHLVFNDDIQGTASVVLAGLLAALKVVGRTLAEHTYLFLGAGEAGTGIAELIALEISKQTSAPIEECRKKIWLVDSKGLIVDSRKNSVQSFKKPWAHEHEPLTTLYDAVQSIKPTVLIGTSGVGRTFTKEVVEAMASFNERPIIFSLSNPTSHSECTAEEAYNWTQGRVIFASGSPFDPVEYDGKVFVPGQSNNAYIFPGFGLGLVISGAIRVHEDMLLAASEALAAQATQENFDKGSIFPPFTNIRKISARIAAAVAAKAYELGLATRLPPPRDLVKYAQSCMYTPVYRNYR

SEQ ID NO: 14754 - protein, 257 aa, Zea mays
  VARIANT 88..257: note = Derived polymorphism lacks residues 88 to 257
  VARIANT 103..257: note = Derived polymorphism lacks residues 103 to 257
MDAADVWGRSSSSSSSSAAAARRLQARYDLYMGIDDADAGLDEVTEPRGGAESYNCPFCGEDFDFVGLCCHIDDEHAVEAKSGACPICATRVGMDLIGHLTMQHGSYFKMQRRRRVRKVSSGSHSLLSLLRKDLRNGSLQSFLGGSSYVSNPPAAAPDPFVSSLICTLPVAEPSKDLHSDSSDNNFLLNKFPDEKPVERYVTSSLSFLLPHSSPSLPRYHWIWAEPSLSEKDQKERVQRSKFVRGLVLSTIFDDDNL

SEQ ID NO: 14755 - protein, 593 aa, Zea mays
  VARIANT 429..593: note = Derived polymorphism lacks residues 429 to 593
MIFLLMGFESSSLPAMASAVERRREEHARRSRSPARGRERRGTPPRRRSSPERRKGSPARARSPAAKSSASHRDRERSPPREKVKERVRSPESPAKVSLLHKGRERSSPREKAKDQRVRSPKRKQEQSRSPSPARRHFSRSPSPRSKRTRGAQGEREAVQFTGSDRRKASHREEQDTLRHREHDEGRDASRDRKVDREAVHVTNGDRRKPSHGEERDSWGKHREHDEGRVASIDRKSDREDTRGTAKDKKYVRDDEKDHSRERGAGRDDKYGASKVALPVWDDDRHGRPNRGDWKSASSREQRLDSGDRRDSTRVKPTDHDGSNGGSGRSFRHGRSMSPEEHRHRGRHESHPSSRVSRSAAHIEDINSRGGEASRNGDPDALATMNATAEALEAKEKQKPSFELSGKLAEETNRVAGVNLLYSEPPEARKSEIRWRLYVFKDGEPLNGISLLLYSVCDIFLYVMVSIKPLYVHRMTCYLFGRERKVADVPTDHPSCSKQHAVLQYRLVEKEQLDGMMTKKISNALPDFIISVLLYHTILFDRPYLMDLDSTNGTFINGNRIEPRRYYELFEKDTIKFGNSSREYVLLHENSTE

SEQ ID NO: 14756 - protein, 223 aa, Zea mays
  VARIANT 199: note = Ancestral polymorphism is T, Derived polymorphism is I
MEREEELPSSSSSLGYMMQCRVCHEEEDQGRATMESPCGCSGSLKYAHRGCVQRWCDEKGSTLCEICLQNFKPGYTMPPKKTPVVETAVTISEHEDMQHLEPPEGLVDGADYTRCSYAADQCATWCRSLAITFTIVTLAWHLVAVATAEAAEHCAFSLLTMYLLRAAGILLPLYLVMRMIGVVQSGQRQYRLQLLEVRTKKKCINYMNYMRVQEEDQLVINIH

SEQ ID NO: 14757 - protein, 634 aa, Zea mays
  VARIANT 259: note = Ancestral polymorphism is A, Derived polymorphism is G
  VARIANT 199: note = Ancestral polymorphism is A, Derived polymorphism is V
MAVKPTSIIAASATARHGDQQVATALLGAAGALCHDSDAVSVPGVLPPRSHHHLHRTHCPLSPLLPHSSCPPHLPAPLPPPHLTSVSARIAGVVLLPRGVFPLLPPRSRYVMGSPLLATPACGAYDVLWGFAAGRFLSILAASDEDQGSSEQEAAASNPEGVDRVCAAIADVVASGADANLEAALSALSPPLCEAVVLAVLHRFKHAHRPSYRFFRWATVSGGFTHTTITYCKMLHILGKTRQFESMVAMIQEMGKAGALSMDAFKVAIKSFAAAGEIKNAVGVFELMRKNGFDDGVESFNCLLVALAKEGLGREARQVFDKMHGQYSPDLRSYTALMLAWCNARNLVEAGRVWNEMLEKGMDPDVVVHNTMIEGLLRGQRRPEAVKMFELMKAKGPPPNVWTYTMLIRDHCKQGKMDMAMECFEEMQEAKCQPDVATYTCLLVGYGNAKQMDRVTAVLEEMTQKGCPPDARTYNALIKLLTNRNMPDDAARIYKKMIKKGLEPTIHTYNMMMKSYFVGDSNYAMGCAVWEEMHQRGICPDVNSYTVFINGHIRHGRPEEAYKYIEEMINKGMKAPQIDYNKFAADFSKAGKPDILFELAQKVKFAGKLDVSNVFYQWADRMKSRVKRNVPSDW

SEQ ID NO: 14758 - protein, 998 aa, Zea mays
  VARIANT 376..998: note = Derived polymorphism lacks residues 376 to 998
MQQQMAATVEEQMMVKAIREESPWEVLPKRIQAALVSKEEWHRRVVDYCIRKRLPWSSCFARKVCKEGDYYEDLMRYLRKNLALYPYHLADFICRVMRISPFRYYCDVLFEAMKNEQPYDSIPNFSAADALRITGVGRNEFIDIMNKCRSKKIMWKLNKSIAKELLPAEPADLAIEPWWGVRFVNFTLEEFKKLSEDETSAIDKICKEEVNSYVLFDPEVVRGLYRRGMVYFDVPVYPDDRFRVSRLEGFVSNKDQSYEDPIEELLYAVFVVSSENATVAELATTLQADLYQLQAAASFACRLGWAVKLLDTDSVLRDSSTPALSNNILSDEVESSRTSVASEKSGHELLSSDSDGHKNSGMAYVGFIVDANVTSYLMMGSLSPGLKSHAVTLYEAGKLGESCIADLCNDLASLEGKRFEGVLQEFANHAFSLRCFLECLLSGGTPTETADLTTSEANNQESSVQDGLDTTCAKENKGNGGVNNAAENSTQISESSDGGQLSLQDNKMGDSDAADANRSSASSTIVSEGKESILKHDCDSVQAPKLGASAANGPSSKSKRSYRVNILRCESLASLAPSTLERLLARDYDIVVSMIPLPSSSVLPCPSGLVHFGPPSYSSMTPWMKLALYTSGTCGPVSAVFMKGQRLRLLPEPLASCEKALIWSWDQSVVGGLGGKFEGNLVKGSLLLHYLNSMTKHSAVVVQPLSEHDLDETGSIVTIDVPLPLKNADGSIPSTVVGTDLPEDQVSSLILLLEDLSNRVELSTVGYLRLLRLHRANESSEHGSFEWVPLTIEFGIPLFSPQLCERICERVVESQMLQKDDIAEHYETMQNVRRRLRELCTEYQATGPTARLFNQRGGSKNTSPRKLVQMVSGRWSPFHDPSTPTHSSSPPAEHDRAKPARRQRCFTEVLSFDGRILRSYALTPVYEAATRSVSEEQPTTPAAKPDHEDANTKDVALPGVNLIFDGTELHPFDIVACLQARQPLSLIAEASATSLAMK

SEQ ID NO: 14759 - protein, 681 aa, Zea mays
  VARIANT 33: note = Ancestral polymorphism is A, Derived polymorphism is S
MVCDIKCGTMLSELVQVASLIIWDEALMTHRFAFEALDRSFRDILASSSPIAKDLPFGGKNMRLLMPSLSQEERQELSQFSKWMLDVGEGKIDATSQEGEDEPTWIEIPQELLLMPQGIHKSKNVLIPRISLTLKNTKWPFVLQRRQYPIKIYQVTMLFTPVAELHPQSTNVVIRVCVIRKWEFRGATNDGPLQHINLVLADEQGTSIHAEIAAALAVDKGSLIEIEKVYELKRFRVTPSRNYFKPVDNNFMIQFTLYTQAKVVKDPPQMFPRYIYKLTSFENIEDNIDNRTYLIDVLGMLTQIDPPHLIGYNNSTIIRDIYIKNASDMSLKITLWGNQASNFSISDVYNQSINQPIVILLVGFLAKRFKGQPYLSGTTASSWYFNPGIPEAQTYYSRLQNNDLQLIQPTAAEEEIQVSQPPNLEHKTVEELLDIDPDMFPPEGYRCTVTISRIVQNSKWWYPSCSRCHKSSSQTSTGYHCTSGGCTDINFRYKLSFIATDGTCEAEFFCFDSIARKIVGKPCDNLVTAVTTSQGPPAALAAIVCLKFTLAVAINMSAYSVTNRVFSILSILTNHGRQSFIPSNMPSHPQQELHTQDEIPSLPTTQDSPATSMAKLSTCSNEKNEARRVLIYSDMPHDTEGDDQHISEVNNQELSSPPKRIKHSHTNKGAPDLTDPKKKSS

SEQ ID NO: 14760 - protein, 236 aa, Zea mays
  VARIANT 220..236: note = Derived polymorphism lacks residues 220 to 236
  VARIANT 217: note = Ancestral polymorphism is P, Derived polymorphism is L
  VARIANT 209: note = Ancestral polymorphism is P, Derived polymorphism is L
MQITSVDRYIKYHVQEFERAFRERFTACTLAAKRNIDSTTTILDVQGAGFKNFSKTARELVHRMQKIDSDYYPEVIILFNVRIDLRSNSHFAPKGVDIYFLLVEGFKNFSKTARELVHRMQKIDSDYYPEVLGSNYQSMLLEVIDSSVIALALDLRLEQLLVFCRGMSSSLQLSALLQSITNRGGSCFKTVEQIAKFIWAQQRLVQWRPCEWWLSGPPVQAPSRRNGYIRINYYDV

SEQ ID NO: 14761 - protein, 113 aa, Zea mays
  VARIANT 13: note = Ancestral polymorphism is R, Derived polymorphism is H
  VARIANT 7: note = Ancestral polymorphism is S, Derived polymorphism is R
  VARIANT 3: note = Ancestral polymorphism is S, Derived polymorphism is Y
MASGQESREELARMAEEGQTVVPGGTGGKTLEAQEHLAEGRSHGGQTRSEQLGHEGYSEMGSKGGQTRKEQLGHEGYSEMGRKGGLSTMQESGGERAAREGIEIDESKFRTKS

SEQ ID NO: 14762 - protein, 139 aa, Zea mays
  VARIANT 25: note = Ancestral polymorphism is A, Derived polymorphism is T
MEQQTISIAKAAITIILILGTSFLAAANPIARCYDALKCSLCYSALHMLKVTRILFASIQKLGMNSPMQNGNSCGGFYNGSFMQEVSTLELKHTSWIRLKPYEPWADGMWPARKPDAPEVPEAPRVTDRRTRMVRRGGS

SEQ ID NO: 14763 - protein, 219 aa, Zea mays
  VARIANT 151: note = Ancestral polymorphism is Q, Derived polymorphism is L
MKTLISSTPVASSAPAPCSPPPAATTALRPLPLASLHCPAPPLVDRPSPTDEELVSYYLRRRVLGHRLRVDAIAEIDLYRLEPWDLPSLSRIHSRDAQWYFFARLDRKVAGAGAGGRGGPGNMTYRATPRGYWKTTGKDREVHHRGKPVRQLGNMLLPWTRSRTSVAAVATMLAAAATIFITFVICFYLFLCAKRYRGATLTISGDRARPRYVFDHQRR

SEQ ID NO: 14764 - protein, 54 aa, Zea mays
  VARIANT 18: note = Ancestral polymorphism is L, Derived polymorphism is P
  VARIANT 29..54: note = Derived polymorphism lacks residues 29 to 54
  VARIANT 33: note = Ancestral polymorphism is T, Derived polymorphism is I
MAMGGPLEDAHWKYGHRLVGRNGSCFSEWQMFIGNLLTSYKITWWCHVAIKFFT

SEQ ID NO: 14765 - protein, 394 aa, Zea mays
  VARIANT 42..394: note = Derived polymorphism lacks residues 42 to 394
MSSDDEVREEKELDLSSNDVVTKYKAAAEILNNALKIVVSQCKPKVKIVDLCEKGDSFIREQTGNVYKNAKRKIERGIAFPTCVSVNDTVCHFSPLATDDAVLEENDMVKIDMGCHIDGFIAVVAHTHVITNGPVTGRAGDVLAAANTAAEVAMRLVRPGKKNKDVTEAIQKVAAAYDCKIVEGVLSHQLKQFVIDGNKVVLSVSNADTKVDDAEFEENEVYAIDIVTSTGEGKPKLLDEKQTTIYKRAVDKNYHLKMKASRFIFSEISQKFPIMPFTARALEEKRARLGLVECMNHELLQPYPVLHEKPGDLVAHIKFTVLLMPNGSDKITSHPLQELKPTKSIEDNAEIKAWLALGTKSKKKGGGKKKKGKKGDAAEADPMEEATNGATSQE

SEQ ID NO: 14766 - protein, 369 aa, Zea mays
  VARIANT 134: note = Ancestral polymorphism is R, Derived polymorphism is W
  VARIANT 139: note = Ancestral polymorphism is R, Derived polymorphism is H
  VARIANT 157: note = Ancestral polymorphism is R, Derived polymorphism is M
MVVSSSGGAGGVEGGSGCGVSASVPPVVSSSGGAGEVEGGDGGSAAVSGCRRRVKGSWTPEEDELLRRAITRHGPRNWTVISSEIPGRSGKSCRLRWCNQLSPSVERRAFTPEEDAIIVAAHAQHGNRWATIARMLHGRTDNSVKNHWNSTLLRQRRAAAAHASAAGCALQLRPATTASVPLRHLLDRPKEAAASVSFRRLDPKAEEEEDEDMDEGGSSSEDSAHRHRSLSPAPVEPLTLNLFSDGAHGLPTPAPAPAPQGTAARTEGAAMRRKAKLEQDPWLSGGVHGAPAPAPQSAAARTEGAVVTRMKTKLEHDPWLVTLVRQMISVEVERQMHGVGPQARSSAGGGGGADGDGVNGQDTSMDVDP

SEQ ID NO: 14767 - protein, 321 aa, Zea mays
  VARIANT 60: note = Ancestral polymorphism is L, Derived polymorphism is R
  VARIANT 61: note = Ancestral polymorphism is R, Derived polymorphism is W
MEGGDGCGSSAAASGSGRVTRRWTPEEDDLLRRAVARHGPRKWPELSVDIPGRSGRSCHRRWVQHLSPGLERRAFTPEEDAVIVAAQAMYGNKWTTIARMLPGRTRTDISIKNRWNSALQQHCRAATASANTAGCALPLRPATTAPVPIPDLMYLNKKLAAAEASLPFPRLEPKDDEDDEDMDETGEDEDMNELGDDGSSEVFPPVPAVPLTLTLSLSSGVHGTLASQSTFASAATLASAATLASQSTLASQSTFASAAATAGSAMTMRSNLGQDPWLVPALRLIVSDEVQRKMQEMPQVTAPASRSSADAADGSAANGQD

SEQ ID NO: 14768 - protein, 291 aa, Zea mays
  VARIANT 262: note = Ancestral polymorphism is R, Derived polymorphism is Q
  VARIANT 233: note = Ancestral polymorphism is G, Derived polymorphism is R
MEGGDGCGVSVAASGSRRVNRPWTPEEDELLRRAVARHGPRKWPELSADIPGRCGKSCRRRWVEHLSPGLEHRAFTPEEDAVIVAAQAKHGNKWATIARMLPGRTDNSIKNRWNFALQQQCRAAAASANTAGCALPLRPATTAPVPLPHLLDLNKKSTAAEASIPFHRLEPEDDEGMGEGDDGSSEVSPPAPLTLTLSLSSGVHGTLASQSTLASAATLASQSTFASAATTAGSAMTMRTNLEQNPWLVPALRLIVSDEVQRKMQEMRQVTAPASRSSADAADGSAANGQD

SEQ ID NO: 14769 - protein, 218 aa, Zea mays
  VARIANT 27: note = Ancestral polymorphism is K, Derived polymorphism is E
MGLGKTTDPSAAEHGVRQKPAGSRKREAGMSSSKDAPLSPRSQLALSCFEELLDCAVADVASECHRIARLGLDRSVDGEEEELRVWAARAAAAAAGGDHHHPGGGGAAEEGGSKGGVDVFGQTHPAIAADVVECMNCGRPVVAGRFAPHLEKCMGKGRRARTKITRSSTAGRMRSSNGSVATPYSPYSTTANPNRASIPNGVTDGGGGARGDYSNHAP

SEQ ID NO: 14770 - protein, 158 aa, Zea mays
  VARIANT 135..158: note = Derived polymorphism lacks residues 135 to 158
  VARIANT 96: note = Ancestral polymorphism is H, Derived polymorphism is Y
  VARIANT 73: note = Ancestral polymorphism is E, Derived polymorphism is K
  VARIANT 37..158: note = Derived polymorphism lacks residues 37 to 158
  VARIANT 31: note = Ancestral polymorphism is V, Derived polymorphism is M
MAVVSGSGGRLNPWAEPFVPSGARYRGLRTVEATPEQEVEDFSPEWWRLVSASPAFRDRWLREYGALGLLDAEDDLDDDVDSFLPDDFFSPPAPRYESEREDAAGRRAGRGLEVAAWGIDRWWRAHGGPPETPRYAEKAPRRVAAAARVSPRPIQQPR

SEQ ID NO: 14771 - protein, 189 aa, Zea mays
  VARIANT 110..189: note = Derived polymorphism lacks residues 110 to 189
  VARIANT 105: note = Ancestral polymorphism is R, Derived polymorphism is C
  VARIANT 74..189: note = Derived polymorphism lacks residues 74 to 189
  VARIANT 45: note = Ancestral polymorphism is S, Derived polymorphism is L
MADVEKATPVAAPAEGAGGDVAAGRTGAVAALLRRWRTQDLLDRSGSALRAAAWAFSLLAFLVMACNEHGDWRQFDRYEEYRYIVAIGLLAFVYTTLQLLRHGVRLTGGQDLEPKTGLLVDFAGDQVTAYLMMSALSAAIPITNRMREGADNVFTDSSAASISMAFFAFVCLALSALVSGFKLAKQTYI

SEQ ID NO: 14772 - protein, 428 aa, Zea mays
  VARIANT 124: note = Ancestral polymorphism is A, Derived polymorphism is T
  VARIANT 153: note = Ancestral polymorphism is G, Derived polymorphism is E
  VARIANT 165: note = Ancestral polymorphism is A, Derived polymorphism is V
  VARIANT 187: note = Ancestral polymorphism is R, Derived polymorphism is C
  VARIANT 199: note = Ancestral polymorphism is G, Derived polymorphism is S
  VARIANT 239..428: note = Derived polymorphism lacks residues 239 to 428
  VARIANT 243: note = Ancestral polymorphism is P, Derived polymorphism is L
  VARIANT 254: note = Ancestral polymorphism is V, Derived polymorphism is M
  VARIANT 255: note = Ancestral polymorphism is P, Derived polymorphism is S
MSPATTPLPAPVAAPASKGGKRSLMSSLMDATALLRSSSFKEDSYVAAALPASELRALADLKALVATHPDPISIWGVPLNPHSPPPGAANDDADERADVVLLKFLRARDFRARDAHAMLLRCAAWRAEFGADAVVDEELGFKELEGVVAYMHGWDRDGHPVCYNAYGVFKDRAMYERAFGDGDRLARFLRWRVQVMERGVRALTLRPRGVNAIIQVTDLRDMPKRELRAASNQILSLFQDNYPEMVARKVFINVPWYFSVLFSMVSPFLTERTKSKFVIAREGNVAETLYKFIRPELVPVQYGGLSRAGELENGPPKPASEFTIKGGEKVFLEIDGIEAGATITWDLVVGGWDLEYGAEYVPAADGSYTLCVEKARTVPATTADADAGPLHNAFTAREAGRMVLSIDNSGSRKRKVAAYRYFVRKPSA

SEQ ID NO: 14773 - protein, 171 aa, Zea mays
  VARIANT 121..171: note = Derived polymorphism lacks residues 121 to 171
  VARIANT 87: note = Ancestral polymorphism is G, Derived polymorphism is S
  VARIANT 82: note = Ancestral polymorphism is G, Derived polymorphism is E
  VARIANT 74: note = Ancestral polymorphism is P, Derived polymorphism is T
  VARIANT 68: note = Ancestral polymorphism is S, Derived polymorphism is Y
  VARIANT 50: note = Ancestral polymorphism is R, Derived polymorphism is Q
  VARIANT 49: note = Ancestral polymorphism is R, Derived polymorphism is K
  VARIANT 39..171: note = Derived polymorphism lacks residues 39 to 171
MWCKILSPSSLMTHITNGGREFVEVKEFGVPDILKSMAWCGDNICLRIKREYMIINSMTGTLTEVFSSGRIAPPLVVPLPTGELILGKFQLVLYSTEKALGPEPEPEPDDDGAGPRPLTLQNESPALKLIREVATLELEIKHLEHYLLALYRKVFEQQQAPTTALPPSDDR

SEQ ID NO: 14774 - protein, 170 aa, Zea mays
  VARIANT 102: note = Ancestral polymorphism is L, Derived polymorphism is V
MDQVLNKVGSYWFSKRASKEIDSIGDDISSISSSIGGSAKWMVNKIKGKMQKALPDLLKEYDMPAGLFPRDTTNYEFNEETKKLTVYIPSACDVGYKDSSVLRFFTCVTGYLEKGKFSDIEGMKTKVLVWTKVTAIKTEGPKVHFTAGVKKTRSRDAYEVVRDGITIDKF

SEQ ID NO: 14775 - protein, 60 aa, Zea mays
  VARIANT 37: note = Ancestral polymorphism is S, Derived polymorphism is L
MEYFHNCLPCLQTKHAQNNSSAQPLEMNNMWQGNTHSSLWPSFQMSTGHMMVCHWGEMIA

SEQ ID NO: 14776 - protein, 61 aa, Zea mays
  VARIANT 34: note = Ancestral polymorphism is E, Derived polymorphism is D
  VARIANT 23..61: note = Derived polymorphism lacks residues 23 to 61
  VARIANT 9: note = Ancestral polymorphism is E, Derived polymorphism is D
MAKAKRYLDDIIAHRQSIVFRRYCAYMSSPCHSELFLLEKEDPMKKEVRKRVKRSESRWGR

SEQ ID NO: 14777 - protein, 400 aa, Zea mays
  VARIANT 187..400: note = Derived polymorphism lacks residues 187 to 400
MQRSTGHQTSAAAQRLASSRRPFVAPSNTAATRFPSPTGVHGSSNGSVGLHSVGIDGSPTSAGFHSSPSSGAGFHSSLSSGPGFQLGSGIHSSSPRGGPSPGSRPSFGPFSSASSASSMASGPSSTYSDLLHSSDGFINYMMGQNSHFVRGTSHVTQLDESHDNPVDNDRNDGDEEVRTEAKLIWKSEEDGRVMSAWLKHSIDPIGGNNKKSDKYWTDVMQEYNQATVKNRWRTAKQVKDRWHKINKLTNSFNDCWVKARRVYTSGYSDEMWLDKAHKFFEDENKGLRFQLMNVWYMVRNEAKWISYNNNIHGKRKEMENGSTQGGGLEDVDLPRPMGQKAAKRAALEAKGKYKASAINVEELDRFEKIQNNVADNRMKALEMQGKIHNDKISFYMIYLL

SEQ ID NO: 14778 - protein, 566 aa, Zea mays
  VARIANT 4: note = Ancestral polymorphism is A, Derived polymorphism is E
  VARIANT 5..566: note = Ancestral polymorphism lacks residues 5 to 566
MTSAWLVRAYVPMLLRSRISSASMEKTRRHRVLAVLLLLVVVLVSALPDLGSCHKDDAGQGGTTNPEEDMVSVSEARTTHHGDRTRKFLHEQQQQNRYWSGDFGDKVSSLTDSSQYPPDSGGSSSQSPASTFKPDQWQPWLPWAPKAPPPMSVPPAQAPAPFPAGVVSNPGHSIALPPQPAVVVPADAGSRPAVGAGVPAGGAGARPRSGGVGRPVYAMAAAGASLAAAAAVALLVLCYRSSSVVTVRPWATGLSGQLQKAFVTGVPSLKRSELEAACEDFSNVIGSLSDYMVYKGTLSTGVEIAVVSTTKNSAKEWSKHCESQFRKKITSLSRVNHKNFVNLLGYCQEEQPFTRMMVFEYAPNGTLFEHLHVREDGYLDWPTRLRVAVGVAYCLEHMHQLSPPEILRALDTSTICLTDDFAAKISDVFFCDEPRRQEGSLSLSALSDRESVVYSYGMVLLETMTGRFTASDGGLLEAWAAAYLRGERQLRDVMDPALRRSFHAATVDRLDGVIRGCTDREPRRRLTIAEVAKRLREITAMSPDAATPKVSPLWWAELEIICAEVN

SEQ ID NO: 14779 - protein, 879 aa, Zea mays
  VARIANT 248: note = Ancestral polymorphism is A, Derived polymorphism is G
  VARIANT 6..879: note = Ancestral polymorphism lacks residues 6 to 879
MLLFILDTAMDITQVLLAAQSPDANLRTVAEGNLTQFQEQNLPNFLLSLSIELSNDEKPPESRRLAGIILKNSLDAKDSAKKELLTQQWVSVDPSIKLKIKESLLVTLGSSVHDARHTSSQVIAKVASIEIPRREWQDLIAKLLENMTSPGASAPLKQATLEALGYVCEEISPQDLEQDQVNAVLTAVVQGMNQAELSPEVRLAAVKALYNALDFAESNFANEMERNYIMKVVCETAMSKEVEIRQAAFECLVAIASTYYSHLDPYMQTIFDLTANAVKGDEEPVALQAVEFWSAICDEEIALQDEYEGSEDGNSTVHFRFIEKALPLLVPMLLETLLKQEEDQDQDDNVWNISMSGGTCLGLISRTVGDAVVPLVMPFVEANITKPDWHCREAATFAFGSILEGPSVEKLAPLVQAGLDFLLNTMNDANSQVKDTTAWTLGRVFELLHSPAGANPIINNSNLPRIMSVLLESSKDAPNVAEKVCGAIYFLAQGYEDAESMSSVLTPYLPNIIAALLSAADRADSTHSRLRASAYEALNEIVRVSNIPETSGIIGQLLQEIMRRLNLTFDLHILSSGDKEKQSDLQALLCGVLQVIIQKLSSTDAKSIVSQTADQLMMLFLRVFACHNSTVHEEAMLAIGALAYATGPDFVKYMPNFFTYLEAGLQNYEEYQVCSISVGVVGDICRALEDKILPFCDRIMTVLLKDLSSSMLNRSVKPPIFSCFGDIALAIGENFEKYLPYAMPMLQGAAELLGTLDQSDDDMVDYGNQLRRGIFEAYSGILQGIKGPKAQLMIPYATHLLQFTEAVFKDRSRDDSVTKAAVAVLGDLADTLGQSSKDLFKTHLFHVEFLRECQAQQLDDEVRETAQWAQGMINQAVVS

SEQ ID NO: 14780 - protein, 490 aa, Zea mays
  VARIANT 230..490: note = Derived polymorphism lacks residues 230 to 490
  VARIANT 191: note = Ancestral polymorphism is A, Derived polymorphism is V
  VARIANT 178: note = Ancestral polymorphism is A, Derived polymorphism is V
  VARIANT 171: note = Ancestral polymorphism is G, Derived polymorphism is R
  VARIANT 145: note = Ancestral polymorphism is R, Derived polymorphism is C
  VARIANT 141: note = Ancestral polymorphism is G, Derived polymorphism is S
  VARIANT 103: note = Ancestral polymorphism is Y, Derived polymorphism is N
MALSSHATTAAAAAAVGTFPQSTRSSSRRFPASSVSPRPPPPPRSLRLDHAVAPSLSPATMPAPDGLLAAAIEHLEREPASVAADEAPLAALSPRELQLVLVYFAQEGRDTYCALEVFDWLRRANRVDGETMELMAAIACGWIERLVGAGGDVADVAALLGEMDCVGLRPGFSLVEKAVALYWDRGEKELAVEFVRDVLRRGGLGAGAGGEHSSASGDGERGGPVGYLAWKMMMDGDYRNAVKLVIEFKETGLKPEVYSYLIGLTALVKEQKEFSKALRRLNASVKDGSISKLDAESMHSINKYQSDLLSDGVLLSNWVVQEGSSEVLGLVRERLLSLYTCAGCGLEAEHQLWEMKLLGREPDTQLYDVVLAICASQGEAAAVRRLLAGVESTSAGRRKKSMSWLLRGYVKGGFILDASETLIQMLDMGLLPDYLDRAAVLTALRRNIQESGSLESYLKLCKRLSETDLIGPCIVYLYVRKFKLWMAHML

SEQ ID NO: 14781 - protein, 104 aa, Zea mays
  VARIANT 71: note = Ancestral polymorphism is A, Derived polymorphism is V
  VARIANT 60: note = Ancestral polymorphism is N, Derived polymorphism is D
  VARIANT 10: note = Ancestral polymorphism is P, Derived polymorphism is L
  VARIANT 7: note = Ancestral polymorphism is V, Derived polymorphism is L
MVGANEVGGLECERKPLAEVVGDCVQRWFQDAYKEARKGDVANQVLVAQMFFSGYGTPKNEYKGKQWMDRASRFRSSALKVGMKRPGYNASDSDSDDANDDANQ

SEQ ID NO: 14782 - protein, 310 aa, Zea mays
  VARIANT 22: note = Ancestral polymorphism is F, Derived polymorphism is S
  VARIANT 25: note = Ancestral polymorphism is H, Derived polymorphism is Y
  VARIANT 26: note = Ancestral polymorphism is K, Derived polymorphism is N
  VARIANT 34: note = Ancestral polymorphism is A, Derived polymorphism is E
  VARIANT 39: note = Ancestral polymorphism is F, Derived polymorphism is L
  VARIANT 41: note = Ancestral polymorphism is M, Derived polymorphism is I
  VARIANT 51: note = Ancestral polymorphism is G, Derived polymorphism is V
  VARIANT 53: note = Ancestral polymorphism is G, Derived polymorphism is S
  VARIANT 56..310: note = Derived polymorphism lacks residues 56 to 310
  VARIANT 59..310: note = Derived polymorphism lacks residues 59 to 310
  VARIANT 71..310: note = Derived polymorphism lacks residues 71 to 310
  VARIANT 72: note = Ancestral polymorphism is D, Derived polymorphism is E
  VARIANT 97: note = Ancestral polymorphism is A, Derived polymorphism is P
  VARIANT 99: note = Ancestral polymorphism is A, Derived polymorphism is V
  VARIANT 118: note = Ancestral polymorphism is T, Derived polymorphism is I
  VARIANT 123..310: note = Derived polymorphism lacks residues 123 to 310
  VARIANT 126: note = Ancestral polymorphism is L, Derived polymorphism is M
  VARIANT 127: note = Ancestral polymorphism is E, Derived polymorphism is K
  VARIANT 132: note = Ancestral polymorphism is D, Derived polymorphism is Y
  VARIANT 139: note = Ancestral polymorphism is F, Derived polymorphism is S
  VARIANT 141: note = Ancestral polymorphism is L, Derived polymorphism is P
  VARIANT 143: note = Ancestral polymorphism is M, Derived polymorphism is I
  VARIANT 144: note = Ancestral polymorphism is R, Derived polymorphism is H
  VARIANT 146: note = Ancestral polymorphism is F, Derived polymorphism is L
  VARIANT 149: note = Ancestral polymorphism is R, Derived polymorphism is C
  VARIANT 157..310: note = Derived polymorphism lacks residues 157 to 310
  VARIANT 173: note = Ancestral polymorphism is V, Derived polymorphism is M
  VARIANT 180: note = Ancestral polymorphism is D, Derived polymorphism is G
  VARIANT 202: note = Ancestral polymorphism is L, Derived polymorphism is P
  VARIANT 203: note = Ancestral polymorphism is Y, Derived polymorphism is D
  VARIANT 219: note = Ancestral polymorphism is S, Derived polymorphism is L
MFVTFDIDTIYLPDINAMSHSFDPHNWYHIISKALGYYFKMSHLEVSKFDGTGDFWLWQVKIQSMLVDKSLEATLEDGDPDLASTSREEMKNIHKRALAVLRLALADNVSRQVCEEKTALALWKKLETLYLDKSLSSRFYLMMRLFRMRMQEDTPIKQYIDEFNKAVLDYQNVGNSMDNDHLAILFLCSLPDSYDSIGDQILYCTNSISMDDITSILMLKDLLKNSHLENRGEGEGLVVNRGRSKDRGYDVGGSSNSGRRKSKGRSRPRLSKNEICCPYCKEFDHIKWDCRKLKKKKGKENNGSKGDNLL

SEQ ID NO: 14783 - protein, 112 aa, Zea mays
  VARIANT 78: note = Ancestral polymorphism is A, Derived polymorphism is T
MRLLTGTGAGAGLPFKIRSLDAFGPTVLAEGADATGALYWVHAWTVGPGGRVTGVREYCNTALVVTRLGGGGAAVERAKATCSLSPSPSKQVWQSRLPDRARRNLPGLVLAI

SEQ ID NO: 14784 - protein, 60 aa, Zea mays
  VARIANT 12: note = Ancestral polymorphism is A, Derived polymorphism is V
  VARIANT 20..60: note = Derived polymorphism lacks residues 20 to 60
  VARIANT 27: note = Ancestral polymorphism is D, Derived polymorphism is E
MASKDIVMAIAANKSDLVRLKNIDTQDAASYAESIATNLFVTSAKTGTGIDDVFSDIAKR

SEQ ID NO: 14785 - protein, 131 aa, Zea mays
  VARIANT 118: note = Ancestral polymorphism is N, Derived polymorphism is S
  VARIANT 112..131: note = Derived polymorphism lacks residues 112 to 131
  VARIANT 109: note = Ancestral polymorphism is A, Derived polymorphism is V
  VARIANT 106: note = Ancestral polymorphism is T, Derived polymorphism is M
  VARIANT 104: note = Ancestral polymorphism is H, Derived polymorphism is D
  VARIANT 94: note = Ancestral polymorphism is T, Derived polymorphism is M
  VARIANT 90: note = Ancestral polymorphism is S, Derived polymorphism is F
  VARIANT 75: note = Ancestral polymorphism is P, Derived polymorphism is S
MYLDRGDNMHTVKRYLQLTLNVPSGETLLTFDDRVLDQKCLEGKEEQVELEVFNFTGVGGVALSMYNTDEVQVSPVSCFTISNPICAWASDDATVIKVDIVNSHDTLLAVVQVIADLNLIIWKAYFSSDGS

SEQ ID NO: 14786 - protein, 193 aa, Zea mays
  VARIANT 141: note = Ancestral polymorphism is G, Derived polymorphism is R
  VARIANT 136: note = Ancestral polymorphism is G, Derived polymorphism is R
  VARIANT 96: note = Ancestral polymorphism is L, Derived polymorphism is H
  VARIANT 85: note = Ancestral polymorphism is T, Derived polymorphism is I
  VARIANT 71: note = Ancestral polymorphism is S, Derived polymorphism is L
MPPDLSPPRLILRQYFPLVRPRRRPPHGRRAPSPLPHVPPPPDHPALPRCRATAPAYSATATAPEPKDNASSRFLGVEAKTLLYTRLTDVLSKEALFYIVIFLFIAFFGAFAYVLYPMCDAIHPITLDDHLLASLGPNFLGFVAILRVWSFYLFYVMAELRGASSYSSSSGGLPIRCGSPNSIFVLCLSQLIL

SEQ ID NO: 14787 - protein, 165 aa, Zea mays
  VARIANT 55: note = Ancestral polymorphism is G, Derived polymorphism is D
  VARIANT 80: note = Ancestral polymorphism is A, Derived polymorphism is V
  VARIANT 85: note = Ancestral polymorphism is A, Derived polymorphism is V
  VARIANT 121: note = Ancestral polymorphism is I, Derived polymorphism is T
MSAISNQKKRTLEALQQQYTAAKAKKLQDEQVKSQKKSNFNTPKPKFDAPRGSKDVAFSSSNCQQKPSTSSGEEINPVYAELSCAFHDTLSKGVVSVNIPFMKNKFTENLLSADLHGALLIVAEHKAASYKSVNGIMIRDTAETFGIISEDNRFRGMYPLFGAVL

SEQ ID NO: 14788 - protein, 185 aa, Zea mays
  VARIANT 142: note = Ancestral polymorphism is V, Derived polymorphism is I
  VARIANT 80: note = Ancestral polymorphism is S, Derived polymorphism is R
  VARIANT 56: note = Ancestral polymorphism is A, Derived polymorphism is V
MEQHPTCAQPPAPAPLAGPVVPVDFKVVKKGPEMAMHDAIGRLAFRVAGSAGGATALQDDAGGVLVTVRSSGQGEWQAFSGNSLEERHIIFTAKAIPASSSREEVHVFISPRSTVEDSKPSYRLVGSAFQRACTVIKGDSIVAQTNLLYKLKQNIYSRRKFRVTIYPANDNILVMAMVATFFIKK

SEQ ID NO: 14789 - protein, 596 aa, Zea mays
  VARIANT 23: note = Ancestral polymorphism is I, Derived polymorphism is N
MAAVKVDKATNELLLGPDWTLNIDICDAVNSDHGQGKEVIKALKKRIQHKNANVQFLALTLLETLIKNCGDHVHYQVVERNILEEMMKIVKKKADMQVRDKILMLLDSWQDAFGGPGGKHPHYYWAYAELKRSGVEFPKRSPDAASMFISPVTQPESLPTYLQAGYGMPVDSSSRLDEAMSSNGAPLSISDLERMLGAVELLNEMLRAVNPNEKDVRIYMFDYILAANDEIITELVTQCRSYQKKIMSSVSLVRDEDLLGQALDLNDRLQILLEKHDSIASCSPSSADVIDVVCEVPSGTAPNQGTNFPPQAALRTAIVPTNVLDDEDEENEDDEFSMLARRNSRFQPTNTQSTSSPTVHDETASSTASVPYTASPSVANNALPPHDPPAPPVRVSPEEQVMSDLLALTVSSNPSPSSYTPVTPEPGRLNQSSAPTGELPRAYHGDQGHVSAPYVAPWAQPQSQTAGSQQPTRTQAQVSYSSYAYPPPPWASQDSTESNPFVAAASSSQQYQSTSRTPTMPPNLRPLLQQSHSFGVPLPTASLDSPINGNLKQPLSAGARRPSYVSSNKFFDDLFERNSDGSLKVGSTRHSDVYGK

SEQ ID NO: 14790 - protein, 504 aa, Zea mays
  VARIANT 456: note = Ancestral polymorphism is E, Derived polymorphism is V
  VARIANT 49..504: note = Ancestral polymorphism lacks residues 49 to 504
  VARIANT 45..504: note = Derived polymorphism lacks residues 45 to 504
MGVNMEKTQFLQRGFEENNSMERDTLFLNLDSHSKDNDGKEDGGRFSEQHVLFSIARSGKPNHGDASNATGQNTRIQILHFLNELGWLFQRASACTLSTRPDVSDLDLTQFSITRFKYRLLFSSERDWCSLTKTLLDILAKRSLVSEELSKETMEMLAEIHLLNRAVKRKSRRMVHLHVQFVVLCLDNSKVYPFLPNFPGHTHRYKQTEQETGPYLSLQLFGSTEEDFPPKMDSVNKYLSYESSNPLDERSPSSLPITRKFFPIHSVDEEVRHPHITDYGEDATMGEVSTNQAWLAPPLDLFKDSERPIKNGSPPNPGYQSCYASTSCSDHSNSTSNSDGQLEENLLQRVNSLVQSSDLDFWRKGRFLVRTNSQLVSYKAGITCLSKSWRTWNTPELTLVSPIAVVGGQKTSLILKGHNLSIPGTQIHCTSIGKYISKEVLCSAYPGTIYDDSGVETFDLTGKPDLIIGRCFVEVENRFRGNSFSVIGGLCTLCCFEECHYSFQ

SEQ ID NO: 14791 - protein, 267 aa, Zea mays
  VARIANT 40: note = Ancestral polymorphism is G, Derived polymorphism is D
  VARIANT 236: note = Ancestral polymorphism is C, Derived polymorphism is Y
MDSSHYKGDHTFVPVTRKGYWQFNMGDVLVDGKSTGFCAGGCAAMADSGTSLLAGPTAIITEINEKIGAAGVVSQECKTVVSQYGQQILDLLLAETQPAKICSQVGLCTFDGTHGVSAGIRSVVDDEAGKSNGGLKSDPMCNACEMAVVWMQNQLAQNKTQELILNYINQLCERLPSPMGESAVDCGSLASMPDIAFTIGGKKFKLKPEQYILKVGEGQAAQCISGFTAMDIPPPCGPLWILGDVFMGVYHNVFDYGKLRVGFAESA

SEQ ID NO: 14792 - protein, 215 aa, Zea mays
  VARIANT 97: note = Ancestral polymorphism is V, Derived polymorphism is I
  VARIANT 84: note = Ancestral polymorphism is L, Derived polymorphism is V
MDDNEREKENENEKEKHYGTDVEDEEEDEEGNKRVVVLGPQVPLKEQLELDKDDESLRRWKEQLLGQVDTEQLGETAEPEVKVVDLTILSPGRPDLILPIPFQADEKGYAFALKDGSPYSFRFSFIVSNNIVSGLKYTNTVWKTGVKVETQKMMLGTFSPQLEPYVYEGEEETTPAGIFARGSYSAKLKFVDDDGKCFLEMSYYFEIRKEWPGTQ

SEQ ID NO: 14793 - protein, 161 aa, Zea mays
  VARIANT 41: note = Ancestral polymorphism is R, Derived polymorphism is I
MTSSTAFSQLFPSAAAVSPVPRCVSLQLFCASGGVVPGWRRRCRRMAMVRAATVDAAAPAYTSDSLILYFKAEGTMEERAIPKITESLEGMEGVKDLEVLIEEGIGSVVLTKETTVQATGVASNLVEAIQGAGFKLQTLSLSFDDFDEPAAGAGGTVQSSE

SEQ ID NO: 14794 - protein, 336 aa, Zea mays
  VARIANT 25: note = Ancestral polymorphism is P, Derived polymorphism is S
MASRQGVAASMFATALLLGVFASIPQSAEAIGVCYGMSANNLPAASTVVSMYKANGISAMRLYAPDQGALQAVGGTGISVAVGAPNDVLSNIAASPAAAASWVRNNIQAYPSVSFRYVCVGNEVAGGAAQDLAPAMENVHAALAAAGLGHIKVTTSVSQAILGVYSPPSAAEFTGEARGYMGPVLQFLARTGSPLMANIYPYLAWAYNPSAMDMSYALFTSSGTVVQDGAYGYQNLFDTTVDAFYVAMGKNGGSGVPLVVSESGWPSGGGVQATPANARVYNQYLINHVGRGTPRHPGAIETYLFSMFNENQKESGVEQNWGLFYPNMQHVYPISF

SEQ ID NO: 14795 - protein, 336 aa, Zea mays
  VARIANT 57: note = Ancestral polymorphism is P, Derived polymorphism is L
  VARIANT 15: note = Ancestral polymorphism is A, Derived polymorphism is P
MARQSAASMLATTTPLLLSVLANIAVVESIGVSYGMSGDNLPPASTVIGMYKDNGIPLMRIYAPDQAALQAVGGTGIRVVAGAPNDVLSSLAASPAAAASWVRNNIQAYPKVAFRCVCVGNEVEGGAAQSLVPAMENVRAALVAAGLDGIKVTTSVSQAILGGYKPPSAAEFTDEAQGFMGPVLRFLARTGAPLMASVYPYFTYATNPAAMDLSYALFTAPGTVLQDGAYEYQNLFDATVDSFYVAMANHGGSGVTLVVSESGWPSAGGVAASPENAAIYNQNLINHVGRGTPRHPGAIETILFSMFNENLKQSGVEQNWGLFYPNMQRVYPIKFN

SEQ ID NO: 14796 - protein, 145 aa, Zea mays
  VARIANT 4: note = Ancestral polymorphism is K, Derived polymorphism is E
  VARIANT 3: note = Ancestral polymorphism is R, Derived polymorphism is S
  VARIANT 2: note = Ancestral polymorphism is K, Derived polymorphism is E
MESKSPWSLRLLICCAAMVAIALLPQQGGQAACFVPTPGPAPAPPGSSATNTNASSAAPRPAKPSAFPPPMYGGVTPGTGSLQPHECGGRCAERCSATAYQKPCLFFCRKCCAACLCVPPGTYGNKNTCPCYNNWKTKRGGPKCP

SEQ ID NO: 14797 - protein, 127 aa, Zea mays
  VARIANT 54: note = Ancestral polymorphism is R, Derived polymorphism is L
MAMAAARRALLAHLRVPVVHPAAAAATIPAAGRLLSSTTETKGSFLDKGEVADRVVSVVKNFQKVEPSKVTPSAHFQKDLGLDSLDTVEIVMAFEEEFSFEIPDNDAEKIDSIKTAVDFIASHPQAK

SEQ ID NO: 14798 - protein, 679 aa, Zea mays
  VARIANT 60: note = Ancestral polymorphism is S, Derived polymorphism is F
MAVSGIPVEECLVWDSRFLAPVPETALDDEARAAAARRIAERKARKRSERRTYLVVAVMSSLGVTSMAVAAVYYRFSWQMEDLAPMLQVLGCKQEGFPQTYLGLPLSSTTLRLTTFSPQIAKTDKYLAGWQAALLNPTGRAVLVNSVLDSQLVYAMCAVPLPPGILSRVDSRRRSFLWTGEDRCSGSSCLVAWENVCKPKQAGGLGIKDLHIQNTCLLVKLIHRLHSSALSSWAAWVRSNVKLATMEGEIRGCHWDTLRALLPIYQATSSSQVGDGCSTDFWHDAWSGPDDLSTAFPALYSHCIRQKVCVREVVLQGLHLVPRLTPQAQEELEAVLTIVNNTSLADRPDTRHCFLADHTGNFQTSTLYNLLKGSLGHGDVSTTFIWGNKAPPRAQFFCWLLMQGKIQCKWNLKKKGIVDDDCCEICNQDSETPSHIIFHCPFARQFWSSIGFSVADDLGTQDLPNISRPDRLPGAEFNSFVLLCCWQLWKRRNGVVFHQDHATLAVTLHSCASEAKAWAYRHNRKEAQGGAVPVSEMFGTFALFVGAAAHQALLHASLWHMHESHHRPREGPFELNDVFAIVNAVPAIYLLGDVASRYTTWTSLRASRMGSSWDQRSCRRSVAWTSWKRSSRESARPSDGFVWIPARRSPLRSVIPAQPHGWGADDQNLQKGFGLDARA

SEQ ID NO: 14799 - protein, 419 aa, Zea mays
  VARIANT 165..419: note = Derived polymorphism lacks residues 165 to 419
MVARSPNAKPDRQKAAALAAAAALNPALLRETLKKVDRCMARLQELQYTVAGGAKVVSGVSLSPRSTRGYLRTSLRCKQETVRQVFWLCSPSEFGPRRSLAHACESVSYSDSCRRRMRGGASAQKRSPSGKFGGGVGGEGAQWRRMSLPAMLLGETVLEIVQASQFARDIVTAAGATNREPPRTPKPAPRTRKPAAGEPTPLRARRAREKQSHRGGAATRGADAATPPSRSRVRSRIQFKPVSPVAVGRPSVSANRVSPKNRPWAKKAVMFPNPTFHASTSAATDPCATPSPSKKQKRLYKTRSPVAARQTPHKFLVKSPPSALGSKLRMHGKALPARPAAVSPPPPVKAQASPAKTRRCSFSPSRLATRLMSPIKARLSLGRSRDSGVGVGGGPMSGLKQRPGVSLTVRTVSSKISSR

SEQ ID NO: 14800 - protein, 519 aa, Zea mays
  VARIANT 269: note = Ancestral polymorphism is A, Derived polymorphism is S
MEAIHLAYVLVFLLPILLLRLRRRGPPPVKRPRTTTAHCPHPSPVLGNTLHFIRNRRRFFDWYADMLRAAPSGAIEAWGPLGAGHAVTTASPADVDHLLRSSFDKYAKGALFRDATADLIGDGLFAADGRLWSLQRKLASHAFSSRSLRRFTDGVLDVHLRRRFLPLLDAAARDGGAVDLQDALRRFGFRTICHVAFGVEGLDDDARRQDALFAAFDAAVEISFRRALTPATFVRRLTKLLDVGKSRRLREAVHAIDDYAMSVVESKVARRRNSLDDGAADLLSRFMAAMDDGGGSDSELGAMFPTPAAKLRFLRDVVVTFVLAGKDTTSSALTWFFWLLAANPRCERRAHEEAASCCGDGGDVKGMHYLHAAITEAMRLYPPVPFNGRVAVRDDVLPSGAALRAGWYANYSAYAMGRMEKLWGKDCLEFVPERWLGEGGEFVPVDAARFPVFHAGPRVCLGKEMAYVQMKTVAAAVLRRFRLDVVAPVANMEAPPAYEMTATMKMKGGLLVRLCSRED

SEQ ID NO: 14801 - protein, 324 aa, Zea mays
  VARIANT 129: note = Ancestral polymorphism is Q, Derived polymorphism is L
  VARIANT 92: note = Ancestral polymorphism is R, Derived polymorphism is W
MADEVQQLTRAFSGLGGLGVDEPAMVSALARWRGQPEKRSAFRKGFPGFFSSHGGDMDRREEEYMLHLAAEFARFRDLVVLWATHPWERDARLAHHVLHHHHHHPPAVVVEVACARSADELLGARRAYQALFHRSLEEDVAHRARDKPYCSLLVGLVSAYRYEGPRVDKEVAKAEAEALGAAVKRAGNGKLVENDEVLRILTTRSKPHLVQTFMYYKEMHGRHVEEDLRQRGEETLLETVLCLVAPAKYFSQVIEGALRDSADHHGKEALTRVAVTRSDHDMDDIRAAYHQQFGAKLEDVIAAKAHGHYRDALLSLVGAGNSSV

SEQ ID NO: 14802 - protein, 368 aa, Zea mays
  VARIANT 28: note = Ancestral polymorphism is F, Derived polymorphism is C
  VARIANT 58: note = Ancestral polymorphism is P, Derived polymorphism is R
  VARIANT 100: note = Ancestral polymorphism is V, Derived polymorphism is L
  VARIANT 201: note = Ancestral polymorphism is F, Derived polymorphism is S
  VARIANT 330: note = Ancestral polymorphism is M, Derived polymorphism is T
MCCWWCCRRCLECIHNIVPPLSLPFLRFSGLALPGGGGAAAAASPPVVSMASISVPSRAPSAAEDAENIRKAVQGWGTDEKALIEILGHRTAAQRAEIAVAYEGLYNEPIIDRLHSELSGDFRSAMMLWTVDPAARDAKLAHKAMKKQGERYVWVLIEVACASAPDHLVAVRKAYREAYSASLEEDVAACPLYKDPLLKQFLVRLVSSYRYSGELVDDELARAEAAELHDAVVARKQPLHGDVVRVVSSRSKAQLKATFERYRLDHGKAVDEVLEERRSDQLAAVLKTAVWCLTSPEKHFAEVIRSSIVGLGTDEESLTRAIVSRAEIDMKKVKEEYRARYRTTVTSDVNGDTSGYYNVILLTLVGPE

SEQ ID NO: 14803 - protein, 276 aa, Zea mays
  VARIANT 7: note = Ancestral polymorphism is H, Derived polymorphism is Y
MTNHCGHTVWPGILSSAGSPALETTGFALEPGQSRSLPAPRGWSGRLWGRTHCSADAAGRFACATGNCGSGRLDCAGHGAKPPATLAEFTFDGHEGLDFYDVSLVDGYNLPMLVEPHAPNGGGGANCLLTGCVMDLNAACPAELRVGDGGAGAGGAVACRSACEAFGTAEHCCHGEHGNPDACWPTAYSQFFKKSCPRAYSYAYDDATSTFTCAGGGTSYAITFCPSATSVKSVGTDPEARAAVGGGRVPAAAAWRTMPSVLVLLGLAMTALSHVF

SEQ ID NO: 14804 - protein, 211 aa, Zea mays
  VARIANT 40: note = Ancestral polymorphism is G, Derived polymorphism is E
  VARIANT 89: note = Ancestral polymorphism is C, Derived polymorphism is G
MGNGLSPCLCPRAERGETARLVFWGGSARMADERLSITAGDVTAELPDQHLVCAADSFFIGLPVPALSPCERLVAGRTYFVLPAARFSCSQALTAATLAKLSPSSAAKVPLAGGAASPFEYVTGSDGAPLIRILPEFIEKVITSCGGGKGGTAATEHLCSTPELRKHYMQLVGARAERPWSPGLETISEADKRRRMLSPVRLVGLAMPSSR

SEQ ID NO: 14805 - protein, 261 aa, Zea mays
  VARIANT 34: note = Ancestral polymorphism is S, Derived polymorphism is L
  VARIANT 131: note = Ancestral polymorphism is D, Derived polymorphism is E
  VARIANT 141: note = Ancestral polymorphism is P, Derived polymorphism is L
  VARIANT 144: note = Ancestral polymorphism is S, Derived polymorphism is F
  VARIANT 145: note = Ancestral polymorphism is P, Derived polymorphism is S
  VARIANT 146: note = Ancestral polymorphism is F, Derived polymorphism is L
  VARIANT 149..261: note = Derived polymorphism lacks residues 149 to 261
  VARIANT 151: note = Ancestral polymorphism is S, Derived polymorphism is Y
  VARIANT 165: note = Ancestral polymorphism is A, Derived polymorphism is V
MDGGRAAAVGGDPSPIAAPSNPPALSSRPVDVSSFTHTPCYCEENVYMLCNELIRTGVADPAGTDLYVVFISNEEKKVPLWHQKAGHSDDGFICWDYHVICIQVKLTKLLCVSWYFLMCIWKSRRSKEVLDFVWDLDSDLPFPSPLIQYVSEAIQPLSFGNSRYARLFRVVHAPVFLQSFASDRSHMKDPEGNWIQLPPKYEPIVAEDGTTNNLNEYIMMSVGDVADRERMANDVYCNKHGVVLNETIFPEFFAQLPAPHT

SEQ ID NO: 14806 - protein, 195 aa, Zea mays
  VARIANT 94: note = Ancestral polymorphism is Y, Derived polymorphism is D
  VARIANT 62: note = Ancestral polymorphism is A, Derived polymorphism is T
  VARIANT 56: note = Ancestral polymorphism is L, Derived polymorphism is H
  VARIANT 55: note = Ancestral polymorphism is F, Derived polymorphism is I
  VARIANT 54: note = Ancestral polymorphism is T, Derived polymorphism is P
  VARIANT 45..195: note = Derived polymorphism lacks residues 45 to 195
  VARIANT 44: note = Ancestral polymorphism is I, Derived polymorphism is L
  VARIANT 35: note = Ancestral polymorphism is D, Derived polymorphism is G
  VARIANT 17: note = Ancestral polymorphism is E, Derived polymorphism is K
  VARIANT 7..195: note = Derived polymorphism lacks residues 7 to 195
  VARIANT 1: note = Ancestral polymorphism is M, Derived polymorphism is L
MAFIMFSWSENYGDPSESKHLMALFKVAAKEIAADGRIELPGAIQSLFECLLYTFLFLWTPALSSNAGYQSEMLQILSRITPSMFAIWLSSNSYDAHYSHMNLMACMTLVCLSCFGNMLIPAMQSVSYMVLALYIFGYHTHLQVVVPVLIVRVAALYKVTGDCLLFSYTWIIQQKNHLICLDALRGSYLLSFKEV

SEQ ID NO: 14807 - protein, 217 aa, Zea mays
  VARIANT 35: note = Ancestral polymorphism is A, Derived polymorphism is V
  VARIANT 41..217: note = Derived polymorphism lacks residues 41 to 217
  VARIANT 42: note = Ancestral polymorphism is N, Derived polymorphism is I
  VARIANT 43: note = Ancestral polymorphism is V, Derived polymorphism is G
  VARIANT 52: note = Ancestral polymorphism is C, Derived polymorphism is Y
  VARIANT 53: note = Ancestral polymorphism is I, Derived polymorphism is K
  VARIANT 81..217: note = Derived polymorphism lacks residues 81 to 217
  VARIANT 129: note = Ancestral polymorphism is T, Derived polymorphism is A
  VARIANT 130: note = Ancestral polymorphism is A, Derived polymorphism is T
  VARIANT 143: note = Ancestral polymorphism is D, Derived polymorphism is G
  VARIANT 170: note = Ancestral polymorphism is S, Derived polymorphism is F
  VARIANT 186: note = Ancestral polymorphism is P, Derived polymorphism is L
MMLQVLGSFVRSREGVILDNICSISLWYPAFELNAGVHRKRNVYNKHSNSDCIAPDRGDTLEKALTTTTTRTVADDDLLLQLKINYYPRCPQPELAVGVEAHTDVSALSFILHNGVPVLQVLHGTRWVTARHEPGTIIVHVGDALEILSNGRYTSVLHSGLVNREAVRISWVVFCEPPPDCVLLHPLPELVTEGHPARFTPRTFKQHLNHKLFKKKQ

SEQ ID NO: 14808 - protein, 353 aa, Zea mays
  VARIANT 152: note = Ancestral polymorphism is A, Derived polymorphism is T
MSLHQRPHQKPPAAGDSLPVSSPTASTAASRPHPLLTLPYLFSLLAVLLFVALLVPWGPAARPPSSSSSWRSYTLQDAAASAAAAGNGTVLLAAVSGPYLPFLSNWLISVRRAGRADQVLVIAEDYETLDRINAAWPGHAVLVPPAPDAQTAHKFGSQGFFNFTSRRPRHLLQILELGYSVMYNDVDMVWLADPFAYIVENHDVYFMDDMAPVKPLDHSHELPPPGKKGRTYICSCMLFLRPTEGAKLLLRKWIEELKEQPWSKQRKSNDQPAFNWALNKTAGQVDVYLLPQSAFPTGGLYFKNKKWVKETKGKHVIIHNNYITGFEKKIKRFRDHGLWLVDEHSDESPLGRI

SEQ ID NO: 14809 - protein, 311 aa, Zea mays
  VARIANT 58: note = Ancestral polymorphism is G, Derived polymorphism is D
MNLNEREPSPEHQPYEDLDDDLDGGGDWTRDRSPTPVHGDDGAGSSSKPRKHLLKKGGGGGMPSDDGLDDYGLADEDADPSAEARKRKGRASKEPLFPSPSARVRRRRSALAEEVVVEKTKTMIKSLYILSKVPLDSCKSACTCSSSWTGSCNARSMGCRLIVYHYCLSVLVPTNIQHIVAFSGNASQGGTTLPMIYVLGDSLAPVENNNNLVTLLKANFLRNNIDYLGHKATGCFSNGKNSIDFLGTKKVGEKQGSRSYHGASCYRQRGSSLNNHRETTSSCTRSAMLIGTKGKRFVKKRYAEKAQMKKT

SEQ ID NO: 14810 - protein, 173 aa, Zea mays
  VARIANT 43: note = Ancestral polymorphism is C, Derived polymorphism is G
MHLRSEPQCWKFKGMGELPGPGCVFHIFQFTLHFRDHSNFVNCIRYAPDGSKFITVSSDKKGLIYDGKTGEKIGELSTEGGHTGSIYAVSWNPDSKQVLTVSADKSAKVWDIFEDASGKLNRTLVCPGIGGVDDMLVGCLWQNDHLVTVSLGGTFNVFSASNPDQEPVTFEDG

SEQ ID NO: 14811 - protein, 231 aa, Zea mays
  VARIANT 165..231: note = Derived polymorphism lacks residues 165 to 231
  VARIANT 106: note = Ancestral polymorphism is S, Derived polymorphism is L
  VARIANT 71..231: note = Derived polymorphism lacks residues 71 to 231
  VARIANT 51: note = Ancestral polymorphism is E, Derived polymorphism is K
  VARIANT 14: note = Ancestral polymorphism is E, Derived polymorphism is K
  VARIANT 8: note = Ancestral polymorphism is R, Derived polymorphism is W
  VARIANT 6..231: note = Derived polymorphism lacks residues 6 to 231
MPPPRRKRKAASYEPRRRSPSRLEFRATVDGAWYEARVAVQCGALRVMYEEFLEEQDEWYDPAGLATSSAWDVVKLRARFRVPSTPLEDTQCRDLQAGARLCVSCSLDGGDLKFYDAILDSVYPAAHEIVDGMERCACRFAVQWSDGPRAGSMEEVGIERVCCVQSSPVQDPVLMEFLDGVTKLAGDANVETVSQEIHVAPVVKGGVPANALQTRHRDFNGKFGPASRQAV

SEQ ID NO: 14812 - protein, 345 aa, Zea mays
  VARIANT 165..345: note = Derived polymorphism lacks residues 165 to 345
  VARIANT 242..345: note = Derived polymorphism lacks residues 242 to 345
  VARIANT 298: note = Ancestral polymorphism is S, Derived polymorphism is F
MATAAAATASSSLLAPAASSTAPASSNALLFPSSVPSLRAYPRLLLAFRRPAAAAIADPQGAVLEEEAEVDQQGQYDDDDGYEGGRGPAFTAPTRPRTGKAALLLKRDRTRSKRFLEIQKLRESKKDYDVPTAISLMKQMSSAKFVESAEAHFRMNLDPKYNDQQLRATVNLPKGTGQSVKIAVLTQGEKIDEARAAGADIVGGEDLIEQIKGGFMEFDKLIASPDMMPKVAGLGKILGPRGLMPNPKAGTVSSNITQAIEEFKKGKVEYRVDKSGIVHIPFGKVDFPEEDLIANFMSVVRSVERNKPSGAKGIYWKTAYLCSSMGPSIKLNIKEMLDYGLESSD

SEQ ID NO: 14813 - protein, 320 aa, Zea mays
  VARIANT 28..320: note = Derived polymorphism lacks residues 28 to 320
  VARIANT 31: note = Ancestral polymorphism is R, Derived polymorphism is Q
  VARIANT 35..320: note = Derived polymorphism lacks residues 35 to 320
MEEEKQVMEGAATAARRRLVIGVGFWVQGFRLFPWLGVNFFLKDGMGVAASSLQILQASANLPMVAKPLIGLLSDAVPIRGHRRLPYVAIGALLQAISWLAIALWQDISLQVLTIFLLLSNFGASISSYAVIPFLLGTMFFYQTEVLRLDSSVIGLSKVFGQVALLAWSMSYNKYFKTMSARKLLSVLQFVTALVMLSDVLFVQGVYRKVGIPDSIYTIVFSGLLEGLMFFKVLPFSVHVAKLCPAGCEGSVMAFVMSALALATIVSGYLGVALAAFMGVSGDDFSALPACLLIEAACTMLPLCCSSLIKERREKEKKQE

SEQ ID NO: 14814 - protein, 109 aa, Zea mays
  VARIANT 83: note = Ancestral polymorphism is H, Derived polymorphism is R
  VARIANT 66: note = Ancestral polymorphism is A, Derived polymorphism is T
  VARIANT 62: note = Ancestral polymorphism is A, Derived polymorphism is T
  VARIANT 49: note = Ancestral polymorphism is G, Derived polymorphism is A
MELIGKVCQHQNTVPLHAYYYSKDEKLLVYDYVPLGSLCAALHGNKAVGRTPLDWETRVKITLGTTRGMAYLHSVGSGGKFIHGNIKSSNILLSQELGACVTEFGLAQL

SEQ ID NO: 14815 - protein, 214 aa, Zea mays
  VARIANT 146..214: note = Derived polymorphism lacks residues 146 to 214
  VARIANT 49..214: note = Derived polymorphism lacks residues 49 to 214
  VARIANT 34..214: note = Derived polymorphism lacks residues 34 to 214
  VARIANT 30: note = Ancestral polymorphism is R, Derived polymorphism is C
  VARIANT 27: note = Ancestral polymorphism is E, Derived polymorphism is K
MAKLPTKPPLPAQPEYYFENGEGRQAERGRGPRQPYRGGGRRGGYNDGQAGNEFGRPRRAYERHSGTGRGYGMKREGVGRGNWGTATDEGLEQDTVDAVNPEETTAVVEDEKKPEDAPQSKVEKDKEGAENEEQEKEPEDKEMTLEEYEKVLEQKQKALLSLKAEERKVEIDKELQAMQQLSVKKDGDEVFIKLGSDKDLKKKESAEREEHGKK

SEQ ID NO: 14816 - protein, 228 aa, Zea mays
  VARIANT 130..228: note = Derived polymorphism lacks residues 130 to 228
  VARIANT 192: note = Ancestral polymorphism is M, Derived polymorphism is I
MPSLLDSPPQIPAAASAWGSLYAVQEPPVKPRHVMVVPAAAAAKKPAYGYGGRKKNLEMCTEALGCETGAVDAAPACGGAEMEAECAERKRRARGKDEMEGKARRSARRPLPPPLTTLARGASRVRMVHERRDGRLAVYAVPTTGIEAERSGGRLRMRLISLSDDSAACRRQEPQEAEAKKVVEEGECGVSMYVRGGRCVEPEGAAAAARSSKQWELEQAAAFWVATS

SEQ ID NO: 14817 - protein, 1054 aa, Zea mays
  VARIANT 268..1054: note = Derived polymorphism lacks residues 268 to 1054
  VARIANT 433..1054: note = Derived polymorphism lacks residues 433 to 1054
  VARIANT 598..1054: note = Derived polymorphism lacks residues 598 to 1054
MSVAVGKRVLDTGWLAARSTEVALTGVQLTTTHPPAADPAPAAPWMSAAVPGTVLGTLLKNKLIPDPFYGLNNQAIIDIADAGREYYTFWFFTTFQCALSGNQHATLNFRGINYSAEMYLNGHKEVLPKGMFRRHNIDITDILHPDGNNLLAVLVHPPDHPGKIPPQGGQGGDHEVSLISFRFGLSFASFFSKAQTRLVLLRILLVKGTTDAQLQMSMWSFQIGKDVATQYVEGWDWMCPIRFFLYFLFSFCSTICNINAFLTYLFFWHLRDRNTGIWDEVSISISGPVNITDPHLVSTFHDDFKRSYLHCTLQLENKSSWIADCTLKIQVSTELEGNICLVEHLQSYAITVPPQSDIEYTIPSLFFYKPNLWWPNGMGKQSLYNIEISVDVKGFGESDSWSHYFGFRKIESTIDDSTGGRIFKVNGEPIFIRGGNWILSDGLLRLTKKRYMTDIKFHADMNFNMLRCWGGGLAERPDFYHFCDVYGLMVWQEFWITGDVDGRGIPVSNPNGPLDHDLFLLCARDTVKLLRNHASLALWVGGNEQVPPVDINKALKNDLKLHPMFVSYQTSKSEVIYLSEESTDPSKYLDGTRVYVQGSMWDGFANGKGDFTDGPYEIQYPESFFKDSFYKYGFNPEVGSVGVPVAATIRATMPPVGWSIPILKKRIDGYIEEVPNPIWDYHKYIPYSKPGKVHDQIELYGAPKDLDDFCEKAQLVNYVQYRALLEGWTSFMWTKFTGVLIWKTQNPWTGLRGQFYDHLQDQTAGFYGCRCAAQPIHVQLNLVTYFVEVVNTTADELKDMAVEISVWDLDGACPYYKVTEKIVIPPKKVKQIIEMKYPKMKDAKPVYFLLLKLFRLSDNGTISRNFYWLHLPGQDYKSLEQYQQKKIPLKIDSDVSVSGTRHKVRMTVENISKKSVVDSTRSVSAMDLGDASGSHSTRKETTRKGNGSDGLWRKIRSGLGVARPSDNRRTLEVSGTDSGVAFFLHFSVHTSESSTDGEEYNDTRILPVHYSDNYFSLTPGENMAVDISFEAPQGSSPRVVLRGWNHHLDHAVMI

SEQ ID NO: 14818 - protein, 1646 aa, Zea mays
  VARIANT 1113..1646: note = Derived polymorphism lacks residues 1113 to 1646
MRVPCCSLCNVRYDEEERTPLLLHCGHGFCRACLSRMLAAAPGATLPCPRCRHLTAVGNSVSALRKNFPILSLLSTSPSSPSFLHSDSGSSSDGSEDEDDFFARPSRRPAPAPAAAPPGCSFFDLASHPDLKLARRIGSGPPGPAGQEVWAGTLSRGGGVKRCKHQVAVKRVPLAAGDGLEVVQEEVERLRRASTWCRNVCTFHGAVRVGGHLCFVMDRYVGSVQAEMRQNGGRLTLEQILRYGADIARGIAELHAAGIVCMSIKPSNILLDAHGHAFVSDYGLSAILKNLTSRRVPDDSSAGIDATLLSPNYTAPEAWGPLKKSLNMFWDSANGISPESDAWSFGCTLVEMCTGAVPWAGLSAEEICKSVVKEKKPPPQYSRVVGVGLPGELWKMIGECLQFRASRRPSFQDMLKTFLRHLLDIPRSPPASPEIDFANENLPNGMQPPTTSILEMVHDNPNALHHLVCEGDAAGVRDLLAKAASERNDSLIRSLLEAQNTDGLTALHLACRRGSAELVEAIVAYQENVDILDKDEDPPIVFALAAGSPRCVRALVGRSASINSRLREGLGPTLAHVCAHHGQPECMQELLMAGADPNAVDGEGESVLHIAVARRYTDCAIVILENGGCRSMGISNSQHKTPLHLCIETWNTAVVRRWVEVASLEDIAETIDVPSPVGTALCMAAALKKEHEKEFHKVQDYWTIMFFHLFQTLFVLIVKLLLLAEGRELVRILLAAGADSTAQDDPHCRTALHTAAMIDDVELVKIILEAGVDVNIRNAQNTTPLHVALNRGANSCVGLLLAAGANCNIQDDDGDNAFHIAADAAKMIRENLAWIAQMLLQPSPAVDVRNHRYEVADWVKFRRTVTSPAFGWQGAGPRSIGFVQSVVDNDHLAVSFCTGEAHVLTSEVIKVIPLNRGQHVQLKPGVSEPSIYLDAEIIELVGILNWRSTMCLLFGWRGQSRDSIGTVLCVDDDGILRVGFPGASRGWRADPAEIERVEEYKVGNWVRIRPSLTVAVHGMESITPGSVGIVYSIRPDSSLLLGLCYLSNPWLCEPEEVEHVDPFKIGDQVCVKRSVAEPRYAWGGETHHSVGKIIDIESDGLLIIDIPNRAAPWQADPSDMEKIENFKVGDWIRVKATVPSPKYGWEDVTRNSIGIVHSLQDDGDVGVAFCFRSRLFLCSVADVEKAQPFEVGEKVHVSPSISEPRLGWLSETAATIGAISRIDMDGTLNIKVSGRKGLWKVAPGDAERLSAFEVGDWVRLKPSIGSRPTYDWNSVGRISIAVVHSIQDSGYLELAGCFRNGKWLTHNTDIEKVQTLKIGQHVRFRAGISEPRWGWRDANPDSRGVIAGVHADGEVRVAFFGVPGLWRGDPADLEIENIFEVGEWVRLTNDVEQWRSLKPGSIGVVHGVGYQGDAWDGTIHVAFCGEQERWIGPSSQLEGVSKFVVGQRVRIRGCIRQPRFGWSNHNHSSIGTISSIDADGKLRIHTPAGARAWLIDPAEVEEVEEEEVCVGDWVKVKDSVGTPVYQWGDVNHSSIGVVHRADDGELWIAFCFCERLWLCKAWEVEKVRPFRQGDKVRIRPGLVSPRWGWGMETYASKGEVVGVDANGKLRIKFRWRDRLWIGDPADIVLDDVHLLTEASNGLAFCS

SEQ ID NO: 14819 - protein, 258 aa, Zea mays
  VARIANT 17..258: note = Derived polymorphism lacks residues 17 to 258
  VARIANT 123: note = Ancestral polymorphism is D, Derived polymorphism is V
  VARIANT 235: note = Ancestral polymorphism is V, Derived polymorphism is A
MGVGECKSNDYGAAAYWDARYSSGSPASAAAGCGFFDWYQTYPALRPLLRARVPTSSRVLMLGCGNSLLSEDMVKDGYEDIVNIDISSVVIEQMREKHKEITQLTYMQMDIRDMGFFGDESFDCVLDKGTLDAMMCADDAPHGAFKMLAEVARLLMPHGIYLLITYGAPKERVPLLDQSGCSWSIALYIMPTAGYQLRMSKGAQHLIMEEVTLTEGGQLPPDYVLKDPDSHFIYVCEKLEEKGTNCRDTDPKESTNAN

SEQ ID NO: 14820 - protein, 430 aa, Zea mays
  VARIANT 86: note = Ancestral polymorphism is L, Derived polymorphism is P
  VARIANT 186..430: note = Derived polymorphism lacks residues 186 to 430
MASAGISGSGDDDAGGKLLADRYQKGEVLGEGTYGVVFKAIDTKTGNTVAVKRIWVGKDKKEGVNFTALREIKLLKELKGPNIIELIDCFPYKENLHLVFEFMETDLEALIKDKNIILSPADTKSYLQMLLKGLSFCHKKWVIHRDMKPNNLLIGADGQLKLADFGLARMFGSPRRNFTHQVFARWYRAPELLFGSKHYGSGVDIWAAGCIFAELLTRRAFLQFGSSDIDQLGKIFAALGTPKSSQWPDMVYLPDYVEYQYVAAPPLRTLLPMASDDALDLLSRMLTYDPKARISAQQALEHRYFSSLPAPTRPSQLLRSRWKGDQGNNKMPDLNLQHGPLVLSPPRKLRRVIAHEWMEGMHRADKVDEHPSGMRHTDDMPSQKSSRIPMSVDVGALFGTRPAPRPTLNSADKSRLKRKLDMDPEFGFAE

SEQ ID NO: 14821 - protein, 59 aa, Zea mays
  VARIANT 46: note = Ancestral polymorphism is H, Derived polymorphism is Y
  VARIANT 43: note = Ancestral polymorphism is G, Derived polymorphism is R
  VARIANT 41: note = Ancestral polymorphism is G, Derived polymorphism is R
  VARIANT 35: note = Ancestral polymorphism is V, Derived polymorphism is M
  VARIANT 29: note = Ancestral polymorphism is V, Derived polymorphism is M
  VARIANT 21: note = Ancestral polymorphism is G, Derived polymorphism is R
  VARIANT 16: note = Ancestral polymorphism is R, Derived polymorphism is K
  VARIANT 15: note = Ancestral polymorphism is I, Derived polymorphism is T
  VARIANT 13: note = Ancestral polymorphism is K, Derived polymorphism is E
  VARIANT 10: note = Ancestral polymorphism is K, Derived polymorphism is N
MDHIVGGKFKLGKKIRSGSFGKLYLAVNVQNGEEVAVKLGGTGIPHLKWFGWRGSTMSW

SEQ ID NO: 14822 - protein, 1435 aa, Zea mays
  VARIANT 764..1435: note = Derived polymorphism lacks residues 764 to 1435
  VARIANT 838..1435: note = Derived polymorphism lacks residues 838 to 1435
MDRATPRVCGRRGVSQAAVEAAPSSSRARRRDKAPAVVMDLGDDDCGGGGARKTVGGAAGRCEGSTKAPLPLLPPMMVPAGAVALRTRSRRRAMLAAAVVEEAPTKKKKKEGAIPDAAEAPRGHGSKAAATSMATSSHKRRAGTSRSTSRDKRRARSGRASEPARVGRARKRKRNELEAPARRERVKAPCVSESDDNSGRGDDASHDGDAEPRVGVAIGTDLVNGDHPAAKEVVEGAGDEDTGDGGNSGLASTADVFAEEMAPFEDDYDDEMLEEQLVGDVIRAYSNGRNFDSDGVDWEAEDEMEFNDDADNSDFMDDADDSDFMDDAYEGGNSKPIQNHAKLEIQDWVNQKVVLSGGRCEARGEGDLEEELDVGKEADEEDVEPKSEAAPGSDKRVLQLEILGSDEEIKVLENMSSAPSRKASVQSKLPTIPSCVAWRTRSSWGVNQDRLSYDTYFEELSDEPKEDDDDTEVELDEVEDDNNDDDSSDAYDKDDEEKEEEEEEAERRKLNNRICTSDEDMINITVPTSRYDMFKKKNSSRYDIEWVEDEDASVDMLQPVSFKKDSSWKPVAVGNDTFTEQQKRSRFTWELERRKKLKLEMKTNPLHERDLDSDPNSSGSDQIRKYGFKSDGSHKVDRKKKHTSPKSGKKPSSAIILKRQSLLKLLVDKMSGDKSLASFPFDQNPQLQFIFKEMHPLVFSFGDEDLVAADRPEQDVGLDMLWADFDFALESENIGTYYDDECQEGNQLDFSLAPVTPCSRGKHEFVIDDQIGIRCKYCSLVNLEIKFMFPSLVSVFAEKSAWPNDKGVKNTLMFHDLYEQGVNDTEQSQDIHQYGTVWNLIPGVISTMYEHQREAFEFMWTNLVGDIRLDEIKHGAKPDVVGGCVICHAPGTGKTRLAIVFIQTYMKVFPDCRPVIIAPRGMLFAWDEEFKKWNVDVPFHILNTTDYTGKEDREICKLIKKEHRTEKLTRLVKLLSWNKGHGILGISYGLYTKLTSEKPGCTEENKVRSILLDNPGLLVLDEGHTPRNERSVMWKTLGNVKTEKRIILSGTPFQNNFLELYNILCLVRPRFGEMFLTKSRVGRRHYVSKKQKDKFSDKYEKGVWASLTSNVTDDNAEKVRSILKPFVHIHNGNILRTLPGLRESVIILKPLPLQKSIIKKVENIGSGNNFEHEYVISLASTHPSLVTAINMSEEEASLIDKPMLAKVRSNPYEGVKTRFVIEVVRLSEALREKVLIFSQFIQPLELIKEHLRKFFKWREGKEILQMDGKILPRYRQASIEAFNNPNNDSRVLLASTRACCEGISLTGASRIVLLDVVWNPAVGRQAISRAFRIGQKKFVYTYNLITYGTGEGDKYDRQAEKDHLSKLVFSTEDEFNNVRNMLSKAEMEHCSKFISEDKVLEEMTSHDQLKGMFLKIHYPPTESNIVYSYNQIATE

SEQ ID NO: 14823 - protein, 335 aa, Zea mays
  VARIANT 197: note = Ancestral polymorphism is R, Derived polymorphism is G
  VARIANT 96: note = Ancestral polymorphism is S, Derived polymorphism is N
MAGDAGSGVDWESLAEATSGAIGSLVSTTVLYPLDICKTKFQAELQTHQGAQKYRNLSDVFWEAIYKRQFLSLYQGLNTKNIQSFVSSFFYFYGYSYFKRLYLEKSGAKSIGTTANLLVAAAAGACNAIVTQPLDTATSRMQTSAFGKSKGLRETLAEGTWMEAFDGLGISIILTCNPSIQYTAFDQLKKRIIQRQRRKNAASAEDNSIVSLSAFSAFLLGAVSKSIATVLTYPLIRCKVMIQAADPDEDDDVDSERPSKSRTPKTMLGALHAIWSKEGIPGFFKGLNAQILKAVLSSALLLMIKEKISKFTWVSLLALRRYLFVSQKRIKSVTV

SEQ ID NO: 14824 - protein, 324 aa, Zea mays
  VARIANT 33: note = Ancestral polymorphism is S, Derived polymorphism is F
MASSALAHSAARPSAQPTVDSRTRSAFADAPDSVEARRARTAAGTAPWRTISPRATRHNPQMAARQERLVSTAFLSRAPISSTVPTRRTSSDDLVAAAFASPAALTSNSSASLAASILASRPLPPCFTRASDAVEAAASAARPVATRFLFESSMPSEAKIKASTLVAASMPSTPVSSALLQRTDATVSATRSAPGIDSFNSYYDPSLKKARRALLGSHGVFVVEGDINDGRLLAKLFDVVPFTHVLHLAAQAGVRYAMENPAAYVHSNVAGLVSLLEACKDADPQPAVVWASSSFVYSLNDRVPFSGLRGRGHRGRIFPQKTYT

SEQ ID NO: 14825 - protein, 252 aa, Zea mays
  VARIANT 223: note = Ancestral polymorphism is A, Derived polymorphism is V
MLRPFLSRHRSAAAARAATAAAAGAAVMRPASSSRSSAGGGGGHHHYHNHSGGHNVSVSPPTCTTCRHAPSSATLDLLILLLVLFSLAFLLASSLSHVARSLSPLLATPPAVAALAHATAALPYLAAAAVLAATAFLSCSRLPRRRCRNPRCRGLRKALEFDVQLQTEDAVRACAGSTVGGADASMWREIEALPWKGGQGGNNPDYECLRAELRRMAPPNGRAVLLFRSRCGCPVAKLEGWGAPKTKRRNKK

SEQ ID NO: 14826 - protein, 326 aa, Zea mays
  VARIANT 274: note = Ancestral polymorphism is D, Derived polymorphism is V
MITAAPALPMFLRLCPASPFLLRPSLHVPSSRRPTPSRLSSFRPARPLFPISAVEKTNEAAAAGEGELEGMPPEFYDEEWQARQRERTKEWHAYRQKEEAEEERITNEYREIGMRLKAYPQEEVRKARILVSSFIRAGGDVEEEIEKAAERGELTELVLMVIWNRLDIARRDDERDAIRSLDLLYRRVETEILKSEATPAMRLLNDLLNLHDGGDNEKWLKKCRKRMLEVFPREDPFTVVFPAGFNMENREGRIELPPQDDDLLLRVDFVREVDELLKEVRAVEDKNKQQIGFDPESVAYMLKQQEKMQTMRQVESLLDLASSLKW

SEQ ID NO: 14827 - protein, 233 aa, Zea mays
  VARIANT 50: note = Ancestral polymorphism is P, Derived polymorphism is H
MEDGIGPVNRFPCNANFVRFFMFPIPVGMVPLRRFYVAFVYAPISFPPLPLIVLKNRDGEQSTIAAVGSLKSMDPDRIILKKIVLTMYPQSLESEIDRVVYVPRSQRRKMVQGNLLSGGQNMVVVAASWRPLVLMWHIVNGVSDNILNHIILENNENKPVTNSRDTQEICLEQGLHILKIFEDYHVSKTSIRNDLASAMGNTPNPYEQAMSTCVNDQAMMLSHMVWHESTISL

SEQ ID NO: 14828 - protein, 879 aa, Zea mays
  VARIANT 89..879: note = Derived polymorphism lacks residues 89 to 879
MASSLPAPPASPSSSWRGLTPRCPPPRCGPLLARAVARSYRYRFRTDDDGVVDVAVAGKDGDAGYVVAIEAPTHGQRGGLVLRPAGSGEGVPLAPAAPGGALVAELSYDVARAPFHVSFTLADAMGAEIRTHRGTSFRVPVGVGRGCPSPLGLSQSKDGAANFAVYSKIAKGMVLCLFGGGGGDGPALEIELDPYVHRTGDVWHVSMESVEGYARYGFRSGLFAMFGIDRPLLDPYAKVIGDFVAGDSVDEDGLAVPSIRCLASLKNAPNYDWGRDKHPCLPLEKLVVYRANVALFTKDRSSRLADNAAGTFSGMSAKVEHFRHLGVNAVLLEPVFPFHQVKGPYFPYHFFSPMSLYSSECSSVSAIKSMKDMVKTMHRNGIEVLLEVVFTHTAEGGAECQMISLRGIDGSSYYIADGIAGCKASVLNCNHPVTQKLILDSLRHWVLDFHVDGFCFINAPFLVRGPRGEGLSRPPLLEAIAFDPVLSKTKIIADPWSPLDISNVQFPFPHWKRWAEMNTRFSMDVRKFLKGEALISDLATRLCGSGDLFSSRAPAFSFNYVSRNSGLTLVDLVSFSSDELASEFSWNCGEEGPSENNAVLQTRLRQIRNFLFILFISLGIPVLNMGDECGNSAAGSTSYKDRGPLNWKALKTAFVKEVTGFISFLSALRSRRADIFQRCEFLKLENIHWYGSDLSEPCWEDPTSNFLCLHINAELDEKLPDSTGGDLYICFNANEESASATLPAIAEGSMWLRLVDTSLAFPGFFSRGSSHETHQMDATDDGAAAAAAEAARRPFTALSQEEADLALARVLQEQERAYMLLRMNGGGGEGSNYGSSDEGSYEYDEEGEEDYEEELELSLVSAIVSTYDSLPPTPAQFTI

SEQ ID NO: 14829 - protein, 621 aa, Zea mays
  VARIANT 458: note = Ancestral polymorphism is D, Derived polymorphism is Y
  VARIANT 285: note = Ancestral polymorphism is D, Derived polymorphism is Y
MQRRAPRLRVLLHLLILVPALSEVPDHYASPRVGSGTRTGLSNSPAQEYLDPTYPVPRSPPGASTCVLPVLSYSFANTYGTPPAKAAYAPPAECPAPWSLVVLSFSVAIAGDQYDRVAAVWLDGAELLRTTTAEPTTDGVRWTIHKDVTRYSALLRSPRGGELSVMLENLVNDVYTGVYNVSVSLEFHGVPAYLGDAGSSSAAGSAEPGGQATLKLPASYFQPADLILPISEGMGSSNGFWFRIQNSSDPRSKLVRIPSNTYRAVLEVFVSPHSNDEFWYSNPPDLYIRENNLTTGRGNAAYREVVVSVDRHFAGSFVPFPVIYTGGINPLFWQPVAALGAFDLPTYDVELTPFLGILVDGKPHEIVLSVVDGIAEWLVDANLHLWLDPASTNVSAALSRYRTPRLSIKRRYSTRRPLDGKFKIRAKRKSQFSGWVKSSFGNFTTNVETELEVTSLVDFTSQGRNKTVRLQVEQDTEVVVRSSETRKAVGKVETEAKYPLWLEMVTEDGENDTYVMRANLTHSLSVETDAEAEGLFDGETRVVDEQAAAGWMLVRGHDVLDGSAATTQAYRYSNEAGRYERAIDTLDGAVLSDNVTESYRASGDGLAWLAAGPAGGGAMEL

SEQ ID NO: 14830 - protein, 586 aa, Zea mays
  VARIANT 452..586: note = Derived polymorphism lacks residues 452 to 586
  VARIANT 427: note = Ancestral polymorphism is R, Derived polymorphism is W
  VARIANT 424..586: note = Derived polymorphism lacks residues 424 to 586
  VARIANT 405..586: note = Derived polymorphism lacks residues 405 to 586
  VARIANT 352..586: note = Derived polymorphism lacks residues 352 to 586
  VARIANT 236..586: note = Derived polymorphism lacks residues 236 to 586
  VARIANT 229: note = Ancestral polymorphism is W, Derived polymorphism is R
  VARIANT 219: note = Ancestral polymorphism is R, Derived polymorphism is H
  VARIANT 211: note = Ancestral polymorphism is P, Derived polymorphism is L
  VARIANT 208..586: note = Derived polymorphism lacks residues 208 to 586
MSAPHSAPHHPSLPAGDAKKQPHLGADPSKKASCFGGGGDHHPKKPGPSAAKLALASFLGVIILLAADASLTGAGAHRRLRQQYLHYVGVGVGGGGITDSLSWLSVPDRPNFTDDLLARWLAPGGSPCRDARTANISVEVLDDAAARGEATTLGAGEIHEVTFWALDEAGQRRCLGGDYFEVDLSGDAWKSRPPIVDHGDGSYSFRLQVAPRFAAGEFRLTVVLLFRSWEGLKFSSSRFKYRAELRRIPLLFRPDNNASLPALETCRAADFSRDAWSGRWTRLAKNDSCEDVDAAGRYRCLESDHPCEAPWCDGPLGALESNGWVYSAHCSFKLFAADASWRCLDGKWLFFWGDSNHVDTIRNLLTFVLGITDTSVVTRRFDAVFTNPSGGAGTLRITSIFNGHWNMSMNYLGLHSLRNRGFRQLIRSYFMSGDRVPDVVVLNSGLHDGCYWTSVRIYAQAADFAAQFWSGVMDKVRARGRAVPRVFYRTTIATGGYARDLAFNPNKMEAFNGVLVEKMRRHGVLTGGVIDNFDMTFPWHYDNRCNDGVHYGRAPAKLVWRDGKVGHQYFVDLMLGHVLLNAICNE

SEQ ID NO: 14831 - protein, 146 aa, Zea mays
  VARIANT 56: note = Ancestral polymorphism is A, Derived polymorphism is V
  VARIANT 34: note = Ancestral polymorphism is A, Derived polymorphism is S
MEVETMLDDDVFFAELSKRISLLITDDDEGADFSAAQFIPAAAAAAAPLQGFASRAHVPSQASLLAPPAYALYHHYHHGASYGGDDSARAAWQQLQCGSKGTGVFIPRSTPGSAHPKKKGKSRGAAAAAAKAARAAGAGAPPRKRV

SEQ ID NO: 14832 - protein, 170 aa, Zea mays
  VARIANT 52: note = Ancestral polymorphism is Y, Derived polymorphism is C
MVRATRGVAAGAWYFEVKVVHLGPTGHTRLGWATNKADLQTPVGFDAYGFGYRDVDGAKVTKAWRDKYADEGYGEGDVLGFYISLPDGERYEPKQPDLIQYKGMPFHVQVPKEEQKTPDPVPGISINHMKEVDSHAPVKQKLQLFPINEATLKPFEKVDLLDSPMPDYLT

SEQ ID NO: 14833 - protein, 827 aa, Zea mays
  VARIANT 69..827: note = Derived polymorphism lacks residues 69 to 827
MEPDRVAAGASSSPQPSPAPAMFLPGQTRGNHERGAVDCADPGGDLNPAPPPSPQQATVEDAAVGGDVEQEEPKKEAMAGVGEALRSFMEEFGDQGEDSIILSPRLQEICTPDRPTALRFLGKKYNNLMERYKKQVVKCSEECDPRYNGLKKKYTDECAERRRLYNELIELRGNIRVFCRCRPLSSNELARGCSSVVEIDSSQETELQFVPNEKERKPFKFDHVFGPEDDQEAVFSETVPVVGSVMDGFNVCIFAYGQTGTGKTFTMEGVPENRGVNYRALEELFRISEKRSASVAYTFSVSILEVYNEKIRDLLDESNDQSKRLDIKQNADGTQEVHGLVEAPIYNIDGVWEKLKFGAQNRSVGSTNANELSSRSHSLVRVTVRSEHLVTYQRSRSHMWLVDLAGSERIAKTGVEGDRLKESQFINKSLSALGDVISALASKNSHIPYRNSKLTHLLQSSLGGDCKTLMFVQISPSSMDSGETLSSLNFASRVRAVEHGPAARKQADPAGSLKLKQMTEKLQHEEKENAQLNQSLQLMQLKYASRENVFRTLNEKVKDAEQACRNYQQRIRELENELGNEKRASRDSARSSRPPLVPTRQRQPQGRTNSFAPPSGPSRWRLKAPAKHNKENIPVAMNKPNAGDDPNKPVGRARRVSLAPVIRQIPIQPKRRSSMAVLPSVREHLSVLNDKKAGSRLSQANMARGSLGAFGLNLVPGTPLAGHGGPVDATPDGAKFRRFDFGSSSKFTSPAPNVGMWNKMVTPQQKLGMAPAGAKLCFSIQKRVTPPHVRAKPGLGIFDPALRENMVVGRAGNALRVLNPKRRQSVI

SEQ ID NO: 14834 - protein, 236 aa, Zea mays
  VARIANT 86: note = Ancestral polymorphism is F, Derived polymorphism is L
  VARIANT 36: note = Ancestral polymorphism is K, Derived polymorphism is M
MTMESPTTAAGGELESYFSLGLTVSHSQKDNAEFPKVLLLLSAYLDKTVQQNEELLDSSKIKESTTIFHGQRVPELSIKLYAERIFKYAKCSPSCFVLALIYMERYLQQPNIYMTSFSVHRLLITSVVVAAKFIDDAFFNNAYYGRVGGISTREMNMLELDLLFGLDFRLKVDIETFESYCLQLEEALVLVLERPIQVQEANVTKHLICNSSADETCKHELGLERYSSQAVQGCSW

SEQ ID NO: 14835 - protein, 795 aa, Zea mays
  VARIANT 278: note = Ancestral polymorphism is A, Derived polymorphism is S
  VARIANT 266: note = Ancestral polymorphism is L, Derived polymorphism is I
MEAEQQKQQRPRQRPRRKGQKRKLEDEASAATAAAASSLGSAGADDDNEEEDGSAGTPEICRHSHAALAREVRAQVDVLIRCASSWRHADRAAAKRATHVLAELAKNGNLPSPNLIPAAPIRAPASLPSGSGGSWWLSRAEEVVNMIVEGGAVAALVCHLEEPAVAAQTQEEQQLRPFELEVEKGAAFTLGLLAVKPEHQQFIVDAGALPPLVKLLKRQRSTTNSRMVNSVIKRAADAITNLAHENSNIKTRVRMEGGIPPLVELLESQDLKVQRAAAGALRTLAFKNDENKTQIVQCNALPTLILMLRSEDAAIHYEAVGVIGNLVHSSPNIKKEVLNAGALQPVIGLLRASDKIRVKFSSMIADSFWLCSCRSCCTESQREAALLLGQFASADSDCKVHIVQRGAVRPLIEMLQSADVQLREMSAFALGRLAQDTHNQAGIAYNGGLVPLFKLLDSKNGSLQHNAAFALYGVADNEDYVSDFIKVGGVQKLQDGEFIVQATKDCVAKTLKRLEEKINGRVLKHLLYLMRVGEQSVQRRVALALAHLCAPEDQRAIFIDNNGLDLLLDLLISMSPKHQQDGSAALYKLANKAAALSPMDAAPPSPTPQVYLGEQYVNSSTLSDVTFLVEGKRFYAHRIALLASSDAFRAMFDGGYREKDARDIEIPNIRWEVFELMMRFIYTGSVQINSEISQDLLRAADQYLLEGLKRLCEYTIAKDVNLDNVSDMYDLSEAFHAVSLRHTCILYILEHFNKICTRAGSAQLIQRVIPEIRNFLTKALNSSRSPSPSDRNSQT

SEQ ID NO: 14836 - protein, 240 aa, Zea mays
  VARIANT 88: note = Ancestral polymorphism is E, Derived polymorphism is V
  VARIANT 98: note = Ancestral polymorphism is H, Derived polymorphism is R
  VARIANT 112: note = Ancestral polymorphism is A, Derived polymorphism is G
MASSQCCDNPPALNPACGEGKVVDSFGGLKAYVAGPEDSKAAVVLVADVFGFEAPIMRKIADKVASSGYFVVVPDLFHGDPYAPENVEKPFPVWIKSHTPEKGFEETKQVIGALKEKGVSAVGAAGYCWGAKVVVELAKAHEIQAAVLLHPSFVTVDDIKEVKCAISILGAEIDKMSPPELIKQFEQVLSLNSGVGHFVKIFPGVAHGWSVRYNHDDAAAVKSAEEAFADMLDWFNKNLK

SEQ ID NO: 14837 - protein, 227 aa, Zea mays
  VARIANT 3: note = Ancestral polymorphism is P, Derived polymorphism is L
  VARIANT 137: note = Ancestral polymorphism is G, Derived polymorphism is A
MAPKLPVVLLAACAVLLALATPLLAGDPDMLQDICVADYESLEGPLRVNGFPCKREANVTADDFFFGGLAAAADVYSGNPMGSAATAADVSVLPGLNTLGVSMARTDFAPSGGVSPPHVHPRATEILFVVEGTLEVGFVTSANRLFSRAVGKGEVFVFPRGLVHFQRIVGAAPAVAISAFNAQLPGTQTVAGALFGAAPAVPTDVLARALQIDGGAIEYIKSKFAPN

SEQ ID NO: 14838 - protein, 590 aa, Zea mays
  VARIANT 152..590: note = Derived polymorphism lacks residues 152 to 590
  VARIANT 66: note = Ancestral polymorphism is C, Derived polymorphism is F
MDCHGRGKGNEKAILDSGESSGAAGGLSKTYVVTKAGKRIELKGTIKDTWSHGTKRGKLGWKCGYCNASHASGGATRLREHLCGLQGNVKPCFNVPRDVKNILLEEVALSKKKKRDTTENRLYIQKALVEHDYRTTIARLNEEEQLEMAMRESLRDVGLTYDGSSRGSGIVIGSASGSRVSNSVAGNYGQTSGSRSGSSTKQSSLRSFYLGPSSSKAPFDIDLARSRAPSQPRVDIMLCRDSKLKLWKALSKWFHANDIPGRKADCPYFRSAMKLAQQLGEVPLPKGKDIDGQLLDMNYNDLEAHMESFKEDWSRYGQKNATLSGFLPKMIQAYNDISAKLKKSERGKGGLLKRTAEVISKRIRYLLNETLMLAGAALDPQELYRSNLAKKSSCQLAVTLAIKKLATSTKEAAAAIDQFSRFIEKKGLFGDPEAKWSALNGKPDAADFQSLQEKDSDPCSMLMDVALYDDQNPIMDWLNNSMSDSAPTLDEYDDSDLDWSTPSRFVTESLQMGIEEVAEFKRDLYMGKKGCKNKQRMQWDGEDAEGTAEDYETDSSQEQGSPIYAESGDSSSNDEGDGEFQSKFPVYICY

SEQ ID NO: 14839 - protein, 177 aa, Zea mays
  VARIANT 41: note = Ancestral polymorphism is R, Derived polymorphism is W
  VARIANT 36: note = Ancestral polymorphism is G, Derived polymorphism is V
  VARIANT 28: note = Ancestral polymorphism is S, Derived polymorphism is P
MFFHIVLERNMQLHPRHFGPHLRDKLVSKLIKDVEGTCSGRHGFVVAITGVEDIGKGLIREGTGYVTFPVKYQCVVFRPFKGEILEAVVTMVNKMGFFAEAGPVQIFVSNHLIPDDMEFQSGDVPNYTTSDGSVKIQKESEVRLKIIGTRVDATEIFCIGTIKDDFLGVISDPGAAV

SEQ ID NO: 14840 - protein, 371 aa, Zea mays
  VARIANT 249: note = Ancestral polymorphism is R, Derived polymorphism is Q
MPLPPQPVRRSCPILLAVNDTCGGKHGLSSVYPFVRISVAWRLILAHAPNLLRCSCLFASSVTRMTSTCAARVPSLRWAPQRGWVGSWVSVRPAKCRTSGGHAVVCAAVSFRPCIDIHKGKVKQIVGSTLRDLANDSMELVTNFESDKSPAEFAKFYKADELLGGHVIMLGANPSSQAAALEALRAYPGGLQVGGGINLENAMSYLNEGASHVIVTSYVFSDGKMNTERLRKLVELVGKQRLVLDLSCRKKDGRYTIVTDRWQKFSDVFVDEPTLEYLAAFADEFLVHGVDVEGKRLGIDEELVELLGHYSPIPVTYAGGVSTMDDLERIKKAGKSRVDVTIGSALDIFGGDLPYKDVVLWHRKQSMVGQV

SEQ ID NO: 14841 - protein, 383 aa, Zea mays
  VARIANT 303..383: note = Derived polymorphism lacks residues 303 to 383
MRFSALLLIVALLCLGGGGGGRVTASTEFNFPAVFNFGDSNSDTGGRVAAGFESIFPPYGSSFFGGPAGRFCDGRLVIDFLMEAMDMPLLNAYLDSLGTPSFRTGVNFAQAGCSITPAKPTSVSPFSFGLQIKQFFAFKNKVTKLLSEGDMHSRYIPQQDYFSEGLYTFDIGQNDLAGEFYSRTEDQVIASIPTILLEFENGLKKLYDQGARKFWIHNTGPLGCLPQNIALFGKDPSQLDELHCVAKHNRAAKLFNLQLHALCTKLRAEFDGASITYVDIHTIKYSLIANYSRYGFEHATQACCGYGGPPLNYDGNVPCGHTVSLDGKMVTAKGCSDTTEFVNWDGIHYTEAANFHIASQILTGKYSDPPFVDKMPFVIKPRF

SEQ ID NO: 14842 - protein, 293 aa, Zea mays
  VARIANT 272: note = Ancestral polymorphism is V, Derived polymorphism is M
  VARIANT 268: note = Ancestral polymorphism is F, Derived polymorphism is L
  VARIANT 250: note = Ancestral polymorphism is P, Derived polymorphism is L
  VARIANT 249: note = Ancestral polymorphism is R, Derived polymorphism is Q
  VARIANT 177..293: note = Derived polymorphism lacks residues 177 to 293
  VARIANT 174..293: note = Derived polymorphism lacks residues 174 to 293
  VARIANT 136..293: note = Derived polymorphism lacks residues 136 to 293
  VARIANT 129..293: note = Derived polymorphism lacks residues 129 to 293
  VARIANT 60: note = Ancestral polymorphism is S, Derived polymorphism is L
  VARIANT 59: note = Ancestral polymorphism is N, Derived polymorphism is K
MERLLILWQEESILQILVMPQCSYETLLFQRLHCGCVASKNSYDLLDSGGIKCVTCMKNSVAQFASGQVVPKLFPCPNNLLFFGKSDELLSSRKFGQPPSLMLDSRNDDIAIVNKSNHLFMVSGIEAGQSSNILRQKEIENGPRQIKWEQPTLNIGDMGRPLLTRSQSALESPQCTRRDDNKDPTTDSTTSESFPEACLSMNLGIANNGNRMEATSTAERPMLSPTTAIAEGRDLATALSPHKGLGISRPDHQGLVRVQLLIQLETCFRIFVLLDHLLKEGVAINYFLGIGQE

SEQ ID NO: 14843 - protein, 446 aa, Zea mays
  VARIANT 33: note = Ancestral polymorphism is T, Derived polymorphism is S
MDERQKGHAVARAGQSKEPATGKTSRRQALRRTGRTQHMAKRPSESQSALMRRPVHNSTSSPAGGRCLLADAVLPDQTQQASTHFFGNSVCRVRVMRDHATETCRMKIEIEKEIEIESGCTETSKGRSSKEILGRAWAKACHAIGIPGRKVDNPYFRAAIMESQKQGVGVKLPTGREIDGKYLDENVKEFQKEIDKWKIEWNEFAIRDWMERGRSNAPPTLDEDSPISDTPLPSMLFTSLVREQGGTEEVQEWADETIGDTHLGKRKTRLGPSDRKGKRVKITDQIEEEDEDEDSDDNTTDPSAGDDGSHGDAGLYGGGSGAGGSGMGGSGAGDWRSTGGSRFTHSTQDSYHDAPHSQRETISGRRRSVSFPVQDGIRSSSSSGSSNYPTGQDPGYNPYAWQWQPSQGTYGPPPPSGEAPPSIMYGYGNYGPPPPPYSNLSNMYPP

SEQ ID NO: 14844 - protein, 403 aa, Zea mays
  VARIANT 366..403: note = Derived polymorphism lacks residues 366 to 403
  VARIANT 97: note = Ancestral polymorphism is E, Derived polymorphism is K
  VARIANT 45: note = Ancestral polymorphism is Y, Derived polymorphism is H
  VARIANT 32: note = Ancestral polymorphism is H, Derived polymorphism is N
MLANVCRRRLTIPLSPILAAAAAAASGKNPIHSNHARALLSQSYYSSAVQAAPDREPCPTTVSYLVSCGVSPAVAAARKVRIRDTDRADAVRALLRKYGFSEADITRTVRLDPLLLTFDPDRTIRPKLDFFVSLGIQPRLLATEPHILARSLEKHIIPCIEFFRTILRTDDNIRIAVSRVPRALMTDIESTMRPAVEAFLSHGLSMEAIAKLLMIHMGMIKTPPERIREAFHDLKALGLRVTDTGFLYGFRVICSLRRETMVRKVAVFKSFGVSESDLFRAFKTQPTILLVGDETIKKKFRFFLDVMKLEIADVMAQPLTLALSLEKNIMPRCAVLSILMKEGKLKRTQKLIPPLLSNSRVFSERYVLRHAKDVPDVVKAFEGKIKFQGFGESEVRTSVPLND

SEQ ID NO: 14845 - protein, 351 aa, Zea mays
  VARIANT 235: note = Ancestral polymorphism is S, Derived polymorphism is L
  VARIANT 248..351: note = Derived polymorphism lacks residues 248 to 351
  VARIANT 254..351: note = Derived polymorphism lacks residues 254 to 351
MAGSDEVNRNECKGAVPIHTWVLISNFKLAYNMLRRADGTFDRDLAEFLDRRVPPDARAQEGVSSSDHVIDTSTGLEVRIYRAATNNGGAGAAAVTLPILDFLGGGPSPDPFPVILFFHGGSFAHSSSGTAIYDNLCRRFVKLSKGVVVSVNYRRAPEHRYPCAYDDGWAALKWATSQPFLRSGGDGRPRVFLSGDSSGGNIAHHVAVRAADAGINICGNILLNAMFGGTERTESERRLDGKYFVTLQDRDWYWKAYLPEDADRDHPACNPFGPNGRRLRGLPFTKSLIIVSGLDLTCDRQLAYAEGLQQDGHHVKVVYREKATVGFYLLSNTDHYHEVMEEIGDFLAANL

SEQ ID NO: 14846 - protein, 134 aa, Zea mays
  VARIANT 32: note = Ancestral polymorphism is A, Derived polymorphism is V
  VARIANT 38: note = Ancestral polymorphism is A, Derived polymorphism is V
  VARIANT 40: note = Ancestral polymorphism is A, Derived polymorphism is V
  VARIANT 62: note = Ancestral polymorphism is L, Derived polymorphism is P
  VARIANT 87: note = Ancestral polymorphism is R, Derived polymorphism is C
MQRLSLGSPAGKNSRLSVAADEEAEATDEKAAKAMVRARALNRSIHLVPVLTLLCFLVLFLLSHDPSAALTDSPVLAAATTVTVTARPLEAAVVAGGADATVASSGVYRRLKEDPRQQQQQQPHGRRLGMSRRR

SEQ ID NO: 14847 - protein, 613 aa, Zea mays
  VARIANT 31: note = Ancestral polymorphism is F, Derived polymorphism is S
  VARIANT 159..613: note = Derived polymorphism lacks residues 159 to 613
MATPPPPLPPMPPRHVSCGSLLQELQEIPRFLVLLWHQFCSALPTSLNTTILKQELWGEIGQDEMKRDRMILQLEEDCLNVYKQKVNQTRKQKADLLQELSLGEADIDKILSALGERETFPRSEKLGGTLMEQLAKIEPVLEDLRRRRDERVNEFKAIQSKIVCLQAEISGAIDHGDPAAPVVDENDLSLKRSGELKEHLNDLQTEKNGRLQKIDIQTNSIHEMCNIMSIDLKMALKDVHPSYAELGRSKPMSISNSSLDRLSEKVHALNHEKKQRLRKLQDLGSTLIELWNLMDTPTDEQRFFDHVTSLIKVSPTTAMPQGCLAHEIIEKVETEVKRLTKLKASKMKELVFKKLTDLEEIYRSVHMDIDSDSERQTLNDLIDSGRADLSELLARMDIRIAEAKEHALSRKDILEKVEKWTLASEEETWLDEYERDQNRYNAVRGAHINLKRAEKARILVSKLPSLLENLTAKIKAWEKEMGIPFIFNKASSITHCSCQTKRAYEYTCTRQQKEEEKRRSRELKKLQEQFATEQGAKFGTKPSPIRPLSSRKPLGQSSNANIIGGTPTSRRVSTPMSRKGRPSSGRVQEAVKTAVAPANYVALPKDCSDISTL

SEQ ID NO: 14848 - protein, 401 aa, Zea mays
  VARIANT 15: note = Ancestral polymorphism is L, Derived polymorphism is R
  VARIANT 28: note = Ancestral polymorphism is A, Derived polymorphism is V
  VARIANT 137: note = Ancestral polymorphism is V, Derived polymorphism is A
  VARIANT 174: note = Ancestral polymorphism is R, Derived polymorphism is M
MPPGPATTLASLNSLLASLARSGRPAQALCTFRDMLARGIPPDHFTLPPVLRSCTLTGAAGLASTSHALAVKLGAQENLFVASALVLCYAGLSNLPDARRLFDGMRERDAVLWTSMLSAYAQGGEPDAAMRFFGSMVAAGMELDAVVMISLLLACGQLGWRRHGRSVHGCCIRRFLGMPLPLGNALVDMYVKCGDFAFAQRVFVGMPRRDVISWSALILGHGLNGRSDVALGLFDRMSAEGIRPNSVTFLGALSACAHSGMVDKGYAIFKGMKLSGIEPELKHYSCMADMLGRAGHVVEAMKLIEEMPCEPDEAMLGGVLAACRVHGEMESAEWVSKRLMGMSPGKSGYYMSLANIYSDAGRYSDAETIRGFMKELKVNKLPGYSSVELDADRFHILGNRV

SEQ ID NO: 14849 - protein, 303 aa, Zea mays
  VARIANT 215..303: note = Derived polymorphism lacks residues 215 to 303
MATTTTAGRNNGEGEQKRWREKGGFKTMPFILGNDICDRFATAGFGANMITYLTQQLHLPLVEASNLLTNFGGTSSLTPILGALAADSFAGRFGTIVAGSVFYQLGMLGLVVSALLPSLRPAPCPGAPAACQRASGWQLAALYLSLLCTSVGSGGLRPCVVAFGTDQFDREPGEQQVTAEAAGEVAERKRRYFNLYFFTMGVAALLALTVVVYIQDNVGWGWGFGIPAVAMFVSIVVFVVGYPLYVRLKPGGSPFTRLAQVAAAAFKKRHVAVPEDAGMLYQDKELDAFISTNGRLLHTDQLT

SEQ ID NO: 14850 - protein, 348 aa, Zea mays
  VARIANT 263: note = Ancestral polymorphism is L, Derived polymorphism is I
  VARIANT 167..348: note = Derived polymorphism lacks residues 167 to 348
  VARIANT 159: note = Ancestral polymorphism is P, Derived polymorphism is L
  VARIANT 156..348: note = Derived polymorphism lacks residues 156 to 348
  VARIANT 101..348: note = Derived polymorphism lacks residues 101 to 348
  VARIANT 39: note = Ancestral polymorphism is G, Derived polymorphism is A
MAPAALQGLSKCYILMLWDILNIKCYMLMLWSLIIKLLGIPSSILRADVLNVGTYTFKAILKSHFKLLQKGSGCCNHVADCLCCMCCIRLLDAVEDATKVQTLLFSATLPDWVNKLSMRFLKVDRKTVDLVGNEKLKASASVKHLALPCNKAAMAQVIPDIIRCYSQDVLPHRWLFFSNTGVAVMLYEPRYKHSDSRLERESGVKFEHISAPQPTDVTQSTGSEAADAISSVSDSVIPIFRQQVEQLLSSSSLSAADLLAKALAKAVVCYNIPVIVFLHRWGHICSHWCYLQFDVGNVVMVTGGRNTGRVGVIKNWEKHKGIFEVIDVLLGVFCMLCLVFSYLLYRKT

SEQ ID NO: 14851 - protein, 602 aa, Zea mays
  VARIANT 51: note = Ancestral polymorphism is T, Derived polymorphism is M
MGTATAAMDRNADGEQGKRKKKGGFRTMPLILASEVCDRFATAGFGANLITYLTQQLHLPLVEASNTLTNFSGTSSLTPILGAFAADAFAGRFWTIIAGSVVYQLGMVGVVVSAVLPSLRPPPCDDPPAATPCQRASGWQLALLYLSLLLTSLGSGGIRPCVVAFGADQFERLDSAEEEEKAKAKAEAERKRRYFNLYFFTMGLAALLALTVVVYIQENVGWGWGFGIPAVGMFMSIVVFLVGYPLYVLVKPGGSPFTRLAQVVAAAFKKRNAAVPEDPRMLYQDKELDALISTNGRLLHTNQLTFFDRAAIVTAGDISPSGQPDPWRLSTVHRVEELKSIVRMLPIWSAGIMLATASSHNYTFTIMQARTMDRHMGPHFQLPPATLSIFSNAAMLVTLALYDRVFVPLARRVTGLPSGITYFQRMGIGLAISVLSVATAALVETKRRDAAARHGLLDSPAAVVPLSVFWLVPQFAVHGVGDAFSSVGHMEFLYDQAPESMRSSAAALFWLAASIGNYMGTVLVTAVQRATRGRGEWLQDNINRGRIDNYYWLVTCITLLNLGYYLVCFYFYTMKPLEVADDCDKDCELSSLQKNGSGAALV

SEQ ID NO: 14852 - protein, 260 aa, Zea mays
  VARIANT 239..260: note = Derived polymorphism lacks residues 239 to 260
  VARIANT 223: note = Ancestral polymorphism is G, Derived polymorphism is E
  VARIANT 220: note = Ancestral polymorphism is G, Derived polymorphism is R
  VARIANT 214: note = Ancestral polymorphism is W, Derived polymorphism is R
MGARPRSRSALPRLSFLPRRRPRPRPHLICLLPDAAEVVAAAPPAHCTAPEPPSCISEFGSEAPRDSQSSSLDLAVEVAGPLDQQASWCRAADSPTREKEPDMRPRLVLFGDSITELSFTSGGWGAALTDRFARQADVVLRGLSGYNTRWALKVLPRAMEGAAGAGADPAAVTVFFGANDASLPDQVQAHQHVPLKEYQSNLRAICAYFKVKLWAYLGFGCLGLVTHLSVAWVLRSQERWPSTAVILITPPPIYEPARIR

SEQ ID NO: 14853 - protein, 120 aa, Zea mays
  VARIANT 112: note = Ancestral polymorphism is N, Derived polymorphism is I
  VARIANT 111: note = Ancestral polymorphism is W, Derived polymorphism is S
  VARIANT 105: note = Ancestral polymorphism is D, Derived polymorphism is Y
  VARIANT 78: note = Ancestral polymorphism is A, Derived polymorphism is V
  VARIANT 49: note = Ancestral polymorphism is D, Derived polymorphism is N
  VARIANT 47: note = Ancestral polymorphism is Q, Derived polymorphism is K
MEGESDTPASMEEKSSRSALAASVDRIIVAETMAKNGRLLLKCPVVQSDVQAMKEKKESKGMPLRFILGKSKMILGFAEGFPTMLKGEIAMFLVGRQYVLSGSPDGTAMAWNVDSGKGEE

SEQ ID NO: 14854 - protein, 502 aa, Zea mays
  VARIANT 27..502: note = Derived polymorphism lacks residues 27 to 502
MKTTVLTSGVTRVNKLDNGFTGTLLAYRTTLVMELSIPCDNSDKSQKDTMSSAASNPSAQPAVDKQPLKRNSDDIGWEYGTIVNPNDWNVIKCKLCPMVVKAGIYRLKLHIAGRKGQVRACPNATQEDRDKCSKALDDSRKAKIARLTEKQEVIDAVADEMDVNDDTGLDDIGSSQPRTMGHMDKFTMSLDSNSLGSTQKNLHQQKISEHVMKERLHILKRYVARWMYVQGIPFNAINCDEFDQVLEAAGRFGPDIKPSMPWVYGEILKAKEEIRVVVGNLDKTGTGLYKNLMEVVEGKMKKRLDCPIHMAAYCLNPYYSYNSPSIFDNEDVVDGFYAAIETFYHGCERNWSCFEGIHTKKRNRLTCDRVDKLVYVRFNHIHAKRRIRAQKNKKADPLVATDATFAQGWMVDGAEKDEEGSDVEPVTGLTWKLIAETCGAEEVTKLRRSARLTVEREVEDTPLSETESEEEAPQEEDVDFESDQDDVITAGYELDAEEDNDG

SEQ ID NO: 14855 - protein, 352 aa, Zea mays
  VARIANT 278..352: note = Derived polymorphism lacks residues 278 to 352
MSTSPAAADVSPLPPTAAADEAARATETVVVDERVASHVDPFLVEALDNPRHRLMVLRMELDIQNFMQNPQLQEFEFQNFPTSYLRCAAHRVAQHYGLETIVADSLVEGSVSRIVARKTAESRYPAIFLSEVPSNQARNDHETAEKLKFVIYQRPKAFQNGSADSRNKSGVPKTVDERIEEYNKARARIFNGSISADSDAASIMGTLSTGKDEPVNVDPSVDETKVSTMNSRSRVAVFKDTEKDRSDPDYDRNYKRYVRSSVPGFNLSPGVFNFVVPQFMQYDIGYVQSPGMSTNQHTMYFGQPDLTIGSSGAAVYRHWPTPTMMYPHCYDNVSPMMSQFVLAGSSVPVFQP

SEQ ID NO: 14856 - protein, 312 aa, Zea mays
  VARIANT 198: note = Ancestral polymorphism is G, Derived polymorphism is C
  VARIANT 186: note = Ancestral polymorphism is L, Derived polymorphism is H
  VARIANT 155..312: note = Derived polymorphism lacks residues 155 to 312
  VARIANT 151: note = Ancestral polymorphism is L, Derived polymorphism is H
  VARIANT 108..312: note = Derived polymorphism lacks residues 108 to 312
  VARIANT 102: note = Ancestral polymorphism is T, Derived polymorphism is M
  VARIANT 101: note = Ancestral polymorphism is W, Derived polymorphism is C
  VARIANT 29..312: note = Derived polymorphism lacks residues 29 to 312
  VARIANT 9..312: note = Derived polymorphism lacks residues 9 to 312
MREEEEASWFARGEEQQLLRPDELMPLTQTLITPHLAVAFDITTHGAGGTGAAGGAGAGPGAGGPDINGGGASSAAGSSGGGGGGGGDEPARTLKRPRLVWTPQLHKRFVDAVAHLGIKNAVPKTIMQLMSVDGLTRENVASHLQKYRLYLKRMQGLGGGGGGGGGGGAGGSHSSGSGTDAATEHLFATGPVPFLPPGHRAPAAADSYPPFSPMGGAHHHQHHQIGHFHHPATRPLAHYGGAAVGGFDHGFLSRVGPPAGPPGMHHRMVGGGAGMGMMAPASFADEMDLGSRGGGGSGSRRELTLFPTSGDH

SEQ ID NO: 14857 - protein, 267 aa, Zea mays
  VARIANT 229: note = Ancestral polymorphism is G, Derived polymorphism is A
  VARIANT 123: note = Ancestral polymorphism is A, Derived polymorphism is T
  VARIANT 102: note = Ancestral polymorphism is D, Derived polymorphism is H
  VARIANT 54: note = Ancestral polymorphism is E, Derived polymorphism is D
  VARIANT 33: note = Ancestral polymorphism is A, Derived polymorphism is G
MEKTSENAIPPAASPLMLFGSWASSYTHRVQLALRLKGLEYDYVEEDLGNKSDELLRHNPVHKKVPVLVHGGRALPESVIILQYLDDAWPETRPLLPADAFDRALARFWCHFADDKLGPAVGAVFASTGEGQEAAVRQVHENLALIESELRDGAFRGRRFFGGDEVGLLDVVLGCGSYWLAVFEEVTGVRLVDADAFPRFHAWLRDFEALDEVRETIPAVDRLLEYARGLRHMLLGLAGAGAGAGADAPSTDAPAAPPASADIAVDI

SEQ ID NO: 14858 - protein, 424 aa, Zea mays
  VARIANT 349..424: note = Derived polymorphism lacks residues 349 to 424
  VARIANT 327: note = Ancestral polymorphism is P, Derived polymorphism is R
  VARIANT 257: note = Ancestral polymorphism is G, Derived polymorphism is W
  VARIANT 137: note = Ancestral polymorphism is W, Derived polymorphism is R
  VARIANT 136: note = Ancestral polymorphism is I, Derived polymorphism is T
  VARIANT 126: note = Ancestral polymorphism is G, Derived polymorphism is A
  VARIANT 117: note = Ancestral polymorphism is R, Derived polymorphism is G
  VARIANT 111: note = Ancestral polymorphism is P, Derived polymorphism is R
  VARIANT 35: note = Ancestral polymorphism is L, Derived polymorphism is S
MDRGGSQKKRHKSVTNVDIISNLPDVIKDKILCCLPIKEAVRTCLLSRKWRYTWASMTELMFREDDFALGNGNEDGDSDRFVYFVITFLSLHDGPILKFEMNARRVHMFSPGGHIHRWMLMLSRNGIKEIQIKTRIWRNYKIPSSFFSCVELEYACLQGCIFQLPPLFAGFKRMRTLHFVEFCATENNIGELVASCPNLEELILSRLLSFADITIHSTKLKVLRVDGMFKHLNLVTPHVSSAVINLQVNTGYVKRAGSNFNLSQFIGSLLDIENISLLGHAFECAAHGIVPGKLPRSLNRLTEITLELDLGNLKEANAAHCLFQIAPNLRRMELQLMHRGYSAPTSSFWDSVDRQDCLFKNLYTVVMNNFTGSCAESGFLKLLLDDAPVLRSARIEDNNKLDKESLKRLLKMRRASKDAEIILL

SEQ ID NO: 14859 - protein, 278 aa, Zea mays
  VARIANT 124: note = Ancestral polymorphism is S, Derived polymorphism is F
  VARIANT 115: note = Ancestral polymorphism is P, Derived polymorphism is L
MADPSASSVPPVVTMGSVVTVASPPTGGGSTVSAGITGGGKGGPCAGCKYLRRKCQPDCIFAPYFPPDNLDKFAYVHRVFGTSNVIKILNNLQPYQRQYAVNSLVYEAEMRIRDPIYGCVGVVSMLQHRLIRLKKALESASLELSNYQAAEAAAASVAVGPHGVAAAGMADFVGNAVPNCTQNIINAGYSTMASITGAGPFMQQDNFASVQMLAMSFEGENGAAARVGMNGGGGYGFAYSPAMGVGHGVVSGHVQQQQINGGQFLKNSTTGGDYRPTM

SEQ ID NO: 14860 - protein, 488 aa, Zea mays
  VARIANT 16..488: note = Derived polymorphism lacks residues 16 to 488
MAEADETAALQYTPTWIVAAVCSIIVLISLAAERGLHHLGKTLKKNHQRPLYEALLKVKEELMLLGFISLLLTVLQGTIQRTCIPPSWTDYMLPCQRPGHDEAPAAAASMAARFVAADILGGISWARVLSEGEGAAAQAGLCEKEGKVPLLSLEALHQLHIFIFVLAVSHVFFCASTMLPGCAKIRKWKKWEEEIQKIAAENGPKKVLPMHQVSFIRERYKGIGTDSKTLCWLHSFRKQFYGSVAKSDYAAMRLGFIMTHCRGNLKFDFHRYMVRVLESDFKKIVGTSWHLWIFVVIFLLLNVNASTVSHSFFTCLHAYFWIAFLPLVLLLAVGTKLEHVIAQLAYDVAEKQTAIEGDLVVTPSDQHFWFGRPRIILHLIHFILFQNAFELAFFFWILMTYGLESCFMDHIGFLVPRLVLGVVIQLLCSYSTLPLYAIVTQMGSYYKKEIFNEHVQQGVLGWAQKAKKRSGVKEVSSPSEPMHGEDAA

SEQ ID NO: 14861 - protein, 508 aa, Zea mays
  VARIANT 427..508: note = Derived polymorphism lacks residues 427 to 508
  VARIANT 322..508: note = Derived polymorphism lacks residues 322 to 508
  VARIANT 303..508: note = Derived polymorphism lacks residues 303 to 508
  VARIANT 97: note = Ancestral polymorphism is Y, Derived polymorphism is C
  VARIANT 60..508: note = Derived polymorphism lacks residues 60 to 508
  VARIANT 44: note = Ancestral polymorphism is V, Derived polymorphism is A
MDEEYDVIVLGTGLKECILSGLLSVDGLKVAACSLQNGGDDRKVRVSISGFPKPPCLLASASRRRMDCGCYWRCCGRGSKGLDNHRTFLKVVVFEVYINDYYGGDSTSLNLNQLWKRFRGEDKPPAHLGASRDYNVDMVPKFMMANGTLVRTLIHTDVTKYLSFKAVDGSYVFSKGKIYKVPATDMEALKSPLMGLFEKRRARNFFIYVQDYNEADPRTHQGLDLTRVTTRELIAKYGLSDDTVDFVGHALALHRDDRYLDEPALDTVKRMKLYADSLARFQGGSPYIYPLYGLGELPQGFARLSAVYGGTYMLNKPDCKVEFDMEGKVCGVTSEGETAKCKKVVCDPSYLQNKVRKIGRVVRAIAIMSHPIPNTNESHSVQIILPQKQLGRRSDMYVFCCSYTHNVAPRGKFIAFVSAEAETDNPQSELKPGIDLLGSVDEIFYDIYDRYEPVNEPSLDNCFVSTSYDATTHFETTVTDVLNMYTMITGKTVDLSVDLSAASAAEEY

SEQ ID NO: 14862 - protein, 186 aa, Zea mays
  VARIANT 8: note = Ancestral polymorphism is S, Derived polymorphism is I
MSRAATNSGAERRCRYRGVRRRAWGKWVSEIRVPGTRERLWLGSYAAPEAAAVAHDAAACLLRGCAGRRLNFPGRAACYYACGGQQPLSPRSVQRVASDAGMAADAQIVDARAALASPPPVVQPAALAGIIGGAAREGGGGVRGPACAPAPPSNGAGSSSTYWSTPSSEPPLVYGDISVDDIEILI

SEQ ID NO: 14863 - protein, 112 aa, Zea mays
  VARIANT 86: note = Ancestral polymorphism is G, Derived polymorphism is R
  VARIANT 98..112: note = Derived polymorphism lacks residues 98 to 112
MASFSEAPPGNPKAGEKIFKTKCAQCHTVDKGAGHKQGPNLNGLFGRQSGTTAGYSYSAGNKNKAVVWEEDTLYEYLLNPKKYIPGTKMVFPGLKKPQERADLIAYLKEATA

SEQ ID NO: 14864 - protein, 339 aa, Zea mays
  VARIANT 65..339: note = Derived polymorphism lacks residues 65 to 339
MSSGGGGRVPAAAAAQSQELQLPPGFRFHPTDEELVVHYLCRRCAGLPISVPIIAEVDLYKHDPWQLPRMALYGEKEWYFFSPRDRKYPNGSRPNRAAGAGYWKATGADKPVGTPKPVAIKKALVFYAGKAPKGDKTNWIMHEYRLADVDRTARKKNNSLRLDDWVLCRIYNKKGALEKPTGAGGRAEASSQGALGSMSMGSPPEQKPSVLPSATATATAAAGTGYAPLPFSELAAYYEVRPSDSMPRAHGADSSCSGHALAATSSCGGGGGERPEVQSQPKIAEWERTFAAGAGPGINPAGSMLGLGGHQLGSAAVGVGLPAGDPLLQDILTYWGKPY

SEQ ID NO: 14865 - protein, 361 aa, Zea mays
  VARIANT 281..361: note = Derived polymorphism lacks residues 281 to 361
MGGAQLVGRWVESYTGMSPDNIKGLLLALSCSLFIGASFIVKKKGLKKAGASGVRAGVGGYSYLLEPLWWAGMVTMIVGEIANFAAYAFAPAILVTPLGALSIIISAVLAHIMLREKLHIFGILGCILCVVGSTTIVLHAPPERQIESVAEVWDLATEPAFLFYAAVVFAAAFVLICHFVPQYGQTHIMVYIGICSLVGSLSVMSVKALGIALKVTFSGMNQLVYSQTWVFSFVVILCIVTQMNYLNKALDTFNTAVVSPIYYTMFTSLTILASVIMFKDWDRQNPTQIVTEMCGFVTILSGTFLLHKTKDMVDGLPPNLPIRLPKHADEDGYADDIIPLRSAADGIPLRSPRATDSFRSS

SEQ ID NO: 14866 - protein, 368 aa, Zea mays
  VARIANT 38: note = Ancestral polymorphism is S, Derived polymorphism is T
  VARIANT 97: note = Ancestral polymorphism is S, Derived polymorphism is C
  VARIANT 106: note = Ancestral polymorphism is Q, Derived polymorphism is R
MVSGRPHGELDSWFKSLMVTSSSERGQAGSGGPAPTLTGWKDLPMELLVRIISTVGDDRMVIVASGVCTGWRDALGWGVTNLSLTWCKLSMNNLMISLAHKFTKLQVLTLRQNKPQLEDSAVEAVANYCHDLRELDLSRSFRLSDRSLYALAHGCPRLTRLNISGCSSFSDTALIYLTCRCKNLKCLNLCGCVKAVTDRALQAIAQNCGQLQSLNLGWCDDVTDKGVTSLASGCPDLRAVDLCGCVLITDESVVALANGCPHLRSLGLYFCQNITDRAMYSLANSRVKSKRGRWDAVKDGLANLNISQCTALTPPAVQAVCDSFPALHTCPERHSLIISGCLSLTSVHCACALHPHRAGRALMANHAY

SEQ ID NO: 14867 - protein, 561 aa, Zea mays
  VARIANT 295: note = Ancestral polymorphism is G, Derived polymorphism is V
  VARIANT 327: note = Ancestral polymorphism is R, Derived polymorphism is C
MSFVRQADPSASCAETTYIHKFVPPGSVFPAQRFVSGTDLLHHGPQPYNAEGYKQSGFNGTAPHAFQSFYNTDSYAESHFNEAPYSPAIFDISQQNSQSLSDNQASDLVEFDEDEMRVKLQELEHALLDDGDEIFFDLSGSINDEWNDNIKTNNEWVNTMKNIVSPDSPKEASPESSICCLDNNVGEARNPKQLLFDCAEAISENSIDEAQSIIAELRQKVAIQGDPSQRLAAYLVEGLAATLQSSGKGIYRALRCKEAPTLYQLSAMQILFEICPCFRLGFMAANYAILEACKGEDVVHIIDFDINQGSQYITLIQFLKNNSNKPRLLRITGVDDPESVHRAVGGLNVVGQRLEKLAEDCEVRFEFRAVAANIEDLTAGMLGRRPGEALIVNFAFLLHHLPDESVSIMNQRDRLLRMVKGLRPKLVTLVEQDANTNTTPFPSRFREVYDYYSALFDSLDATLPRESPDRMNVERQCLAREIVNILACEGPDRVERYEVAGKWRARMAMAGFVPSPFNSGAVDGIRSLLKSYCDKYRFEKVQDGLHFGWGDKTLVFSSAWQ

SEQ ID NO: 14868 - protein, 250 aa, Zea mays
  VARIANT 5: note = Ancestral polymorphism is V, Derived polymorphism is G
MEDVVKFVFGVSGNVIALFLFLSPVPTFWRIIRRKSTEDFSGVPYSMTLLNCLLSAWYGLPFVSPNNMLVSTINGAGAAIEAVYVVIFLAFASSQRTRLRMLGLASAVSAAFAAVALASMLALHGQGRKLMCGLAATVCSICMYASPLSIMRLVVKTKSVEYMPFLLSLAVFLCGTSWFVYGLLGRDPFVAIPNGCGSFLGAVQLVLYAIYRDSNSGGKQQAGDDVEMASDAKSSKKVADDVGGKEDRLV

SEQ ID NO: 14869 - protein, 452 aa, Zea mays
  VARIANT 59: note = Ancestral polymorphism is S, Derived polymorphism is G
  VARIANT 11: note = Ancestral polymorphism is R, Derived polymorphism is C
MAQTSLPPGFRFHPTDVEIVSYYLKRKIMGKKLIVDAISEVDLYKFPPWDLPEKSSLRSKDLEWFFFCPRDKKYPNGSRTNRATPNGYWKTSGKDRIIMLNSRTVGMKKTLIFHEGKPPKGDRTDWVMYEYKMEDEYLVSTGFSKDTYVLCKIFKKSGLGPRIGEQYGAPFDEAEWDNAEAETSIFPLMTSSEVVNPTEGPHTQPVAPAGALQEPLHNSSATCVVEGSPFDHATANTCAEGVTFGYTVASSAIEDMPAQLSGDGVVSMNNISSEVNDMYSPHDCDEFLLEEMSRFLNDSPMRNTPYGECSGLPPMSEAEAHAFEVNSFDLYKELSGLVELGGMDNNFNTSNVETTDYLVLPPDRELSTDGYMELNDLLASDSSFPIPSEFPAQDNQSMQYPLAEYNVHYDVATLSGPLEPTMPSIFDDFPPNNGPHVTDEEDDYLDPTIPFP

SEQ ID NO: 14870 - protein, 402 aa, Zea mays
  VARIANT 150..402: note = Derived polymorphism lacks residues 150 to 402
MVSPGSNRGGLSRVSTRGGVAGPGSPRASPAATAFAALRRRWRWAPPGSSTLERAARAFLLASAALVLSCALYLYVLRYVGRGGRAFAAAGFVGDAVLGLGGEPCDVFDGAWVPDDTGLRPLYNSSGCPFAERGFDCLANGRNDTGYLKWRWKPRRCGVPRFAARTALERLRGKRVVFVGDSMSRSQWESFICMLMAGVDDPRTVFEVNGNEITKTIRHLAVRFASHGLTVEFFRSVFLVQEHPAPRHAPKRVKSTLRLDRMDNFSRKWVNSDVLIFNTGHWWTPTKLFDTGCYFQAGRSLKLGTSIDAGFRMALETWASWVQKRVDLNRTHVFFRTYEPSHWGLAKHGGLNFLAAQSTRTYCIVIFDITRYTRELTYVRDKAAAAARWFTGLLHSFLLFDF

SEQ ID NO: 14871 - protein, 240 aa, Zea mays
  VARIANT 15: note = Ancestral polymorphism is P, Derived polymorphism is L
  VARIANT 38: note = Ancestral polymorphism is T, Derived polymorphism is M
MPLGDGAEAADFVLPNELLAALPRDPYEQLDLARRITTLVVSGQVSGLEQEAGRMRAEAAGKDRENAELRERVVLLDTALQETNARLRSPMLTMPDLLQAMETFTQEHVIGIPLTSNHGTKNFRNYKRKLSFGAKVLQAGGIDKVFREYFAVEKDEKLRKAFQCYLSTTAGPIAGMLFISTKKIAFHSDRPLSFTSPKGGSTRVPYKVLIPTERMKSASVRILYFLSVSFFVGTELCCRY

SEQ ID NO: 14872 - protein, 15 aa, Zea mays
  VARIANT 3..15: note = Derived polymorphism lacks residues 3 to 15
MNWKYAGEVYENVLA

SEQ ID NO: 14873 - protein, 87 aa, Zea mays
  VARIANT 4: note = Ancestral polymorphism is P, Derived polymorphism is S
  VARIANT 22: note = Ancestral polymorphism is L, Derived polymorphism is Q
  VARIANT 64: note = Ancestral polymorphism is E, Derived polymorphism is A
MPPPLQPPLLLRLHLLFRSETQIPLLRRRPSCDAPHCRTRRYISVRASAAQLAAADVSTAQQLELGLEAAAVGFVTGKRKATEVAQA

SEQ ID NO: 14874 - protein, 400 aa, Zea mays
  VARIANT 1: note = Ancestral polymorphism is M, Derived polymorphism is I
MRSAAPSGRPCQGELAGGAYVHNSSSLHMTASFFSLLDSFHFCPLGYKDFPDLGNTTSSLLSTCCHVVLELWYNWSWVKATWSLEVIFPDGIFPADGKSEIEGKNKYFELFQFNKPHAAPPAASTSIHGCPRARLPLSLRDARWIGEIAHKSHPWQLSSPKSAANRICQRGLAPPCRRSPTSVADFVMPFFLFIVGVALALAYKRVPDKLDASRKALLRALTLFCLGLGLVLQGGFFHGVRSLSFGVDLREIRLMGVLQRIAIAYLLTALCEIWIRGDEDVDYGYDLLKRYCYQLAQVVGWPPVQNYRKNTLVASSSRRKAPAEDAASTAQTMYVKVSMDDAPYLKMVDIKMYSSYEDLSMALEKMFSCFITDLFLTLGGNKKEQRDSDGWVGEARAASP

SEQ ID NO: 14875 - protein, 183 aa, Zea mays
  VARIANT 20: note = Ancestral polymorphism is E, Derived polymorphism is V
MARNPGCTVFIGNLDDKVPERVLYEILIQVGRVVDLHIPRDKETSRPKGYAFAEYETEEIAQYAVKLFSGLVRLHNKTLRFAISGQDKPSLNGNIPVTPRLNSVPQPKPHQPMRSSDTPLPQHAAVNGRNAGYGIPPNHSYDTHTQGEENSGHFGIQVNVELCVKSHNSPFDQHCRVGYRIED

SEQ ID NO: 14876 - protein, 163 aa, Zea mays
  VARIANT 33: note = Ancestral polymorphism is N, Derived polymorphism is S
  VARIANT 49: note = Ancestral polymorphism is G, Derived polymorphism is R
  VARIANT 63: note = Ancestral polymorphism is T, Derived polymorphism is N
MDAHAMDCTIVGAAAPLAPTGAAARPATPLPANLSSPSAATAGGLVPSGLGLPGYPASLDALTGLLSLTHFPRKPPPGFSTTRPLVVDATWTSVVPQSYRTVGASTAWLDSVHNSIFLLFRNDSVAIVYQIGDSLILRRRSCDSNSSDSFDRRRRGGEARSPP

SEQ ID NO: 14877 - protein, 229 aa, Zea mays
  VARIANT 162..229: note = Derived polymorphism lacks residues 162 to 229
  VARIANT 160..229: note = Derived polymorphism lacks residues 160 to 229
  VARIANT 147: note = Ancestral polymorphism is L, Derived polymorphism is P
  VARIANT 137: note = Ancestral polymorphism is A, Derived polymorphism is S
  VARIANT 130: note = Ancestral polymorphism is S, Derived polymorphism is F
  VARIANT 124: note = Ancestral polymorphism is A, Derived polymorphism is T
  VARIANT 85: note = Ancestral polymorphism is A, Derived polymorphism is G
  VARIANT 61: note = Ancestral polymorphism is G, Derived polymorphism is E
  VARIANT 60: note = Ancestral polymorphism is G, Derived polymorphism is D
  VARIANT 59: note = Ancestral polymorphism is G, Derived polymorphism is D
  VARIANT 55: note = Ancestral polymorphism is H, Derived polymorphism is R
  VARIANT 54: note = Ancestral polymorphism is G, Derived polymorphism is R
  VARIANT 47: note = Ancestral polymorphism is R, Derived polymorphism is Q
  VARIANT 44: note = Ancestral polymorphism is R, Derived polymorphism is S
  VARIANT 39: note = Ancestral polymorphism is G, Derived polymorphism is D
MGSSGGSSEHFLRQLSSSDGGSAPHHLLQREWECGGVTGSGSRRGSRKKTRARGHRRRGGGFCRAEEAAPGRKRVMVVVDQSSGAKHAMLWALTHVANKGDFLTLLHVLPPESGHSSRGAAEDASALANSLGALCKACKPEVEVEALVIQGPKLPTILSQVKKLEASVLVLSQRSPSPFCCFPRSSSEELVEECIDRAECLTLAVRRQSKGVGGYLVSTRWQKNFWLLA

SEQ ID NO: 14878 - protein, 139 aa, Zea mays
  VARIANT 83: note = Ancestral polymorphism is D, Derived polymorphism is Y
  VARIANT 78: note = Ancestral polymorphism is A, Derived polymorphism is V
  VARIANT 77: note = Ancestral polymorphism is G, Derived polymorphism is D
  VARIANT 73: note = Ancestral polymorphism is S, Derived polymorphism is L
  VARIANT 68: note = Ancestral polymorphism is L, Derived polymorphism is V
  VARIANT 67: note = Ancestral polymorphism is A, Derived polymorphism is T
  VARIANT 56: note = Ancestral polymorphism is A, Derived polymorphism is V
  VARIANT 50: note = Ancestral polymorphism is R, Derived polymorphism is H
  VARIANT 47: note = Ancestral polymorphism is G, Derived polymorphism is S
  VARIANT 41: note = Ancestral polymorphism is A, Derived polymorphism is V
  VARIANT 37: note = Ancestral polymorphism is A, Derived polymorphism is T
  VARIANT 36: note = Ancestral polymorphism is E, Derived polymorphism is D
  VARIANT 30: note = Ancestral polymorphism is R, Derived polymorphism is W
  VARIANT 20: note = Ancestral polymorphism is Q, Derived polymorphism is R
  VARIANT 19: note = Ancestral polymorphism is P, Derived polymorphism is L
  VARIANT 15: note = Ancestral polymorphism is A, Derived polymorphism is P
  VARIANT 12: note = Ancestral polymorphism is P, Derived polymorphism is S
  VARIANT 6: note = Ancestral polymorphism is A, Derived polymorphism is E
MASMTAATDVKPASAASGPQLKLLVDRRSRRVLYAEARKDAVHFLIGLLRVPPGLAARALAKRGEPALGSLGSLYAGALALDDAFFVSSSPNRDALLSPSTLPSAALPLLLGEGAVPPAPPPPQRFFRCNAYAPSPCTG

SEQ ID NO: 14879 - protein, 546 aa, Zea mays
  VARIANT 200..546: note = Derived polymorphism lacks residues 200 to 546
  VARIANT 378: note = Ancestral polymorphism is R, Derived polymorphism is C
MLRYSRRFLTRTPRRRQPKTAGKTEPSPTAAPTYTRDVVRRATAILRDQPWSAARPLLLSLPGLAWDSHTVARVLKTHPPLQKAFLFFRLATTASRTFRHDRFTYTSMIHLLGEAGRVPAMLRLLAEMLRAGIAPDAATFTTVMHWLARAGDVDGAMRVWAEMKARSRPTVVSYTACIKILFDARKAEEARGVLREMVAEGLRPTCKTYTVLIEHLADTGKFEATLEIMDKMKEACVQPDKALCNILVQKCSRAGETSVLTCILQYMKEHFIVLRRPIFLEALQALKASGDSDELLREVNPHLSYEGIENDPILSDQGYLTDRSIILYLMSANKWSAIEQMVNQMAPKNVKMETHILSDVIEASCADRKPSCGLAVMRYGLGVGCELGRSAYCSLLGQYIRTDSFDLVLEIVEELIKSGCNLGTYVSSVLILRLGYAGQSACAAHIFGLLTADKNVVSYTALINAYFQAGKVDGALDLFTQMRTNRISACLGTYEVLIHGLEKAGLKQESDYYRRERMNMQWHLQYHGPQSPEDTLCNHLFCGIHG

SEQ ID NO: 14880 - protein, 1045 aa, Zea mays
  VARIANT 481..1045: note = Derived polymorphism lacks residues 481 to 1045
MTASPSPLSSGVYWAGSETAVPLALLDRGGKKNKREAGRSSRGEDRRMQQQMAATVEEQMMVKAIREESSWEVLPKRIQAALVSKEEWHRRVVNYCIRKRLPWSSCFARKVCKEGDYYEDLMRYLRKNLALYPYHLADFICRVMRISPFRYYCDVLFEAMKNEQPYDSIPNFSAADALRITGVGRNEFIDIMNKCRSKKIMWKLNKSIAKELLPAEPADLAIEPWWGVRFVNFTLEEFKKLSEDETSAIDKICKEEVNSYVLFDPEVVRGLYRRGMVYFDVPVYPDDRFRVSRLEGFVSNKDQSYEDPIEELLYAVFVVSSENATVAELATTLQVDLYQLQAAASFACRLGWAVKLLDTDSVLRDSSTPALSNNILSDEVESSRTSVASEKSGHELLSSDSDGHKNSGMAYVGFIVDANVTSYLMMGSLSPGLKSHAVTLYEAGKLGDSCIADLCNDLASLEGKRFEGVLQEFANHAFSLRSFLECLLSGGTSTETADLTTSEANNQESSVQDGLDTTCAKENKGNDGVDNAAENSTQISESSDGGQLSLQDNKMGDSDAADANRSSASSTIVSEGKESILKHDCDSVQAPKLGASAANGPSSKSKRSYRVNILRCESLASLAPSTLERLLARDYDIVVSMIPLPSSSVLPCPSGLVHFGPPSYSSMTPWMKLALYTSGTCGPVSAVFMKGQRLRLLPEPLASCEKALIWSWDQSVVGGLGGKFEGNLVKGSLLLHYLNSMTKHSAVVVQPLSEHDLDETGSIVTIDVPLPLKNADGSIPSTVVGTDLPEDQVSSLILLLEDLSNRVELSTVGYLRLLRLHRANESSEHGSFEWVPLTIEFGIPLFSPQLCERICERVVESQMLQKDDIAEHYETMQNVRRRLRELCTEYQATGPTARLFNQRGGSKNNSPRKLVQIVSGRWSPFHDPSTPTHSSSPPAEHERAKPARRQRCFTEVLSFDGRILRSYALTPVYEAATRSVSEEQPTTPAAKPDHEDANTKDVALPGVNLIFDGTELHPFDIVACLQARQPLSLIAEASATSLAMK

SEQ ID NO: 14881 - protein, 620 aa, Zea mays
  VARIANT 370..620: note = Derived polymorphism lacks residues 370 to 620
MADETKQEAAAPAAEVVVTEEEKKAEETAPVAEEKAVEAAVEKAAEAEAGAEEKAAEADSEEEKKAEEAEEAAAGDEAAVIDGTGSFKEESNLVSELPDPERTALAQLKELVATALANGEFNLPPPPAKEEAKKEEPAKEEAPADKEDEPKAEEAAAQEPVKEEAKPEEPKTEAPAEAAPEEVKDETPVPEETKTEAPAPEEPKAEEPAKEELKAEAATEAVAEETKPAEPVPEEEEKTVVVAEEEATKTVEAIEETVAVAVAAAASEEPEAGEPKEELIWGVPLAGDDERTDTVLLKFLRAREFKVKEAMAMLKSAVLWRKRFGIDELLLDADLGLRELEGVVFYRGADREGHPVCYNVYGEFQDKELYERAFGDEEKRERFLKWRIQLLERGIREQLDFSPSGICSMVQVTDLKNSPPMLGKHRAVTRQALALLQDNYPEFVAKKVFINVPWWYLAANKVMSPFLTQRTKSKIVFCSPGKSAETLFRYIAPEQVPVQFGGLYKEDDTEFSTSDAVTELTVKPSSKETVEIPATENSTVVWELRVLGWEVSYGAEFTPDAEGGYTVIVQKTRKVPAHEEPIMKGSFKATEPGKLVLGVNNPASRKKKLLCRFKVRSAAA

SEQ ID NO: 14882 - protein, 315 aa, Zea mays
  VARIANT 176..315: note = Derived polymorphism lacks residues 176 to 315
  VARIANT 118..315: note = Derived polymorphism lacks residues 118 to 315
  VARIANT 111: note = Ancestral polymorphism is D, Derived polymorphism is G
  VARIANT 104: note = Ancestral polymorphism is E, Derived polymorphism is D
  VARIANT 86: note = Ancestral polymorphism is C, Derived polymorphism is Y
  VARIANT 65: note = Ancestral polymorphism is I, Derived polymorphism is N
  VARIANT 58..315: note = Derived polymorphism lacks residues 58 to 315
  VARIANT 54: note = Ancestral polymorphism is G, Derived polymorphism is S
  VARIANT 49: note = Ancestral polymorphism is P, Derived polymorphism is S
  VARIANT 47: note = Ancestral polymorphism is G, Derived polymorphism is S
  VARIANT 45: note = Ancestral polymorphism is Y, Derived polymorphism is C
  VARIANT 44: note = Ancestral polymorphism is I, Derived polymorphism is S
  VARIANT 42: note = Ancestral polymorphism is S, Derived polymorphism is F
  VARIANT 40: note = Ancestral polymorphism is K, Derived polymorphism is T
  VARIANT 28: note = Ancestral polymorphism is S, Derived polymorphism is L
  VARIANT 26: note = Ancestral polymorphism is C, Derived polymorphism is Y
  VARIANT 10: note = Ancestral polymorphism is F, Derived polymorphism is L
MPLNIDIDLFKLDIDELIADYSKENCTSLFEFKRVWMGKKFSYIYEGRPKTNSGLFMQSLFLHCIGYLTSQSSLHQRLAGLYCLYCLYECQPYKPQFKIYLSLEECRQLKDIVVMAKQNGLQLVPALVKRMLDKDMFLFGYMNLIDDNGDKQVEELTALQNKRVKFACDKLFANTQAERYLHMDLGAEFELDSIKKLSKEYAEAKELALAEASQTVEVDDAKHLLQSERLLGDKIDEVVKEWDVQKEGFYERTGLSSSPGDQLMAIDNDESGAQCHEDGSRGDQLMAVDNDESGVQDHEDLDDDDGFAELELLLE

SEQ ID NO: 14883 - protein, 522 aa, Zea mays
  VARIANT 324..522: note = Derived polymorphism lacks residues 324 to 522
MASVRPCVSVKPAVRPVRYRSTRAGPAGLGRLRVCSCSLALGGDGGCTRSSGRSVDVSGAGLGLLGGDGLRIHRRGGREVLAMCSASFDGVRPAAVASAVQPVPAFPERAKVVSLVAAIMLLCNADRVVMSVAVVPFAAQYGWSSSFVGIVQSSFLWGYVLSSMVGGALADKYGGKKVMAGAAALWSLATILTPWAASRSTIMLLAVRALFGLAEGVAFPTMSTFLPKWFPTHERATAVAISMGGFHLGNVISFLATPIIMSHIGLSGTFAFFASLGYLWLSVWMMNVESDPIDSHTISKSELQLILDGRIGSKVQGSKFPSLRELFSKTQFLAVTLANVVNNWGYFVLLSWMPVYFNTVYNINLKQAAWFSAIPWAVMAMSGYVAGASADFLIKSGFSIGLVRKIMQSIGFMGPCVSLLCLRFAQTPSVAAVLMTIALSLCSFSQAGYMCNIQDIAPKYAGSLHGLTNGIGTVAAIVSTIGIGYFVQWLGSFQAFLTLTAALYFSATIFYNVYATGDLIFD

SEQ ID NO: 14884 - protein, 660 aa, Zea mays
  VARIANT 304..660: note = Derived polymorphism lacks residues 304 to 660
  VARIANT 266..660: note = Derived polymorphism lacks residues 266 to 660
  VARIANT 231..660: note = Derived polymorphism lacks residues 231 to 660
  VARIANT 174..660: note = Derived polymorphism lacks residues 174 to 660
MTLQMEPPVPPPRRSVSTTCDLHPGETFTGFCAACLRERLAGLESTGGSAAAAAPGRRSTSAIRSLFTRPFAAAAGGAPSGSGAAALPDLRRCKSFSCGRGGDALAAAGEPQRRSCDVRGRSTLWALFHQDDRQRVRDGTAFGAFPASSSAAAAALAAEVLPPPQPPPPACVPEMFSEEEIAVAEDSDEIVAVMEPVSVVGTSGEMETEVSAARDVRAMKDHIDLEASQSQQPRKLPPKDLKEMAGSFWLAASMFSKKWQKWRGKQKLKKQEAAGSKAAAAAMPPPEKPSKPSFLRRSRFRRGEAGSEFAGGRRSCDTDPRFSLDAGRMSVGDMGFSWDEPRASWDGYLFGAGTGIGLGRAPPLSRLPPILSAMEDSPAGILERSDGQIPVEDDSQPEPDHDANVPGGSAQTRDYYMDTSSRRRRSLDRSSSVRRSFEVTDPKPVPVPVPVPVPVTAPAAIVNGKESPAMGSSEFYHFHHAEDLFDHRFSTNSLVEDFSASLDAAFHGPAKKPPRWRKAWSLWGLIHRRAAGRRDGASDAADRAFSEPWPDLRVRGYNGRMQRCNSNASARSSFSSNSGGLGSSRRSYLDAHGKRRREECAALERNRSARHSPGNADNGLLRFYLTPIRSASGRRTGVLPVKGGRQLRSQSFARTMLGLY

SEQ ID NO: 14885 - protein, 599 aa, Zea mays
  VARIANT 148: note = Ancestral polymorphism is M, Derived polymorphism is K
  VARIANT 74: note = Ancestral polymorphism is P, Derived polymorphism is L
  VARIANT 66: note = Ancestral polymorphism is V, Derived polymorphism is A
  VARIANT 64: note = Ancestral polymorphism is V, Derived polymorphism is M
  VARIANT 60: note = Ancestral polymorphism is S, Derived polymorphism is L
  VARIANT 58: note = Ancestral polymorphism is A, Derived polymorphism is T
  VARIANT 52: note = Ancestral polymorphism is R, Derived polymorphism is W
  VARIANT 51: note = Ancestral polymorphism is R, Derived polymorphism is H
  VARIANT 40: note = Ancestral polymorphism is P, Derived polymorphism is Q
  VARIANT 26: note = Ancestral polymorphism is P, Derived polymorphism is S
MGGEAPEPRRLTRALSIGGGGGGWVPDEMLQLVLGFVEDPRDREALSLVCRRWHRIDALSRKHVTVPFCYAVSPARLLARFPRLESLAVKGKPRAAMYGLIPDDWGAYARPWVTELAAPFECLKALHLRRMVVTDDDLAELIRARGHMLQELKLDKCTGFSTDGLRLVARSCSSLRTLFLEECQINDKGSEWIRDLAVNCPVLATLNFHMTELEVMPVDLELLAKSCKSLISLKIGDCDLSDLIGFFQSATSLEEFAGGTFNGQGELTKYGDVKFPSRICSLGLTFMGANEMPIIFPFSAILKKLDLQYTFLTTEDHCQLIAKCPNLLVLAVRNVIGDRGLGVVADTCKKLQRLRIERGDDEGGVQEEQGGVSQVGLTAIAVGCRELEYIAAYVSDITNGALESIGTFCKKLYDFRLVLLDREERITDLPLDNGVRALLRGCTMLRRFALYLRPGGLSDAGLGYIGQCSGNIQYMLLGNVGETDDGLISFALGCVNLRKLELRSCCFSERALALAILSMPSLRYVWVQGYKASQTGRDLMLMARPFWNIEFTPPSSQNAGRLIEDGEPCVDSHAQILAYGSLAGKRLDCPQSVVTLYPA

SEQ ID NO: 14886 - protein, 502 aa, Zea mays
  VARIANT 371: note = Ancestral polymorphism is V, Derived polymorphism is F
MGFQVAAVAPPPCARSSSALSSPSTSSRPLPAFLGGGGGCAGLARSRAPVNWGTGVMVRRPRPARTPARCALSASLDGMGGGDAEFMKRIEELAAAAGVQPAGPAGCGWPASVELSASNVGLPLSLRMLKRKKQQQQAQLHAVARPSRWDDGLLGSAGESVGRAFSSMVLIVRELQSFALQQMRDALLCDDLQGVLARVQGEMHDSFVWLFQHIFAGTPAFMVSLMLLLANFTVQSMGRSVAAAAATIPPTAPAVALVNAQRPEPSRPRFDAASVKTFSVDRMASVGGDIGGGGKTPPVAGATGDGRSDESLYRLSRVSPQQPSAPPVAEVAQDAADADEQAIWEMMLAEALKASPRTEELSDPDVLRSLVAPVEAELETEDHAEHTLTEQRYEQAVAAEPNNPLILANFAQFLYLVQNDHDRAEHYFERAVRAEPADSEALSRYATFLWKARNDLAGAEDTYQEAIAADPGNAHHAAAYAHFLWNTGACTGTGAEATRRDA

SEQ ID NO: 14887 - protein, 81 aa, Zea mays
  VARIANT 5..81: note = Derived polymorphism lacks residues 5 to 81
  VARIANT 48: note = Ancestral polymorphism is C, Derived polymorphism is S
  VARIANT 49: note = Ancestral polymorphism is R, Derived polymorphism is M
  VARIANT 69: note = Ancestral polymorphism is P, Derived polymorphism is T
MLRTRGHQRRRHQHRCRPRPGGPLPGGPGCSWLMAMRDLLAWSTDVQCRTYRRCAHGAAICAFMHGFYPLRGQEAYQGEKE

SEQ ID NO: 14888 - protein, 194 aa, Zea mays
  VARIANT 40: note = Ancestral polymorphism is G, Derived polymorphism is D
  VARIANT 45: note = Ancestral polymorphism is R, Derived polymorphism is C
  VARIANT 53: note = Ancestral polymorphism is G, Derived polymorphism is D
  VARIANT 73: note = Ancestral polymorphism is D, Derived polymorphism is H
  VARIANT 118..194: note = Derived polymorphism lacks residues 118 to 194
  VARIANT 151: note = Ancestral polymorphism is G, Derived polymorphism is E
MMFETCSCALQLWVGRHLIHHGKSDGGEVVVALFSVILSGLYLSRPEIPILSGFFLTVPTRKTVALVGEVLLHGENIKKLKVEWLRSQIGLIEEAAKTTHAHGFISSLEKGDETQVGRAGLTLTDEHKIKISIARVVLSNPSIILLDEVTGGLDFEAEKAVQEALDVLMLGRSTIIIARRLCLIKNADYIAVME

SEQ ID NO: 14889 - protein, 139 aa, Zea mays
  VARIANT 64..139: note = Derived polymorphism lacks residues 64 to 139
  VARIANT 38: note = Ancestral polymorphism is S, Derived polymorphism is L
MPAVRRLAGVPLRLSRAPRPHRGPSHVCGQRGLFRLRSPTIFVPACLWDLVERLFEVHRRAMDQSELNHNLVPLEVREEYELRRDLKVRAFRTYHAIPSQGYVIYSVKQKLKQEFIGLPGSEIKRLKLSGVEVCLAWWL

SEQ ID NO: 14890 - protein, 452 aa, Zea mays
  VARIANT 408: note = Ancestral polymorphism is V, Derived polymorphism is M
  VARIANT 411..452: note = Derived polymorphism lacks residues 411 to 452
MDAAIAGQQARRRIQPPEPLVMAGTPPTPAAFRCPISLEVMRSPVSLPTGATYDRASIQRWLDSGHRTCPATRLPLASTDLVPNLLLRRLIHLHAATLPPSPSPEEVLSQLAAADGEPAAAEKAVRSLAAKIAPEKGKRASVASAVSADLDSAVPALLSFAKGGAGADARVDAVRVLATVAPELVPYLTGDGTENRDRVSMAVEALAAVLSAEGIAEEAREGLVLALVAEDLGRVVTTLLGAGANGAAVLEAMLTSARVDADAKTAIADRPELFPDLVRILRDAASQAAIRCMVAAVQVRGRPARASMVRAGAVPALALAVAAAPTAAAESALRLLAEAARCGDGKAAIGADAAEVAAAVMGRMIRVGPAGREAAVVALWLCCCAGGGDRRMREAVASAPEAVGKLLVVMQGDCAPTTSRMAGELLRAVRMEHEKKGMAAAYDSRTIHVMPY

SEQ ID NO: 14891 - protein, 327 aa, Zea mays
  VARIANT 41: note = Ancestral polymorphism is D, Derived polymorphism is H
MLSSHRESLLPYAPGRRAAVLLDHRRYRPNVEVAPSCPRCDSPNTKFCYYNNYSLSQPRYFCKGCRRYWTKGGSLRNVPVGGGCRKNRSRGKPVRAVAVDSVAPSSGGAAAFTHRASASSSSASPATLRPDMLLEGMLGSPSELCQLTVTDDDAAENPAVAPDGPRIDLALLYAKFLNQQPPAPERRAVLPESLVVDTLSGSSSSDVGPVVPSRDHQPFTTQDDGLGELSAAASAEPSAPPPQSSSCAEALIGAFGMDQRCYDSLGLPPDGGDLVLPSTWPLLGAKYELFDPLPEDAVSLQDGFAGDEDVWSGALACQGLEAALCRP

SEQ ID NO: 14892 - protein, 228 aa, Zea mays
  VARIANT 173: note = Ancestral polymorphism is V, Derived polymorphism is A
MSLAGGGDGCSRRGECGGRLELPRQQPPMVVDVGCNCRAPRLLSSLISSLKSHARGVGRPNPNSSRHASSSSWSSSATTAFTSSTSLTTATTTFSSLDHHPSSWVPSTCAADTNAAVYVVDDDAEPARPAQRRRRRRQRRRGRCGRAATWEEAAVAVEVESAAPYEDFRDSIVAMVTEREMYAWEDLNALLHQFLALNSPRHHPLILSAFADLWAPRGGPFGPPSPCL

SEQ ID NO: 14893 - protein, 265 aa, Zea mays
  VARIANT 30: note = Ancestral polymorphism is S, Derived polymorphism is L
  VARIANT 34..265: note = Derived polymorphism lacks residues 34 to 265
  VARIANT 200..265: note = Ancestral polymorphism lacks residues 200 to 265
MVTTRSTNAVTMAGWVSLPLAPRYHASILSSQSQSPMPCAATISCMEARKSWYGSAESNATATPSTKDAAARGRRAGAAGGFLSRMELDGPWGSKRRRSSERSPRTMASAKSSAAGASDSVDWLSDAQSTWRVVRADELAKDDSPESRKRDAMVLAVADGVRKYWLVLGCLQDGHIHAGGGAAGGGDGCGVSWAELVVVYKRELKGSPLTIGVSSDVNSDVCSCGAGAMQLCCCLPAVAGHADHKRIDQLENDNVSCGDASSSWI

SEQ ID NO: 14894 - protein, 253 aa, Zea mays
  VARIANT 182: note = Ancestral polymorphism is E, Derived polymorphism is K
  VARIANT 178..253: note = Derived polymorphism lacks residues 178 to 253
  VARIANT 11: note = Ancestral polymorphism is F, Derived polymorphism is L
MVRGLPFSSLLYTTTNSAQDTPQPSPPPAAPPPAWMWPSCKHPRTSQYLRTPSATAKTIASLFLDSGESSFANSSARTTRHVDCASDSQSTESEAPAADDFADAIVRGLRSDDRLLFEPHGPSSSILERKPPAAPALRPRAAASFVDGVAVAFDSADPYHDFRASMQEMVAAHGMGDWDWLERMLAWYLGANGRDTHPAIVTAFVDLVVTMAAASASACACSSSSRVSSFTFASSSEPAESSSAGGHFSFGLR

SEQ ID NO: 14895 - protein, 272 aa, Zea mays
  VARIANT 222: note = Ancestral polymorphism is A, Derived polymorphism is D
  VARIANT 25: note = Ancestral polymorphism is K, Derived polymorphism is T
MAEFAPGFRFYPTEEELICFYLRNKLSGTRRADIERVIPVADVCTLDPWDLISGTFIRQAHRGACSGNEEPWFYFCPRQEREARGGRPSRTTPSGYWKAAGTPGLVYAADGRPIGTKKTMVFYRGRAPAGAKTKWKLNEYKAFEDDDATAAVAAPAPPSHALQTWSQYSLCRLYTKSGCLRQFDRRRSSTAAATGGGNENKPPAPSTALPDGDQTGQKRKRAAPTDDTSSSYEDGDEDVSTQQRLRLAQRGADDEGVKDMTDWWSEFLDDCI

SEQ ID NO: 14896 - protein, 366 aa, Zea mays
  VARIANT 306..366: note = Derived polymorphism lacks residues 306 to 366
MAEGFGRWESDLLFPAAECVQDSADRMEGVYRLLLHERKVMQDGTSDAKFHAPIQSERDVITALGTTKWQLEQFEREVNAAAFSDKSKSRENAILKFRQFIRAIADQISQVEENLESLRLGSSRTPKHLYSSEHDGDGLASFLSGSSKDDHAYHSTGTDEIVELKLDNVPLVNGYHSTQEHTTYEHRNSDKDVEGAGKRKCSCGEGACEGDHNNSNMFVLDVDDSTSRRFFCKNKLSRQYHNFIRNLWFTKRRRDRESFTKRRKDGEDMDSLRNGNMLPSFNLPQSGRVMYFWPEVIKRRLCRSGYFTDHNHSQIRLVTAVLIALAVLFHAVLIVITLVLCHGFWRTIIVSKHFNVVLQCAMPYRW

SEQ ID NO: 14897 - protein, 153 aa, Zea mays
  VARIANT 20: note = Ancestral polymorphism is A, Derived polymorphism is T
  VARIANT 36: note = Ancestral polymorphism is P, Derived polymorphism is S
  VARIANT 49: note = Ancestral polymorphism is R, Derived polymorphism is L
  VARIANT 53..153: note = Derived polymorphism lacks residues 53 to 153
  VARIANT 62..153: note = Derived polymorphism lacks residues 62 to 153
MEHDAPYGRQPLADMISVFACKFPDLNTYKSCDLLPSSWISVAWYPIYRIPTGPTLQDLDACFLTFHSLSTTPDGTISGCPETDNFHNSKVASIPGKITLPLIGQASYKLNGSLWTSNQHHEQQLTTSLLKAADDWLCQRQVDHPDYRFFLTH

SEQ ID NO: 14898 - protein, 160 aa, Zea mays
  VARIANT 6: note = Ancestral polymorphism is R, Derived polymorphism is W
  VARIANT 15: note = Ancestral polymorphism is V, Derived polymorphism is M
  VARIANT 21: note = Ancestral polymorphism is R, Derived polymorphism is Q
  VARIANT 22: note = Ancestral polymorphism is R, Derived polymorphism is H
  VARIANT 85: note = Ancestral polymorphism is A, Derived polymorphism is V
MVRALRLGGRAAAAVRWCTYRRAAVALCVANLVAVLLVARALYAPSSFAFAPKRGELKYSREHMRWVDESIRIRRAAEPVELIEAIIAVLRSSCVWNSICSEAIEAWCVGKLKDMRSTSSKNLSNFGLSSEDSRMLKRALEFNWQMLLEDIGLWIPPNIW

SEQ ID NO: 14899 - protein, 696 aa, Zea mays
  VARIANT 72..696: note = Derived polymorphism lacks residues 72 to 696
  VARIANT 130..696: note = Derived polymorphism lacks residues 130 to 696
  VARIANT 154..696: note = Derived polymorphism lacks residues 154 to 696
  VARIANT 190..696: note = Derived polymorphism lacks residues 190 to 696
MGMAADATTAMTIDFLRARLLSERSVSRAAKERADHLAKRVVELEEQLRTVTAQRRKAERAAAEVLAILDSQGFGRLSDAADDSGSEYEADTGDPNAVERDGGGGNAAEDALSGSELGAPAAAAAASAAQAGGLSWRGRAASPECERRRPQHQQHKGRQLRQRHGHGHGHRRGYFYCRAADSSPKYHPGQSCRKIKRKELRSQTEEEEGNDNAVESTEDGQERSDCTVCTDQPADVDGEVNQDGHGSSSNGRGEDRDDLAMVYEKDGEMERVLEKQAELIGQFEAQENAQREWEEKFSLSRDSVMDNVNLLNNKLNQAENACGRRETARVVDKEVVCEQARSSDNNFHCINDPSECLPNGPVSELPQNVAKDSVTEHRKFDGFGHDCVVTAAAVISSHGELQVRKDVLTTKSYPEGSGNNLGKSALPPQGSCGSRLNAGHRNGQGDESSDSGSSYHVNARSSEQYINTSSVGSQLSDTPKSEVSEWSSSCFHNHTDNQLDTQLHQSSNKDVGGVLEALRRAKMSLRAKLSWPSLASKNILALEAPDDLPVNGMELSLCRTAHVSQEIFALPTPTDYLNKVLPHDDVKVPIGPAGLFRLPIDSFPRDEMTTRDGYGSWFSLTSVSPPYVSPSYHADHIMPALSLSQYGSGLSLNPYYDPHSSMLLSMPTAGGRSVPVSDFRIGDGSFLREVPRPDNY

SEQ ID NO: 14900 - protein, 1818 aa, Zea mays
  VARIANT 18..1818: note = Derived polymorphism lacks residues 18 to 1818
  VARIANT 15..1818: note = Derived polymorphism lacks residues 15 to 1818
MQTVYKLCIKCFWPWKKQGFTLKLETERNSRRPGEAMSAGRGDPNTPANRPLFLSAGVPNLGCHNVAAPAAAGNSGSIASQVLFSPCSTSVLNTIQEVPAPQSALLSPINRATEQGDVPCIQPSWNMPGGCTQVPINIIVFHRELTRRGSRPQLSPSATALPDVSEGASIRLAGSNFLSHGRTPSIVAGDMTTNSSQLATADKYNSEHRMNCLHDEASKTENGKGSTQLPQLATAIFRDSYNDLESVVPAATWETRVQHSQESTTCLAESTTDDNIHMYQSMQKRLKTQINKSEHTPLSAPTVPKEKTLTQIETQLASAEKTEMFRNEETPALKMKARKKKHRPKVIRENKPAKVQKPDSTPDGKSPNQKVKRSYVRKKRNLSSLENCSGPVSDQSISGATGVAARSRTSSVRRSLQFESKEQGLQGGHSSMANIHHHNYEKPGHAQSSFYSESEVQTGRVMQEGMENSPGELAFDMSRRLNKFLDEYIHLPDMLKPTQEVSAATSASFSTELAREEDNVGRTCKPDGKSKCSLFADERVVNPTIEGNKKDLELNYSDADGLVSSARSLPQMDPTRSQMGKVSEVENPTHHSNGSLPGTRDSVVLRAAAEMFAFFQAGAIKKKRSARLRRNSPFYTMDLKNNTLQASTRLPQPCMDALHRSSCIKFLTKKRSEKARPHCSSVIQPNDELKDRLSAGSTFYGATNGCKISEESSPNFSSQTLDNKRINVDTHCEVAEGRSTNTSTGPYMDYVQGVASKLKHLDLNTEQVQRTEMHLSLTTPAVISFEGTSGPSNALVPYGGVVMVPNERPLQLVKKQRPRAKVDLDFETTRVWNLLMGKSAESYGTDVEKERWWQQEREVFQSRANSFIARMRLVQGDRRFSPWKGSVVDSVVGVFLTQNVADHLSSSAYMALAASFPSRPVNNNCKDDGTTEDNKQTTRMSELVGEKSVFDLFYNGVRPDLEVGCEEVSMTCKKTHMEPTDNTRDSEFIEGETYSFDYKSTDESVCNHKGIGIEHKEQQLPDFSSAELTVSTELVQQIQIQKISSSQILTSETIQSRLSLSSEIPRNFVCGGSAAAYQQLGSNFDQGSSLTENDATASEIECHRLQMAAINDYGFGKPEIPSSSSMPFFLAVDPQQLKLRNETNVSSTSSNIPSDSASPNLKNGTDPLLMPFNSYMADWSSDKITYTTLNTPKISTELPVKLHHDKSSSFEAPNLKEHESVFATHEMTVEATRKEDEHTSKSSFTSYNGVPDTAAQASKPKKTRTTTAKNTENFDWEKLRRQACSEGQMKQRSFERRDSIDWEAVRCADVRRISHAIRERGMNNVLAERIQNFLNRLVRDHGSIDLEWLRYIPPDSAKDYLLSIRGLGLKSVECVRLLTLHHLAFPVDTNVGRICVRLGWVPIQPLPESLQLHLLELYPILETIQKYLWPRLCKLDQQTLYELHYQMITFGKVFCTKRQPNCNACPMRSECKHFASAFASARLALPAPQEESLVKLSNPFAFQNSSMHAMNSTHLPRLEGSIHSREFLPKNSEPIIEEPASPREERPPETMENDIEDFYEDGEIPTIKLNMEAFAQNLENCIKESNNELQSDDIAKALVAISTEAASIPVPKLKNVLRLRTEHYVYELPDAHPLLQQLGLDQREHDDPTPYLLAIWTPDGIKEITKTPKPCCDPQMGGDLCNNEMCHNCTAEKENQSRYVRGTILVPCRTAMRGSFPLNGTYFQVNEVFADHRSSHNPIHVEREMLWNLQRRMVFFGTSVPTIFKGLRTEEIQQCFWRGFVCVRGFDMETRAPRPLCPHLHIIARPKARKTAATEQVL

SEQ ID NO: 14901 - protein, 361 aa, Zea mays
  VARIANT 174..361: note = Derived polymorphism lacks residues 174 to 361
  VARIANT 166..361: note = Derived polymorphism lacks residues 166 to 361
MESATAAVRSASLARARPAPLVHGRARGAGRVVGAGLAARARRRALVAVASHQEHHEPLPPRAQEGGAVAVATQADEAEVHAIDAPAAAAETSSSQLAAGKTVRVRFVLKRQCTFGQSVCLVGDDPALGLWDLSNAFPLKWAESHDWTLEKDLPANKLIEFKFLLQDSTGKLHWQGGPNRSFQTGETAANTLVVFEDWGDVKNQKIVEEGGVASAGIEQTVVSNDSESRKGTVLEAELQVDDNLVQEDEFVVAKEDKKPAVATDASVQVDWVKTDEANPQKSKLHEEMEVLDELLGKENMENSGISSTDENYAEKTGDDILFEDGVLIENGLATAYEHDLLWGWKALQQLLMSLGFKMDTT

SEQ ID NO: 14902 - protein, 261 aa, Zea mays
  VARIANT 23: note = Ancestral polymorphism is R, Derived polymorphism is G
  VARIANT 24: note = Ancestral polymorphism is S, Derived polymorphism is L
  VARIANT 71: note = Ancestral polymorphism is A, Derived polymorphism is T
  VARIANT 89: note = Ancestral polymorphism is E, Derived polymorphism is G
  VARIANT 140: note = Ancestral polymorphism is R, Derived polymorphism is C
  VARIANT 149: note = Ancestral polymorphism is G, Derived polymorphism is D
MRARQMTARSALDEVTDTGAFDGSPSTFRSSISRDGRFPAVAGWYHLYVSYACAWASRCLAFLKLKGLDHTICITVVKPIFERTKERDGHLGWVFPAAADEEPSIETDPLNGARSVRELYEIASSNYAGKPTVPVSLQSRAVGQAAEDGVYKCGFAKKDDRVLVPDLGSLTSIHDRARELFYYLKGGQVDYSEEHSKACSHNRFGRIYHTGHYLVCYEHNPVHFVGHSAGAQVVRVLHQMFADKRDGSSELEYMIRAPKLG

SEQ ID NO: 14903 - protein, 117 aa, Zea mays
  VARIANT 4..117: note = Derived polymorphism lacks residues 4 to 117
  VARIANT 5: note = Ancestral polymorphism is R, Derived polymorphism is H
  VARIANT 29: note = Ancestral polymorphism is A, Derived polymorphism is T
  VARIANT 31: note = Ancestral polymorphism is E, Derived polymorphism is G
  VARIANT 42: note = Ancestral polymorphism is D, Derived polymorphism is Y
  VARIANT 45..117: note = Derived polymorphism lacks residues 45 to 117
  VARIANT 60: note = Ancestral polymorphism is T, Derived polymorphism is I
  VARIANT 72: note = Ancestral polymorphism is P, Derived polymorphism is L
  VARIANT 111: note = Ancestral polymorphism is S, Derived polymorphism is L
MKAERAAVERATAEARERAIEKAKAAADAKERIGKFRSSFKDSFKAPNQDNQHEASSQKIAYNKHGPLVLKPMAVLIITNFQAKALAEKNMRDMLVQREHAEKHNFHWFLSEIYAHH

SEQ ID NO: 14904 - protein, 199 aa, Zea mays
  VARIANT 168: note = Ancestral polymorphism is R, Derived polymorphism is C
  VARIANT 150..199: note = Derived polymorphism lacks residues 150 to 199
  VARIANT 12: note = Ancestral polymorphism is S, Derived polymorphism is F
  VARIANT 8: note = Ancestral polymorphism is L, Derived polymorphism is F
MQRHFTLLTIASGAANEATGVFGSNETGLGRSRTKASAKVVLPAKSTNSFDHKDSTGLSSLKGALLGLASYDSDDDDDADTDSKDKMPISNLSSKDNAGDINTEGDKSTLGKRNGNHNEQNSSLGSAPSGEDLKSNNQNFQRSANAEPEQMHIRDTENGEFRFKAKTCTEPMGAFDRMDEKANTYAEVYIQNRKNLFWQ

SEQ ID NO: 14905 - protein, 221 aa, Zea mays
  VARIANT 63: note = Ancestral polymorphism is Q, Derived polymorphism is H
MFPAGAVEAESTAGSCTVAPADTDQLDLEAAEQLIQLSGGDGDGAAAAAAVSESRSADSVKCQRKEKEAAVESRRRSAGRIPPPAAGGKDGNRGSESGVKGVDSSACSATAADVVAEDNKVVVVESCRRGADQRLPAGKDRNGGFVHGEARKRPRFRSLAAIYSDTEPRRLTAGGGERHADRDPHPPEEEEGEKREARRVIAVDAEASKARRSVQLAHRSM

SEQ ID NO: 14906 - protein, 630 aa, Zea mays
  VARIANT 126..630: note = Derived polymorphism lacks residues 126 to 630
  VARIANT 229..630: note = Derived polymorphism lacks residues 229 to 630
  VARIANT 250: note = Ancestral polymorphism is R, Derived polymorphism is C
  VARIANT 254: note = Ancestral polymorphism is C, Derived polymorphism is R
  VARIANT 313: note = Ancestral polymorphism is P, Derived polymorphism is L
  VARIANT 548..630: note = Derived polymorphism lacks residues 548 to 630
MEFMNAINLANGSDTDKDKSTYLATKEDNAIEESKSDLETEPSIKPLLAKGKSRIVFHLTSSMAEAQILLVNENGDWLATLSQNNLSTDIKVFTSSFNIKVALRNLKISDDNLLSSHPYFWVCDMRNPGGRSFVEIVLDTVGIPIWQMAMEPSVDAKNTENNSSEFVVNGHPDQNDYSDSDLSNIDDGDNSEDEDGSTNTISSYHVSSKSERADSSYDFGVFYLILSIWEVRVTCLGIWLLVSSSYFSARQFYCNWMLLLQFHFIGDGATLESVPELVKAMYLNVESFPCVRLLNLSGEIGCSNPGSEKVIAPIVRLRKGSDQLVQPSTILLSLDQMSDFFLRVSNDPELHQKVTGVLVESNGVNNDLQELSPDRKFPKDDFAPYSNHSHDWNPAVITLLSCRDQVSCGTNIIFLYFYFQKRVQTLFKRFQKKIEKTGNGYKSNVAEFNLVMQFLYVISLFEYSYSKGSVWTSLPPLKNGSTGHPKPLILAIASQDSASFFRDRSLGSDSPISGLIALLIAVDALSHIHGLSKLKKQLVFAVFNGEAWGYLGSRKFLQELDEAAASVNGISSLMIDQVSARKINTDRDNLRLQLIMEILDHGDFSVIFELANFDHGDFIRSKLYIVLAFF

SEQ ID NO: 14907 - protein, 496 aa, Zea mays
  VARIANT 20: note = Ancestral polymorphism is T, Derived polymorphism is M
  VARIANT 41: note = Ancestral polymorphism is R, Derived polymorphism is L
  VARIANT 205: note = Ancestral polymorphism is R, Derived polymorphism is C
MDCAMAKVSTATMSEQLENTARSLFSPFPRLVRDLPYDQFRGVYWLLPVLQCGRMSEPSKVIHIRNVGHEIAESDLLQLLQPFGVVSKIVMLRAKNQTLLQMEDIHASVSALQYYTSVQPSIRGRNVYMQFSSHQELTTDQSSHGRNSDQESEPNRILLVTIHHMIYPITVEVLHQVFKAYGFVEKIVTFQKSAGFQALIQFHSRQEAVEAFGSLHVIIYIVQLFSVNCKSITTTTDLVPLSFLRDFTNPSLPTEQRPRASQQAYPDPANLYAFQQAGASYAQMGRAAMIAAAFGGTLPHGVTGTNERCTLIVSNLNNDKIDEDKLFNLFSLYGNIVRIKVLRNKPDHALVEMADGLQAELAVHYLKGAILFGKKLEVNYSKYPNITPAPDAHDYLNSSLNRFNSNMVKNYRHCCSPTKMIHISALPQEISEEAILNHLSEHGTVVNTKLFEVNGKRQALVLFETEEAATEALVSKHASTLEGNTIRISFSQMQSI

SEQ ID NO: 14908 - protein, 223 aa, Zea mays
  VARIANT 99: note = Ancestral polymorphism is T, Derived polymorphism is R
MEGHYSPTAAPEVSGERRFRGVRQRPWGKWAAEIRDPHKAARVWLGTFETAEAAARAYDEAALRFRGSRAKLNFPEDARLTTPSSAAATAATAAAGSTRTMAVASTGGYPASAASADYLQYQMFLQGPQGATSGSHGGGYPLYYDYGGHSGVGDGSVSSSSGSYSFPASTVTVASVPSSAPSYDEAAQWTSWPESSASAWSYPATTGSWSASSQYPPSTRPPQ

SEQ ID NO: 14909 - protein, 383 aa, Zea mays
  VARIANT 368: note = Ancestral polymorphism is S, Derived polymorphism is F
MAIQMDKTSIIVCSVIGSLGLLSAILGFSAEGTKLTPYTILVYGDDCLYPQNPAIGLGICAAIFLVVAQITFSAVGGCCGCCRSRAIPSETKRIVSIVCAVFSWIAAVIAFALFIQGAAWNANVVRVEQAPYCPYLKDGVFAGAAVLALAATALSITSFIMQRTQPAAAATATATASAVGTPNMPGGQSPSPEVVMGQPLFPSGKAHQNDYPVKPQGYEHEQQPHQVQQVPPPTDSHHPPQGYAQSAAPNHQLPPRPAPAAAAAAPAAVAAAAAASAPSVLQPALGTVAMGQPLPLQVPPQYCLPVPAPQIGGVDIPAALPSAAAPAAGSGSTLSTAIRNEVVRQGIRMAAEVVKDSLFPENGGSVLSMMTDSAGGDAVQVTN

SEQ ID NO: 14910 - protein, 359 aa, Zea mays
  VARIANT 88..359: note = Derived polymorphism lacks residues 88 to 359
MDKYEAVRDIGSGNFGVARLMRNRETRELVAVKLIERGHRIDENVYREIVNHRSLRHPNIIQFIEVILTPTHLAIVMEYAAGGELFDRIVDRGRFSEDETRYFFQQLICGVSYCHHMQICHRDLKLENVLLDGSPAPRLKICDFGYSKSSVLHSRPKSAVGTPAYIAPEVLSRREYDGKLADVWSCGVTLFVMLVGAYPFEDQDDPKNIRKTIQRIAAIQYNIPDNIRISDDCRQLISRIFVSNPLRRITMREIKSHPWFLKNLPRELTEAVQLSYFRRDNSVSAFSDQTTEEIMKIVKEARTLPKSSRSGYGYSEECSDEEEKEVESEPKEEEEEAECDKTVREVRESGELDMTSLHI

SEQ ID NO: 14911 - protein, 129 aa, Zea mays
  VARIANT 58: note = Ancestral polymorphism is T, Derived polymorphism is I
  VARIANT 64: note = Ancestral polymorphism is E, Derived polymorphism is V
MKKTSSPLLIVLFLTAAAMAAEPEKQAAPAAQETAVHIVYVDRPEDADPEEFHIRTLTPVLGSEQKARDAVLYHYKNAASGFSAKLTPQQVKDLKEQPGVLQVVPSQTYQLHGPGSGTHQGTTHTLGLM

SEQ ID NO: 14912 - protein, 591 aa, Zea mays
  VARIANT 237: note = Ancestral polymorphism is G, Derived polymorphism is A
MKAAVSSAGESAGELLLRAAALVPWTRYFLAALALAAVLLYRFLELHLLGDLLRGLRGGRVSLTFHPESQVYHRVASKCRSLHGRYLTTPWLASPHLQTLFLSISGRPPSFTYRRQLYTVRDGGTIALDWLLASDLEDGDIGTSDGTISKDDSTPLLVVIPGLTSDSSAAYVKHLVFSMAIKGWNVVVSNHRGLGGISITSDCFYNAGWTADMREVVSFLHQEYPKAPLFTVGTSIGANIVVKYLGEEGENTPVAGAASICSPWDLLVTSKFISRKLVQRCYDRALAIGLKGYAKLHQSVLARLANWEAITSSHSIREFDRHATCVVAKYETVDTFYRKCSSANYIGNVSVPLLCISALDDPLCTREAIPWDECRANKNIVLATTPNGGHLAFFEGLTAGKLWWVRPVSEFLCALHDGPYMHRQKAQGHDLHSSLESSIDKSPYVNFMEDGMVAALTDDGPNNGDSLLNEVLGEIEPNDSVVVQHVKQNQNTRAIQNESDSWLDDKNSSEGNVQAHGGTQEQREVPYANKISDAIGPVKKSINQLSRSQGKSIWLLAYIALVTSWPLLGALGFFFRKRLSNSLLSRKLKKS

SEQ ID NO: 14913 - protein, 163 aa, Zea mays
  VARIANT 16: note = Ancestral polymorphism is S, Derived polymorphism is A
  VARIANT 11: note = Ancestral polymorphism is H, Derived polymorphism is Y
MEELRAAVTAHLDQVAGLVQALSSELRRGIGPAADNLRAFIRAVDWTEPWLMCLMAFHVVLLLTAVGFRRNANFQLFLLFLAYSGVYLAEKMNRYLGENWKSFTSRNYFDRSGVFISVVWSGPLIVISIVSVISSLIALCRLMVKWKRAELRHRARLAHDKKD

SEQ ID NO: 14914 - protein, 230 aa, Zea mays
  VARIANT 74: note = Ancestral polymorphism is G, Derived polymorphism is V
  VARIANT 22: note = Ancestral polymorphism is L, Derived polymorphism is V
  VARIANT 5: note = Ancestral polymorphism is V, Derived polymorphism is M
MALYVRLLSSWTSTKNDALAVLLCLSAEWENSGIFEAGATDSVLSAVGEAEAVAAVLASLTKHGAAETVGRLDGGVVQLVIKMVCNTEQSWECAAAILSCCAGGAMTASQVMVVPVQLGTGTDHSSSQTTTMSLACLVCHGMSSPSHSLRSYSVSSSEEESRCGAVVACLARRVTPAGTSTSVGTSKVTPFPPVVSDQVGTEGAPRLQRSRAVSRDLVRDWNFDEVIVAN

SEQ ID NO: 14915 - protein, 162 aa, Zea mays
  VARIANT 30: note = Ancestral polymorphism is P, Derived polymorphism is L
MADGDEQGAGAGAAADGAAVDAAVDHRGRPASRATTGGWKSASFIIGKSRPRSDRPYPCSAYRIAEVDLHRARLGRGSGGRPANAAVEIAERFSFYGVSANLITFLTGPLGEGVAAAAAAINAWNGTAQLLPLLGGTLADKWLGRYRTIVLASVVYILVRKK

SEQ ID NO: 14916 - protein, 555 aa, Zea mays
  VARIANT 259..555: note = Derived polymorphism lacks residues 259 to 555
  VARIANT 273..555: note = Derived polymorphism lacks residues 273 to 555
  VARIANT 354..555: note = Derived polymorphism lacks residues 354 to 555
MGGLCSKVSAVDKSPSDTAFGRNQVTDHDPGASLELEKQPVSGKAAAPAKRLDEQQQQHQSFSFLESVVPGVAFHARANASGETGPRTSPQLTRSLSQRDGVGKAKAGADKVSEVSSILGRASTVGLEKAVEVLDTLGSSMTSFNSSRGFVSSSAAKGNKISMLAFEMANTIVKGSNLMHSLSELSIKHLKEVVLHSELQKVFNTLYPKILMNCSRWQLPTKGDSLDILKQAVKVQSKHVKSMKKKSLWSKNLEEDPAQAASSQASFPIIVFQGLNITFFSQVVVKLVDIVHFLHLEIYNAFGHPDKEEPQERGKHHNRLGPAGLALHYASIINQIDNLVSQSCAMPPNARDALYHSLPPIIKSALRYKLQSFEVKEELTASQVKAEMEKTLWWLVPLASNTNKAYHGFGWVGELANTGSEMNCKLSGQKDMSRIETLYHADKEKTEALILELVVWLHHLISKSRHASGGVRSPIKSPVSSPTQNGAAITLLPGKTKISSPILTQEDQDMLRDVKYRKFVPGISKSQEFDTKSSHSKRSRLSKSNSQSPASGNRK

SEQ ID NO: 14917 - protein, 402 aa, Zea mays
  VARIANT 268: note = Ancestral polymorphism is M, Derived polymorphism is I
  VARIANT 203: note = Ancestral polymorphism is T, Derived polymorphism is I
  VARIANT 154..402: note = Derived polymorphism lacks residues 154 to 402
  VARIANT 151: note = Ancestral polymorphism is T, Derived polymorphism is R
  VARIANT 145: note = Ancestral polymorphism is I, Derived polymorphism is F
  VARIANT 136: note = Ancestral polymorphism is S, Derived polymorphism is N
  VARIANT 95: note = Ancestral polymorphism is S, Derived polymorphism is F
MAAASWSAPTTSFAPAPAPPWGRWRTKAAPLPIRTLPRRVLLNAVGESAMVAAGDTLLGLYEKERLGLLQYADDESKEERYWETLDADLRYWTRSLRPVQWYPGHIAKTEKELKEQLRLMDVVIEIRDARIPLSTSHPKVILLVIAIFICTKEQLQIVLSHVMYDQMDSWLGNRKRIIVLNRKDMISTEDMNAWATYFGNQGIKVVFSNGQLGMGTMKLGRMAKSVASVANTKRKEKGLLPRPVRAGIVGYPNVGKSSLINRLLKRRMCPAAPRPGVTRELKWVRFGTDLELLDSPGILPMRISDQTSAIKLAICDDIGERSYDFADVAAILVQMLIRHPAVGSEAFRRRYKIDVDSECGKTFVTKLSVHLFNGDTSQAAFRILSDYRKGKFGWVALERPPT

SEQ ID NO: 14918 - protein, 205 aa, Zea mays
  VARIANT 6: note = Ancestral polymorphism is K, Derived polymorphism is N
  VARIANT 23: note = Ancestral polymorphism is R, Derived polymorphism is C
  VARIANT 69: note = Ancestral polymorphism is M, Derived polymorphism is I
  VARIANT 72: note = Ancestral polymorphism is A, Derived polymorphism is V
  VARIANT 75: note = Ancestral polymorphism is T, Derived polymorphism is I
  VARIANT 105: note = Ancestral polymorphism is M, Derived polymorphism is I
  VARIANT 115: note = Ancestral polymorphism is E, Derived polymorphism is G
  VARIANT 128: note = Ancestral polymorphism is T, Derived polymorphism is M
  VARIANT 165: note = Ancestral polymorphism is R, Derived polymorphism is H
  VARIANT 171: note = Ancestral polymorphism is E, Derived polymorphism is D
MATLTKIGFFDDANHPLLEDTNRPTHKGFLDELLNNISTTNTDFDIEASGGYDDELIARLLKLGHCKDMEIAVKTVKTIKFLGLYEETQIPTGCSSPFDVICQRMEQRMAYGHNEQLALAGSVSIFETLQLGKPLIVVVNEDLMDNHHRELAEELAERKHLFCAHPQTLGETIWAMDLETLVPYEPGDDKPVVALINRFLGFPVG

SEQ ID NO: 14919 - protein, 267 aa, Zea mays
  VARIANT 180: note = Ancestral polymorphism is P, Derived polymorphism is S
  VARIANT 114: note = Ancestral polymorphism is P, Derived polymorphism is S
  VARIANT 111..267: note = Derived polymorphism lacks residues 111 to 267
  VARIANT 89: note = Ancestral polymorphism is T, Derived polymorphism is M
  VARIANT 49..267: note = Derived polymorphism lacks residues 49 to 267
  VARIANT 48..267: note = Derived polymorphism lacks residues 48 to 267
  VARIANT 45: note = Ancestral polymorphism is P, Derived polymorphism is R
MWPLCVISEKLFRMAGDDGAQGAAGSPYPDGRISLARRSYYIDVPHVQQAFTWDCGLACVLMVLRTLGIDCCDGIADLERLCRTTSIWTVDLAYLLNKFSVSFSFCTVTLGANPQYSAESFYREQLQEDIDRVDELFGKALDAGISIQCRSITAYDIAFLLLSGHCIAIALVDKSKLNLPCMSDHDVQQHNDEPDYMGHYVVICGYDADDCEFEIRDPASSRKRERVTMKSLDEARKSFGTDEDILLVSLTGKSGMKLSRKLLACSM

SEQ ID NO: 14920 - protein, 239 aa, Zea mays
  VARIANT 21: note = Ancestral polymorphism is S, Derived polymorphism is G
MAAARADGERRIGVAIDYSESAKKALDWAIDNLLHHGDTLVVVHVLHHGAEETKHTLWAKSGSRKLPPLKLSPHPSLPYPYPNAHPLPAALIPLSEFREPEVMQGYGVRPDAEVLDAIDTAARQKQLKVVAKLYWGDAREKLCDAVEDLRIDSLVMGSRGLGPIQRTGMRCSASDIAVMSHAMLPCELGPFSNSQGGIVFSLSKSCEDSPGKRDKLRAVKRIVPGDSRQGEVVAWAACQ

SEQ ID NO: 14921 - protein, 285 aa, Zea mays
  VARIANT 175: note = Ancestral polymorphism is Q, Derived polymorphism is R
MSCAGQAGGWLLDYALVEEEIQGSEFIYMVDDPAVSSVILGFDAPRKEDGVQDNPGAKKRQSFSSSFLSVDPQHKRKSVHITLSPILLPLKSVGIICCAFLFPFLLRRSRPESSAPPGTKACREKLRRDRLNERFNELCAILEPGKPPKADKVAILSDAARLLNQLQGEAQKLKQSNESLQESIKSLKAEKSELRDEKTRLKAEKERLEQMLKGVVSHAAVAAPGPFVPHPAAVAPSFHHHPAAFAQAGKFVPYPSYPPPAAFWQWIPPTSLDTTKDPAHWPPVA

SEQ ID NO: 14922 - protein, 279 aa, Zea mays
  VARIANT 117: note = Ancestral polymorphism is C, Derived polymorphism is R
MDFDPNFCILKVLAGLLKGVPSAVARRLPALCGVWGRVSLSAKSYPYNMQRLWLEPGPYPYNMQRLGLEPRTFRLDSTTAPGPPFSCWIIVLVNFVVNFSFFVLHQSFGSLDSAFSCVMNYFNFCRYGPLWITTTLIFMLAVFGNYATYLVQTKKDMDIWNFDVGYFSWAASVMYSYAIIVPVVFFFLFQYFGSRPSLVRFWCMWGYSLFIFIPASVLLLIPVGFLQWVIIALAGGASSWFITLNLKECTEGADLMVLMASASVLQFALALFIKVYFFA

SEQ ID NO: 14923 - protein, 290 aa, Zea mays
  VARIANT 39: note = Ancestral polymorphism is G, Derived polymorphism is D
  VARIANT 209: note = Ancestral polymorphism is V, Derived polymorphism is A
MPSPAAAAAAPFHRIACARQHLPQTRLFFLPSRALLKSDRLTVPAPLRVHALRLPPTVPRAASHDAATGVRSPTSGGQMLVFVPPHPLIKHWVSVLRNEQTPCVIFKSAMAELGRLLIYEASRDWLPTITGEIETPVAVASVEFIDPREPVLVIPILRAGLALAELASSVLPATKTYHLGFRRDEETLQPSIYLNNLPDKIPEGTRVLVVDPMLATGGTMVAAIDLLIECGVTSKQIKVISAIASPPALQKLNNKFPGLHVYTGMIDPEVNEKGFIVPGLGDAGDRSFAT

SEQ ID NO: 14924 - protein, 219 aa, Zea mays
  VARIANT 90: note = Ancestral polymorphism is S, Derived polymorphism is P
MAQAGYRHIDSAVAYRNQKEAYSPLGSPGSPGYSGPNVLSNPVVMSVAERLQKTPAQVALRWGIQMGQSVLPKSADRTRIGENFDIFDWSIPYDLMAKFSAIKQACIKTTFFFPSVLRAIGFLPMFVTTSIQGFTGEHHANENLSEFSMWHPLFRFSIWFSYLIFLFIPNMQVRLLKVEFVVHPNSGYNTLEDLWDGEVEYEDERTENQDHSDFLRCFS

SEQ ID NO: 14925 - protein, 359 aa, Zea mays
  VARIANT 28..359: note = Derived polymorphism lacks residues 28 to 359
MQRWFPGPAYKLHMSSLQAAPLIVRRDCFPFATVGVDGRRYSVAQTFGGTGTGTGHRSVGIRGSRDSERMATYFVLNTGAKIPSVGLGTWQADNGLVGDAVYAAVKAGYRHIDCAQAYNNEKEVMDINHAAEDVPVALNGTLKDLQTDYVDLYLMHWPVRMKKGAGFGPHAVVPSDIPATWAAMEELYDAGKARAIGVSNFSSKKLADLLAVARVRPAVDQVECHPVWRQGRLRAFCASQGIHLSAYSPLGSPGTATVKAGAVLEHPAVVSAAETLGKTPAQVALRWGVQMGHSVLPKSTDEGRIRANLDVFGWSLPEDLLAKFSEIEQASRERLIRAGFFVDPDGVFKSIEEFWDGEI

SEQ ID NO: 14926 - protein, 512 aa, Zea mays
  VARIANT 30: note = Ancestral polymorphism is T, Derived polymorphism is M
  VARIANT 159: note = Ancestral polymorphism is K, Derived polymorphism is R
MTPASQAAPPRARRSVVAELEGALLRSADTLPYFMLVAFEASGLPRFALLLALCPLLRLLELAGRGGLALRAAAFVATAGVTRAELEAVSRAVLPKFMADDVDPAAWAAFGSCEGRRVVVTRMPRVMVERFAKEHLGAHAVVGSDLEYSRLRRSTGLLKGACHEAVASRARALFAGDDLPDLAIAGSEMARSFTFCEEQISPPFTGDHGMNAAPPFRPVIFHDGRLVCRPTPFMSLVILLWLPLGVLVAFVRIAVGLMVPIWSIPYIAPVFGGAVIIHGRAPPPVRPSDAADVGSPPSGVLFVCTHRTLMDPVVLATVLGRRVAAVTYSISRLSEILSPIPTVRLTRDREVDAARMRAELASGDVAVCPEGTTCREPFLLRFSKLFAELSDRIVPVAMNYRVGLFHPTTARGWKAMDPIFFFMNPRPVYEVTFLNQLPAEATCAAGKSPVDVANYVQRILAATLGFECTTLTRKDKYTVLAGNDGVLNAKPAAAGKPAWQSRVKEVLGFLLH

SEQ ID NO: 14927 - protein, 291 aa, Zea mays
  VARIANT 36: note = Ancestral polymorphism is G, Derived polymorphism is D
MGGRPGYLTLPIFSVVAAIGYVYYTTVFVAVPRWLGLSTAAGVANAAAFTALAAACLATYAVAVRRDPGRVPPGFVPDVEDAESTVHEIKRKGGDLRYCQKCCHYKPPRAHHCRVCKRCVLKMDHHCIWINNCVGHENYKIFLVFVLYAVVASFYALILIVGSVLHSVPKDEQPGSDSSRTSIIICGVILSPLALALAVLLGWHIYLILQNKTTIEYHEGVRAMWLAEKGGDLYHHPYDLGVYENLISVLGPNIFCWLCPVLNTVGNGLRYRTSYDIPVSTPPKKIAAHSQ

SEQ ID NO: 14928 - protein, 220 aa, Zea mays
  VARIANT 25: note = Ancestral polymorphism is Q, Derived polymorphism is H
  VARIANT 133: note = Ancestral polymorphism is I, Derived polymorphism is T
MAEEKKRHKHKHKEKEKQPGGGTEQAAHFKPCGDVKGIRFGGQFIVKSFTVRRASPLELLRLLGIPPSYLSECQSLPFPSTTAYMPTGFTILAHQAWHTLTLGLGTNKSKAALFVFESEAMKAAVDRLWPAVTPLGDVNRRLIRGLTGSEMARFKFRKGCLTIYVYAVRRLGAAGFMRTDDLRRVLQSVVELKDFLDHTAMLAIPSQKSITLQSRTAVAH

SEQ ID NO: 14929 - protein, 540 aa, Zea mays
  VARIANT 195: note = Ancestral polymorphism is D, Derived polymorphism is G
  VARIANT 373: note = Ancestral polymorphism is R, Derived polymorphism is H
  VARIANT 376: note = Ancestral polymorphism is G, Derived polymorphism is V
  VARIANT 416..540: note = Derived polymorphism lacks residues 416 to 540
  VARIANT 427: note = Ancestral polymorphism is S, Derived polymorphism is L
  VARIANT 434: note = Ancestral polymorphism is Y, Derived polymorphism is C
  VARIANT 443: note = Ancestral polymorphism is F, Derived polymorphism is S
  VARIANT 460: note = Ancestral polymorphism is R, Derived polymorphism is I
  VARIANT 468..540: note = Derived polymorphism lacks residues 468 to 540
MQGHAYSRLAATAARVGVAHRGGGVARRVARAVLATLLRRQAVFLFAPLLYVAAMLLYMGSLPLDAVPRIIARQPLGSVYRSPQLYRRLRADMDADNSTGALATVWRHTYIGGTWRPCINNMTNGLPESNGYIYVEANGGLNQQRTSICNAVAIAGFLNATLIIPNFHFHSIWRDPSKFSDIYDKDHFVQRLQNDVRVVDKIPDFIMEQFGHNLSNVFNFKIKAWARIRYYNDVVLPKLVEERFIRISPFANRLSFDAPFAVQRLRCLANFEALKFSKPIVSLSETLISRMRERSVESDGKYISVHLRFEEDMIAFSCCVYDGGDEEKKEMDAAREIGWRGKFTKRGRVIRPGIIRMNGKCPLTPLEVGLMLRGMGFSNKTAIFLASGKIYKAEKNMASLLEMFPLLQTKETLASEEELAPFKNFSSRMAAVDYSICAQSEVFVTTQGGNFPHFLMGHRRYLYGGHSKTIKPDKRRLAVLLDNPRIGWKALKRHLLNMRAHSDAKGIEMKRPNESIYTFPCPDCMCRLNRTEHSKSKQSR

SEQ ID NO: 14930 - protein, 167 aa, Zea mays
  VARIANT 37: note = Ancestral polymorphism is V, Derived polymorphism is L
MPSSSLLCLAHRKGFVLMAPPQPKSGLFVGINKGHVVTKRELPPRPCHRKGKSTKRVSMVRGLIREVAGFAPYEKRITELLKVGKDKRALKLAKRKLGTHKRAKKKREEMAGVLRKMRFVNVELYCDKTKILLGRLVRTLTKRNREHFKFMELAARDYVPVSDFPYM

SEQ ID NO: 14931 - protein, 556 aa, Zea mays
  VARIANT 132: note = Ancestral polymorphism is T, Derived polymorphism is I
  VARIANT 135..556: note = Derived polymorphism lacks residues 135 to 556
  VARIANT 163: note = Ancestral polymorphism is G, Derived polymorphism is D
  VARIANT 170..556: note = Derived polymorphism lacks residues 170 to 556
  VARIANT 189..556: note = Derived polymorphism lacks residues 189 to 556
  VARIANT 198: note = Ancestral polymorphism is R, Derived polymorphism is W
  VARIANT 305: note = Ancestral polymorphism is F, Derived polymorphism is S
  VARIANT 325: note = Ancestral polymorphism is R, Derived polymorphism is H
  VARIANT 457: note = Ancestral polymorphism is L, Derived polymorphism is P
  VARIANT 468: note = Ancestral polymorphism is L, Derived polymorphism is Q
  VARIANT 475: note = Ancestral polymorphism is P, Derived polymorphism is T
MTEAQSPLSATMAKEAQSSPSATVAQATALPQLVLFNSLTKREEPFQPRVEGKVGMYVCGVTPYDFSHIGHARAYVAFDVLYRYLKFLGYEVEYVRNFTDIDDKIIKRANERGETVTSLSSRFINEFLLDMTELQCLPPTCEPRVTEHIEHIIELITKIMENDKAYAMEGDVYFSVESFPEYLSLSGRKFDQNQAGARVAFDTRKRNPADFALWKAAKEGEPFWDSPWGRGRPGWHIECSAMSAHYLGHLFDIHGGGKDLIFPHHENELAQSRAAYPESEVKCWMHNGFVNKDDKKMAKSDNNFFTIRDITALYHPLALRFFLMRTHYRSDVNHSDQALEIASDRVYYIFQTLYDCEEVLATYREEGISLSVPFEEQNLIDKHHSEFLKYMSNDLKTTDVLDRCFMELLKAINSSLNDLKKLQQKIEQQKKKQQQQKKQQQKQQQLQKQPEHYIQALIALEIELKNKLSILGLMPSSSLAEVLKQLKDKALKRAGLTEEKLQEQIEQRNVARKNKQFEISDGIRKNLATKGIALMDEPSGTVWRPCEPEGPHPLNK

SEQ ID NO: 14932 - protein, 447 aa, Zea mays
  VARIANT 237..447: note = Derived polymorphism lacks residues 237 to 447
MAPVRGAKKRKRPEKPAPAPTPGLPLPPLPDGSDWWGVFYRRVAGRLSSPYPPSLPASLCSLECALPCSFRRCKLDQRGMVGKYLVLGHSPFPREHQNMESVLKMSRRTFDYICSLVKKDLTTKTYGFRNFRFGDKKVLGVEDQVAVALMRLTTGESLQNIGMWFGMNHSAISNITWRFIESVEERAICHLKWPSPEEMATIKTRFDKVYGLPNCCGAIDTTHILMCSSAQPNSKVWLDNENKNSMVLQAVVDADLRFRDVVSGWPGSMDDTCILRTSGLYRLCEKGLRLGGQMELPGGSAVREYLVGDASYPLLPWLMTPYREHGLQAAKVEFNKRHTAAAAVVQTALATLKGRWRVIQGELWRPDKHRLPRIIFVCCLITNIIIDMEGTPSRDELVSGNHDLGYKQQFSDAADDNAIKQRDDLSRHVDNAIKRRDDLSHHVTAGE

SEQ ID NO: 14933 - protein, 215 aa, Zea mays
  VARIANT 112: note = Ancestral polymorphism is N, Derived polymorphism is K
MAAPPARARADYDYLIKLLLIGDSGVGKSCLLLRFSDGSFTTSFITTIGIDFKIRTIELDGKRIKLQIWDTAGQERFRTITTAYYRGAMGILLVYDVTDESSFNNIRNWIRNIEQHASDNVNKILVGNKADMDESKRAVPTAKGQALADEYGIKFFETSAKTNLNVEQVFFSIARDIKQRLAETDSKPEDKAIKINKPDQGSEAPAAQRSACCGS

SEQ ID NO: 14934 - protein, 160 aa, Zea mays
  VARIANT 115: note = Ancestral polymorphism is H, Derived polymorphism is Y
MDAGAKVVKKAAAGRRGGGGPKKKPVSRSVKAGLQFPVGRIGRYLKQGRYSQRVGTGAPVYLAAVLEYLAAELLELAGNAARDNKKNRIIPRHVLLAIRNDEELGKLLAGVTIAHGGVLPNINPVLLPKKTAVAAAKEGKEKKSPKKAAAAKSPKKVAAS

SEQ ID NO: 14935 - protein, 295 aa, Zea mays
  VARIANT 237: note = Ancestral polymorphism is L, Derived polymorphism is S
  VARIANT 177..295: note = Derived polymorphism lacks residues 177 to 295
  VARIANT 174..295: note = Derived polymorphism lacks residues 174 to 295
  VARIANT 172..295: note = Derived polymorphism lacks residues 172 to 295
  VARIANT 132..295: note = Derived polymorphism lacks residues 132 to 295
  VARIANT 104..295: note = Derived polymorphism lacks residues 104 to 295
  VARIANT 15: note = Ancestral polymorphism is A, Derived polymorphism is T
  VARIANT 13: note = Ancestral polymorphism is G, Derived polymorphism is R
  VARIANT 9: note = Ancestral polymorphism is R, Derived polymorphism is W
  VARIANT 8..295: note = Derived polymorphism lacks residues 8 to 295
MALCMILQWFEFGLAPSYAHAPHTVITLHPMHDCKNGTAKQAKISMAYSFIHRPLSDEALRVSTPVVVTCNDQRREVSVAQNIANKEINRTVAFDKVLGPKSQQQDVFNHAVVPLVSEVLDGYNCTIFAYGQTGTGKTYTMEGGGGKALNDDLPTDVGVIPSAVKRIFDILEAQSAEYNMKMIAIRYHEARRGEQGPPLRLLLRQAAAAKETVGDESKEFGRYMRQREEQEKQEAELFTRALVTKHDKQIEKRIRRQLHGLGGLTDGFGLGMNMLLGGDKEDDGGSRKSHGKSGN

SEQ ID NO: 14936 - protein, 153 aa, Zea mays
  VARIANT 104: note = Ancestral polymorphism is P, Derived polymorphism is L
  VARIANT 96: note = Ancestral polymorphism is G, Derived polymorphism is D
  VARIANT 74: note = Ancestral polymorphism is P, Derived polymorphism is S
  VARIANT 63: note = Ancestral polymorphism is A, Derived polymorphism is V
  VARIANT 40: note = Ancestral polymorphism is M, Derived polymorphism is I
  VARIANT 30: note = Ancestral polymorphism is E, Derived polymorphism is K
  VARIANT 15: note = Ancestral polymorphism is P, Derived polymorphism is L
MSWFGPNPKVTIVDPDLAKDVLSNKFGHFEKLKVPVLSKMLGSGVASHEGEKWVKHRRILNPAFHLEKLKRMLPAFSTCCEELVSRWAAESLGSDGSCELDVWPELQNLTGDVISRTAFSSSYSEGRRIFQLQAEQASLVMTNIRKIMIPDYM

SEQ ID NO: 14937 - protein, 99 aa, Zea mays
  VARIANT 59: note = Ancestral polymorphism is K, Derived polymorphism is N
  VARIANT 13: note = Ancestral polymorphism is R, Derived polymorphism is K
MGDSSSSSAAYIKMVHHMIEKCICFNLSKEECMDALEKHANVKPVVTSTVWKELEKENKEFFETYNKDREERKVEAETMARIEKMLSEAAASKSSDDEG

SEQ ID NO: 14938 - protein, 1350 aa, Zea mays
  VARIANT 276..1350: note = Derived polymorphism lacks residues 276 to 1350
MSSGTVAASDPGGGETKLVAGDDVTISEAAGDMPAFAADLKVEEKATLTMDVAHERGDMAVSDPLYATESAGMVGTEGHGDEPVEDVDAVNGEDGGEEGTQEAGAGGLLTETERKPVLVVDVPAAAGSAAPEHAEAAYCISESNKVEENHVNAEPGRKNNESDHGVVPSDKEIQNNVPGDMEESSEEHEGDGAPVVDQPNNTSEMLPQTGEQFPDSGNSPDSNLEAASLGNVDQGARYRLPPLDKGRFQVADLVWGKVKSHPWWPGEIFDPTDASELALKHRKKGSHLVAYFGDSTFAWCDESQLKPFVTNYSQMEKQSSSDGFVGSVNNALEELSRRVLSGLSCSCLAEELADNGMSYTVDNAGLKDGVTCSAVNRPEILNCFSPENLLNYIKELALFPGQGGDLLELVIACSQLTSFYRSKGCPELASFQTSDAWVEDDLDGIDTLSTQNVMVEEPVINEVQPTQDKPKRGRGRPRKQKAGHDQVVMEKRSTSNQVNDTSYNEKKRNLKSFEDSEKSSAPTGGGSFKIGECIRRAASQLTGSSSIMKAQNEPTVYNNAAEGENGEFDVSSDDAGDELTVEKRAKRRRLHINHAADPRELLSQLCLVATEPMNGYSFSAMIIGYFNDYRNYIVSTTTEANIVDKGTSRRGRKRKEVIPSPEVETTDHMQDSYWSGLSLYNHPVHDLKRESPTTRPRRKRRSSRHAYIPLSELGEPVPKKQIQVMERSIIHVDEKMVDELKPTALVLTFGRSASIPSELDLVKMFSLYGPLKERGTKVHRETNTVKVVFKKRVDAERAFSAAGKYSTFGPSLRSYRLVSMPLSPETQSANNPENHGLEIPGLNMSEAPKDSMEVDLVQKTDKVKVTGELSSEEVETVRQTCLVEAADSTFVSEVDRLEKAGNIDAELIVHVNQIGEGAEAASVSEESSQQVGDIEQAYTQKAASVSDLPTEIETLHSDAIIKELPQKAPDNMQTDIATAPKQSHNPGDNAVFEAVTEVPSTAQDHSEDDVGDEVPEEHTVFPVLQSQTPGEKLVGQSETEQKVGPEDPKSQAENLTVEPVVQGAVEQVEIELESKTTVEVSCEQGYSIEQTVNMEAVIEASGGQLEVGRRISEDESMADANIEHSMVMVDETVEAKVVPLEESTENNAATIGVVEETAEGETKEEAPDEKGKIENNEDADKLAGETRAGEITVEAPDEKTEIKADADTPAGETKECEITVEAPDEKIANKGIVEPIIREITEDQTAAGEPDEEATTTEETVEDVKVLDDKSTADGKPVENATVATNEDSTTVENTLKDAMVAPPGTNTTNAEETALGATVKALDEDALAVEKTIEDTSVEASDVQAGRCK

SEQ ID NO: 14939 - protein, 62 aa, Zea mays
  VARIANT 3: note = Ancestral polymorphism is Y, Derived polymorphism is S
  VARIANT 4: note = Ancestral polymorphism is C, Derived polymorphism is S
  VARIANT 9: note = Ancestral polymorphism is S, Derived polymorphism is I
MEYCYQYNSVSNAEKEKRPPLRRGGVKLQIVKTLSNLVVAPSNGSDSKQADRNSFTRERSYN

SEQ ID NO: 14940 - protein, 492 aa, Zea mays
  VARIANT 129: note = Ancestral polymorphism is Q, Derived polymorphism is L
  VARIANT 48: note = Ancestral polymorphism is S, Derived polymorphism is C
MNSGEGLRRVMASGRVGLGLGLGGERLGAIRNTPDGYFHYLVLIEEYSLVLRVWDVLLFDGNRPDIQKSSKNVCRFIPVIIAGPALVTTKDAGDAVTLLQSLAGSTFDSSQLVLTARMGYQSVNETILQELSNKHRPSVMSAMEERAKGLGVWTDTNGLASKLYNFKRDPEPLVSLSNSADQLSDVGDGDANQESDPVNMDDEYVGVTVKSEIDSLPDPKDQVAWLKLELCQLLEERRSAVLRADELETALMEMVKQDNRRQLSAKVEQFEQEISEFREALSDKQEQEQAMFQVLMRVEQELKIAEEARISAEQDAAAQRYAANVLQEKYEEAMASLAQMENRAVMAETMLEATLQYQSSQQKALSPCPSPRPSMLDASPSQASQNSSQVFQPRRKNLLGPFSLSWRDKNKEKPNNVEDSANTKFTNSDEMVDEKQMETLDLDNEQRAESTKEDGKMRAETPQKDDDLVRVQLTTDHLNGHHEQMQEIKLDW

SEQ ID NO: 14941 - protein, 218 aa, Zea mays
  VARIANT 18: note = Ancestral polymorphism is G, Derived polymorphism is E
  VARIANT 106: note = Ancestral polymorphism is A, Derived polymorphism is V
MPPRKHPSSSKKRKRRKGIEDFIESQKGVMDKFVRTNTKTSSNEDQPNFTIVVVVEQPNINEEYHDPTLEENVDINTNGNDVTGHEPIFDLSYVENGSFDEYGHTAVIISKSKVVVFGGFANKRFLADVSVYDVENKLWYTPECTGNGSNGQAGPSPRAFHIAVVIDCNMFIFGGRSGGKRYVSNAVLIFDRRMVDHCEGSGGVGRHGQTKAGQSHLQ

SEQ ID NO: 14942 - protein, 144 aa, Zea mays
  VARIANT 9: note = Ancestral polymorphism is S, Derived polymorphism is Y
MVRALDRYSSGKDVAYSCGYCGFALNLSSSTRNTANIGSKYGKHIRKGVVSFFAIDESRFTQADEVSCTPYFRSSRSWGFFRNRTRLLCRKCGGHTGHAYEDEGPADDLDMSSRGSSTSPRKKYVIKISALRPSSDDSGALLSP

SEQ ID NO: 14943 - protein, 350 aa, Zea mays
  VARIANT 215: note = Ancestral polymorphism is M, Derived polymorphism is R
  VARIANT 206: note = Ancestral polymorphism is L, Derived polymorphism is P
MARAILAAVVAFFLAAVLLASASVTAAVPSDIPAVFAFGDSTLDPGNNNGLATLVRADHAPYGCGFPGGTATGRFSDGKLITDYIVESLGIKDLLPAYRASGLTVAEASTGVSFASGGSGIDDLTAQTAMVFTFGSQISDFRDLLGKIGMPRAAEIAGRSLYVVSAGTNDVAMNYFILPVRADSFPTIDQYSDYLIGRLQGYLQSLYNLGARNFMVSGLPPVGCLPVTKSLNNLGSGGCVADQNAAAERYNAALQQMLAKLEAASPGAALEYVDVYTPLMDMVTQPRKYGFTEANQGCCGNGLLAMGELCTVELPHCQSPEEYIFFDSVHPTQAAYKALADHVVQRRHTP

SEQ ID NO: 14944 - protein, 398 aa, Zea mays
  VARIANT 152: note = Ancestral polymorphism is T, Derived polymorphism is I
MQVPNSQSHSASMPPMFVARGWANLTINVVIEMVNRLPCAMDRARMTAVCQAWLAAIAHAQPLPFQLPSLLLPPADVTDVYCYLSGGCRDHSMLPGPRHFGSYDGGWIFFAYGQTSVHRMINIRTRERRALPDMIEGLAAHGTPSMVILAATLSFPPDHPKCVAAGIVTYKPHLLEAPRRRHFAFWCLGSKVATCDVAVPAPVGPAWQQEDVVYYRDSFHFLTRGGHIIVCTPIVRDGVLLRVLSELMRFEQGGYNNQQFVRARYLVSSRGELLMVVRLAAHHRALTSSFKVFRMTVITRARTWIEEVALCGRMLFVGRGCSRSYEVSQYPGFKDGIFFLDDRSFYDVEMMFGRINERLYPCSDNGRWSPAEGLSRHVDLFFPERVPSLNSPPAWLLP

SEQ ID NO: 14945 - protein, 406 aa, Zea mays
  VARIANT 40: note = Ancestral polymorphism is A, Derived polymorphism is V
  VARIANT 48: note = Ancestral polymorphism is P, Derived polymorphism is L
MAVPRRWANLDINLVTEIMNRVPCAIDRARMAAVCQAWLAAVEQAEPPTFQLPSLLLPPADVTGVYCYLSGCREHNMLPLPAPRYFGSYDGGWFFLAYGQTRGHRLLNIRTGESRALPDVVDVVVHTAYEVLSMVVLAATLSSPPDHPECAAAGIVTYQPDLNGPHRRDFAFWGPGDDVAVCDVLPAAPVGPEWELEDVVYYQNSFHFLTQGGHILVCGGVYDDNGGIILVALLAALTCLQEGGCNDEQFVHARYLVVSGGELLMVVRLAAHHHAPTSSFKVFRMTTTPTNIIQAGHNGEVANEYTRTWNWIELGELGGRMLFVGRGCSRSYEVRDYPRFKEGIFFLDDRSFYDAEMMFGGVNERKYPCNDIGRWSPPEGPLPSHVELYFPERVPSYNSPPAWLFP

SEQ ID NO: 14946 - protein, 430 aa, Zea mays
  VARIANT 37: note = Ancestral polymorphism is A, Derived polymorphism is T
  VARIANT 350..430: note = Derived polymorphism lacks residues 350 to 430
MAVPRRWANLDIKLVTEIMNRVPCPIDRARMAAVCQAWLAAVAQAEPSTFQLPSLLLPPADVTGVYCYLSGCREHNMLPLPLPLHGPRYFGSYDGGWFFLACYHSCAHRLLNIRTGDCRALPDVLERHADHKVHSMVILAATLSSPPDHQHWIAAAIVTYQPDLNGPHRRHFAFWRAGDKVALDCDVLPAALVGPGWELEDVACYRDSFHFLTKDGHILVCGGAYDDNGEVIQVALLALTCCQIEAECSDEQFVRARYLVVSRGELLMVVRLAAHRHAPTSSFKVFRMYITEADDKIRGLFGSTTKPPRRTTVLPHQVWRPIRPPRHQTSLRTWIELSALGGRMLFVGRGCSRSYEVREYPGFKEGIFFLDDRSFYDAEMTFGGVNERPRYPCNDIGRWSPPEGPLPSHVELYFPERVPSYNSPPAWLLP

SEQ ID NO: 14947 - protein, 227 aa, Zea mays
  VARIANT 188: note = Ancestral polymorphism is K, Derived polymorphism is E
  VARIANT 187: note = Ancestral polymorphism is G, Derived polymorphism is R
  VARIANT 186: note = Ancestral polymorphism is A, Derived polymorphism is T
  VARIANT 181: note = Ancestral polymorphism is H, Derived polymorphism is Y
  VARIANT 141..227: note = Derived polymorphism lacks residues 141 to 227
  VARIANT 108..227: note = Derived polymorphism lacks residues 108 to 227
  VARIANT 102..227: note = Derived polymorphism lacks residues 102 to 227
  VARIANT 101..227: note = Derived polymorphism lacks residues 101 to 227
  VARIANT 67..227: note = Derived polymorphism lacks residues 67 to 227
  VARIANT 66: note = Ancestral polymorphism is R, Derived polymorphism is W
MFLHQQKQTWEQLSRELEAKEDRVAAIVKEAFRNLTTRAKEDQARDQGCREGSRRSPGSSGEYLERQPMVQPHKAIASASPMSHVPVVPRTHRHDDKKGWQQEEEQQRKAVVVGNAGGFVSPAGSSRYLLTGRFAATEEIQEVESAPAVDSKPKREEAGEAADAKSAQAQEQVVVLKVSMHCKACARKVKKHLSKMEGVTSFNIDFCLREDDNFTFYCKLPKLHSFL

SEQ ID NO: 14948 - protein, 140 aa, Zea mays
  VARIANT 39: note = Ancestral polymorphism is L, Derived polymorphism is P
  VARIANT 49: note = Ancestral polymorphism is C, Derived polymorphism is Y
  VARIANT 73: note = Ancestral polymorphism is S, Derived polymorphism is C
  VARIANT 110..140: note = Derived polymorphism lacks residues 110 to 140
MSWNIPAFVAVSVVVTRPRVQVGVLPFTDILVLSSDNDPLLYSGKQCHCRYILPNDLGNGFFSNHELNSDIYSDLKITSIVDAVEGRINVTYSNDLVGCSCTLSLCVLVYSTYYWFITVFVPFVLTTMSFTKSVICWVVF

SEQ ID NO: 14949 - protein, 385 aa, Zea mays
  VARIANT 8: note = Ancestral polymorphism is P, Derived polymorphism is R
  VARIANT 25: note = Ancestral polymorphism is V, Derived polymorphism is A
  VARIANT 33: note = Ancestral polymorphism is R, Derived polymorphism is Q
MAVRPVPPRWANLDIDLVTEIMNRAPCVIDRARMAAVCQAWLEAVARAEPLTFQLPSLLLPPADVTGVYCYLSGFRDHNMFPGPRYFGSYDGGWFFLAYGQTRGHRLFNIRTGESYELPDGLADIFTNDIHSMVVLAATLSFPPHHPGCAAAGIVTYQPDLDAPRQRHFAFWRPGDRMAVCDVVPAVPIEPGLEPEDVVYYRDSFHFLTQGGHILVCSPIFDGEGHIPGALLELMRFQEAWCTDEQFVRARYLVVSRGELLVVVRLAAHHHAPTSSFKVFRVILKSKTCRFEEVALCGRMLFLGRGCSRSYEVSQYPGFKDSIFFLDDRSFYDDAEMMFGGVNERQYPCNDIGRWSPEGLLPSHVEFYFPERVPSYNSPPAWLLP

SEQ ID NO: 14950 - protein, 382 aa, Zea mays
  VARIANT 45: note = Ancestral polymorphism is A, Derived polymorphism is E
MAVPLRWANLNINLVIEIVNRVPCAIDRERMAAVCQAWLAAVVQAKPLTYQLPSLFLPPANVSGVYCYLSGCRDHNMLPGPRYFGSYDGGWFFLAYGQTRGHRLFNIRTGGSHELPDVVADLFTTVGTYSMVVLAATLSLPPDHLACVAAGIVTYQPDLDAPRRRHVAFWRPGDKMAVCNVVPNESVGPGLEPEDVVYYRDSFYFLTQDGHILVSRPYYNRVGDILGALSKLTRFQFQEGGCSDEQFVRARYLVSSRGELLMVVRLAAHHHAPTSSFKVFRMTLYPRTWFEEDALCGRMLFVGRGCSRSYEVSQYPGFKDGIFFLDDRSFYDAEMMFRRVNERQYPCSDIGKWSPDRPSPHVDLYFPERVPSYNSPPAWLLP

SEQ ID NO: 14951 - protein, 335 aa, Zea mays
  VARIANT 25: note = Ancestral polymorphism is P, Derived polymorphism is L
  VARIANT 196..335: note = Derived polymorphism lacks residues 196 to 335
  VARIANT 267..335: note = Derived polymorphism lacks residues 267 to 335
  VARIANT 280..335: note = Derived polymorphism lacks residues 280 to 335
MSVCSHNCPSLSFSNSRLINKLVSPFAVLQLGYNQLTWSIPTQLGHLNKLTILALQFNQLSDAIPASLGDLSALARLDLSSNQLFGSIPSKLAEIPRLATLDLRNNTLSGSVPSCLKKLNEGFLYENNPEFCGAQFDSLKDCPNDDNDDDRTPRKPESTFVKPQQIQKTADLNRNCGTEAARSLRRSLEGLLLPEQSSSWQEQPPSSKQNLAPAGQGAAGPLGGVVAGTRSSPKIEEDLLLHTTADMVAPPRPPPRCAAADSVRGRRPRYSPLTAPDTIWPAGVRRVRPSSRGDPRWDGLRFGLGRGTPEVPCLEAWRRQKSGDGGTEEVTAKAI

SEQ ID NO: 14952 - protein, 407 aa, Zea mays
  VARIANT 37: note = Ancestral polymorphism is A, Derived polymorphism is T
  VARIANT 56: note = Ancestral polymorphism is L, Derived polymorphism is R
  VARIANT 57: note = Ancestral polymorphism is L, Derived polymorphism is F
  VARIANT 282: note = Ancestral polymorphism is S, Derived polymorphism is L
  VARIANT 310..407: note = Derived polymorphism lacks residues 310 to 407
MAVPPRWANLNIDLVTEIMNRVPCAIDRTRMAAVCQAWLAAVARAERLTFQLPSLLFPPADANDVYCYLSGCREHNMLAGPRYFGSYDDGWFFVAYGHTCGHRLLNIRTGDSHALPDILVDHVAHEIHSMVILAAAISCPPEFAPCAAGIVSYQPELDAPRRRHLAFWRQGDEVAVCNVLPGAPVGPGWEPEDVVYYRRNFLFLTQGGHILVCNPLYENDDSGNILLVPWKLMPFPEWSFFRDCMWEYPGSAVVRACYLVESRASLDMVVRLAAHHHAPTSSFKVFYMDPIDIIEPGDDDEEADEYLRTWNWFGENAWGGRMLFVGRGCSKSYEVREYPGLKDGIFFLDDRSFYDAEMMFGRVNERQYPCSDIGRWSPPEGPLPSHVELYFPERVPSYNSPPAWLLH

SEQ ID NO: 14953 - protein, 411 aa, Zea mays
  VARIANT 5: note = Ancestral polymorphism is P, Derived polymorphism is S
  VARIANT 37: note = Ancestral polymorphism is A, Derived polymorphism is S
  VARIANT 40: note = Ancestral polymorphism is A, Derived polymorphism is V
  VARIANT 95: note = Ancestral polymorphism is F, Derived polymorphism is L
  VARIANT 301: note = Ancestral polymorphism is P, Derived polymorphism is L
MAVPPRWANLNIDLVTEIMNRIPCAIDRARMAAVCQAWLAGIARAEDLTFQLPSLFLPPADVTGVYCYLSGCREHSMLPLPGPRYFGSYDGGWFFLAYGQTRGHRLLNIRTGDSHALPDMVLDQAAHETHSMVILAAAISSTPDDLYDAAGIVTYQPDLDAPRRRHFAFWSQGDAVAVCNVLPGAPVAVGAGWEPEDVVYYRRNFLFLTHAGHIVVCTPIYENDDGGNILVVPWKLMPFLERNFRDCVWEWEYPASTVIRACYLVESRGLLHMVVRLAAHHHAPTSWFKVFDMQPFDIIEPDDDNEEADERSWTWYEVEAVLLDRMLFVGRGCSRSYEVSQYPGFKDGIFFLDDQSFYDAEMMFGGVSERQYPCNDIGRWSPPEGLLPSHVEFYFPERVPSHNSPPVWLLP

SEQ ID NO: 14954 - protein, 286 aa, Zea mays
  VARIANT 84: note = Ancestral polymorphism is A, Derived polymorphism is V
  VARIANT 110: note = Ancestral polymorphism is A, Derived polymorphism is E
  VARIANT 135: note = Ancestral polymorphism is G, Derived polymorphism is D
  VARIANT 149: note = Ancestral polymorphism is A, Derived polymorphism is V
  VARIANT 199..286: note = Derived polymorphism lacks residues 199 to 286
  VARIANT 203..286: note = Derived polymorphism lacks residues 203 to 286
MDGHGGGAGKLTRTPSSLLRSPTMRAGPGTASFHALDDPEPDDKKAQAPLGKPRALLRRAHHRFCPGPAQSALLLLLPVLALAALLMRGGDGGHHLALLAAAAGFALAAAAAVARLRGACPPSPALEASVRWFIGEDDDEEQRDWKRRAGLGLGLGLGRRAEVREGVEFYSNGDRYEGEFHGGRCSGSGVYSFFGKGKYEGDWVDGKYDGHDVESWARGSRYRGQYRQGLRHGHGVYRFYSGDGYAGEWAGGQSHGIGAQTCSDGSTYAGEFKGGVKHGLGCYHFR

SEQ ID NO: 14955 - protein, 331 aa, Zea mays
  VARIANT 231: note = Ancestral polymorphism is L, Derived polymorphism is S
MGVLAAAEVEPALERLSRVDARGGNRSGTEGAHADEVLVLDREGDHHGGAGAVQAERLVLGQRLSRVDARGGNRSGTEGAHADEVLVLDREGDHHGGAGAVQAERLVLGQVLKASTEEDGAHVREALQPALHQEGDANPHGRSQRHRTPIMDAISWNLMISGYATAMVSANAKIGDLDSARVLFDQMPDNNFVLWNAMIRGYNHNSRYNEALCTFQQMMLEGRFMPDEATLVSVVSACTQLGSVEYCNWISSYISKSNTHITVALGNALVVCKMWRCRKTAEVPLSLFSCIFTGALCSEHVSSMYIAMDKLTNISHNIVHATVPIVDVEVK

SEQ ID NO: 14956 - protein, 128 aa, Zea mays
  VARIANT 41: note = Ancestral polymorphism is D, Derived polymorphism is H
MRLDLVVDPATQYVKGGINVALGNMSEDDWKWHMADEEVTDPKAHLEDRSKAKCLSQWYEYQENAFAPVFAKIDFIVKLFSPMCSSKGRGLDGPKLLSTACAISNSCILNAANHIRKGEGVVSINGSF

SEQ ID NO: 14957 - protein, 341 aa, Zea mays
  VARIANT 36: note = Ancestral polymorphism is A, Derived polymorphism is P
MAALYALVAVSLLPVLVTAECDCSDDDATGRDKAGALRLKIIAIFFILAGGAAGAAVPALGRRLPALRPGAGPFLAVRAFAGGVILATGLVHILPAAFDALGSPCLAAAGGPWARFPFAGTVAMLAAVATLVVDTVATGYLRRKAAAVGDEPPQLGGDDPEEASGGGRHGHAHGVDDDDDDLVRHRVVSQVLELGVVVHSLIIGMSLGASDFPSTVRPLVPALTFHQLFEGIGLGGCIVQAKFRLRSMVAMAVFFSLTTPIGVAIGIGISSAYDETSQTALVVQGLFEAAAAGILVYMALVDILREDFMSARVQGSAPLQAALSASLLLGAGLMSMLAIWA

SEQ ID NO: 14958 - protein, 1596 aa, Zea mays
  VARIANT 34..1596: note = Derived polymorphism lacks residues 34 to 1596
  VARIANT 1174..1596: note = Derived polymorphism lacks residues 1174 to 1596
  VARIANT 1251..1596: note = Derived polymorphism lacks residues 1251 to 1596
MCSDMDQRDHHATREAAPEANGYHHSPHGVDQSQVVDADKHINHHSTDDNAPSSASGHRHGGISRHASTSSVDDRSIKSGDDSDGAESTNGRSSNTEISFLENDTVWIPPQAADKEDEAQSFATSIAYDDDDDDYSDGIKWGQSSFPSPGKQHDAGTSNHREVREKAMLEAMNGQLKILVSRFLASVGIPSSNEEASDSWLDIVTSLSWEAALLIKPDGSMGKEMDPGSYIKVKCIASGTRRQSEVIKGLVFKKNAAHKHMPTNCHNPRLLLVKGVLGHSDVGLSSFNSMGQEKDLLERAIGKIMEICSPNVVLVEKTVSRNIQELLLKEGVTLIFDLKLNRLQRIARCTGSPIISFSEVLDKPKLKQCDYFHIGKFTEEHNNASEGGKMTSKTLMFLEGFPCPLGCTILLKGANSEELKKVKQVMHFTVFAAYHLILETSFFEDQRVFLNDSTTKETSATATEGTYGVAALSGPIPNFPSHDDSPALRLFHATSNSYADVNKPLISPRNVDKFSAVSSSSSNDLEQGANVRSNNAERLTLPVQGPLRKLFADMLCHQNIYLPVTSLQEANDNRKEVRVESSQETVSNGFHRPKTGESVISIENGESINDAQTQEITQAIMPTGSSVSDKDAESPVMGDNGAHSTTSIIIKEKHADGDQADDALDSHSILILMSSQCTEKQVICEQSHLTRIKYYGSFDVSLGRYLQDILQNQKLSCSSCGEPPESHMYSYTHRNGNLTVLVKRLVPKHYLPGESEGKIWMWTRCSRCDHEHGVSKPTPRVLISAEARNLSFGKFLELSFSSHSAARRLSICGHLVNRDCLRFFGLGSKVAMFRYSPVEIYTTCKPQPTLQFVNPIRQDWFEGQRRNVHAKSMALFSGVARFLQNLKNEHPDAITLAVNCGLTLPVKDFTELEELLIKEKAQFESSLDKATDENGKPFGSVHGVLNINWYYQDLLLKLYIWDRRLYQLFYCKSVQLESCSNYKNPAGTVDGNCDDNFGVDKKIGEITSDEITAALGVSSTMESASNKLDHQSGDTTALLLHKSQEAGHSEFPCNGGSKAEESSIAHGQIKVDGTTETTNDPCFEISNDMEVQANLTVADPIPMEQERCSTPQQFKYPYWDDRERWIWNSFSESQMAYRDDIEIGYLGKFELINNYLPHYLSPLFEQHDDSYSPQFAVGPGSNILCIMEDEISSIIARALAISDERHHLIDLKFENGMDYSKGEYAKAIEKSFSFLSESSFSSSPWSSTDSEASLSSLSSFSSDDFSGYDSSSLLSPMHPEMTVNGKVTLKDKYSVTVVYDNQFFALRKKCCPSELAYITSLSRCKKWNAQGGKSKAYFAKTTDDRFIIKQIKKTEFESFIKFAPDYFKHVYHSLDTGSQTCLAKILGIYQVKQIKHGKEVKIDLMVMENLLFGHNISRIYDLKGATFSRRITDSNDHDTVYLDQNYVEDMGFSPIYIGGRTKHLLQRAIWNDTAFLTSVNVMDYSLLVGVDKEKHELVFGIIDYLRQYTWDKQLETWVKTSLVVPKNVLPTVISPKEYKKRFRKFMAKYFLSVPDTWSPDNPSKPCKSLGQSNRKLAEVQNGDNLSEHPNEVEGCA

SEQ ID NO: 14959 - protein, 479 aa, Zea mays
  VARIANT 368..479: note = Derived polymorphism lacks residues 368 to 479
  VARIANT 243: note = Ancestral polymorphism is E, Derived polymorphism is K
  VARIANT 172..479: note = Derived polymorphism lacks residues 172 to 479
  VARIANT 75: note = Ancestral polymorphism is D, Derived polymorphism is N
  VARIANT 73..479: note = Derived polymorphism lacks residues 73 to 479
  VARIANT 27: note = Ancestral polymorphism is R, Derived polymorphism is C
  VARIANT 26: note = Ancestral polymorphism is A, Derived polymorphism is T
MFLFEGPFGSVLHITDCLSALTPHLARRIDYLFLARCSLRFPATQDSIRQVIDCIWKHPSALVVYLVCDMLGQEDVLVGVSKAFGSKIYVDREKNSDCHQRLAHVTPEILAADDAAPSTRFHVLSFPRLSEQATEILAQARAARQLKPLIIRPSSQWYAYYDPPPPEEASTQQQQQKPVLTEAMCDELGVWHVCLSMHSSREELEQALGILKPKWVVYTMSSCMVVDLSYAVLLTVEAVEKLEEVFSACAPSNDISQALEEGAEATVVDFEYESVEIIGDDELEAKDSANELEFCRHSKPIQVVGLTEAATREQNPVSDESELLNDIKSDGGVEVVDLTEGGKKEHNLGAETEHDRGNREAELGAQEQNLNARARLTVGVCRHKVIADEGTEATEGMVSAAHVPEDGTTVTLGTGRSTDHQYSERASDSSTVVGSSKGLNASLRRLYRSMNVLVSRPLPSLVQLTAASKRPRVSQTAQL

SEQ ID NO: 14960 - protein, 93 aa, Zea mays
  VARIANT 25: note = Ancestral polymorphism is V, Derived polymorphism is D
  VARIANT 36: note = Ancestral polymorphism is R, Derived polymorphism is W
  VARIANT 62..93: note = Derived polymorphism lacks residues 62 to 93
  VARIANT 65..93: note = Derived polymorphism lacks residues 65 to 93
  VARIANT 68..93: note = Derived polymorphism lacks residues 68 to 93
  VARIANT 70: note = Ancestral polymorphism is S, Derived polymorphism is I
MGFIMEFAENLILRLMEDPYKRDQVRREHVYKMKERCERTKAAWSLPLRPYGFWTFDRFNSQLSWDPQISQAAGRWDPYDDLITLHSGSPPSS

SEQ ID NO: 14961 - protein, 277 aa, Zea mays
  VARIANT 38: note = Ancestral polymorphism is A, Derived polymorphism is V
  VARIANT 121: note = Ancestral polymorphism is P, Derived polymorphism is A
  VARIANT 135: note = Ancestral polymorphism is L, Derived polymorphism is P
  VARIANT 164: note = Ancestral polymorphism is L, Derived polymorphism is H
  VARIANT 232: note = Ancestral polymorphism is Y, Derived polymorphism is C
  VARIANT 234: note = Ancestral polymorphism is L, Derived polymorphism is I
MALKITDLGLSRAIIVPVKKYTHEILTLWYRAPEKMLAYEPGKRVSAKKALEHPYFNDVNKEDLRSLLAPDSAATAPPSASPSPRVLHRIRVAASALRALRTLHQPPSRPPAAPVGKDKEPVPGGGRVVLYFTSLRVVRGTYEDCRAVRAILRGLRAAVDERDLSMDPGHLPELAALLPRVALPQVFVGGRHLGGADEVRRLHESGELRRIVAPAPGPAFSGSCARCGGERYLLCGACDGSHKRYSLKGGGGFRACAECNENGLVRCPACCVPVPVA

SEQ ID NO: 14962 - protein, 581 aa, Zea mays
  VARIANT 489: note = Ancestral polymorphism is G, Derived polymorphism is R
  VARIANT 439: note = Ancestral polymorphism is I, Derived polymorphism is N
  VARIANT 436: note = Ancestral polymorphism is G, Derived polymorphism is D
  VARIANT 358..581: note = Derived polymorphism lacks residues 358 to 581
  VARIANT 213: note = Ancestral polymorphism is E, Derived polymorphism is V
MPTSPAAAAAVPATGPRPPVTSMERTVRALDRQISQFVAMDRLIWADSADADAFLEAVDDLIGTVQELDAAGTNRALLDRADELLSRCMARLEDEFRALIERPDDAAPAVPGGFGSDGSDDDDDDFGAGDGYGDEPIPIAKPVTDYDVVIDALSPGSIANVHQIARRMVDAGFGRECAEAYAAARRGFVDESVARLGVRSRTAEEVHASPWEVLEFDIARWIPAFNMMFRILIPSERRLCDRVFDGLAPFGDLAFIAAVRTQALQLISFGDAISSSSRSPERLFRVVDMYEAVRDILPDLDPVFSDPYSAALHAEVSAMCNTLGSSIKGIFMELENLIRRDPARVAAQGGAIHPITRYVMNYLRAACGSRQTLEEVMEGDFGVNRAAPVAVDPDRPTSSLAVHIAWIMDVLQKNLDTKSRIYRDPSLACIFLMNNGKYIIQKVNDSELGVFLGNEWIKQMTTKVRRWSMDYQRTTWGKVTTVLQTGSPGIGGLPAKAMLQKMRMFNTYFEEIYAAQSEWVIADDQLRVDIRAAVEETVMPVYASLIAKLKSSPETGRDLYIKYTPEDVVAHIQHLFEGPAK

SEQ ID NO: 14963 - protein, 754 aa, Zea mays
  VARIANT 220..754: note = Derived polymorphism lacks residues 220 to 754
  VARIANT 239..754: note = Derived polymorphism lacks residues 239 to 754
  VARIANT 290..754: note = Derived polymorphism lacks residues 290 to 754
  VARIANT 295..754: note = Derived polymorphism lacks residues 295 to 754
  VARIANT 297..754: note = Derived polymorphism lacks residues 297 to 754
  VARIANT 328..754: note = Derived polymorphism lacks residues 328 to 754
  VARIANT 356..754: note = Derived polymorphism lacks residues 356 to 754
  VARIANT 398: note = Ancestral polymorphism is S, Derived polymorphism is L
MMAAEPSPSVPSTAAEDMETLALDSSSSSAAATASASDPLLRPPTSPTAAASDDPFVIDDFLDEDDFTAPPPSVAGPPPAVLGDAASPVFPKITVSDPKKHAEPSGGGAAGVIPGSGSYFSYLITTRFAGGGGEVRVRRRFRDVVALADGLAAAHRGLFVPARPDKSVLEGQVLQRHNFVSQRCAALQRYLCRLAAHPIVGQSPGLRTFLTEPGAIPAFQSEAPRYWTTTVNAAAPMVQMKAGRDLFGMFKGLKQTMVNGMVATKPPPVEQETDTEFLAHKARFEDLQQQLTTTSQQAEALVKAQDGYRETTGHLGMTLIKLAKFEREQATCNSLRRRSGEIHNFANSVLKMSRSQIKLNSEIVKHLGSIHEYLEMMISVHHAFTDRSNALHYVQILSADLFSLHIRARRLESSSARDMGHEWSTYQKVEGLKETIRSAEAAKSDAVREYESIKENNKIEIKRFDKERRHDFIEMLKGFVITQVSYSDHFANMWTKAGYRHVDTAAQYGVEKEPSQRPKQQVVTVCRKTSCVDQVGRGLKAAMEGGINRKDLFVTSKLWLKDGAHMPPEAGEVLEFDMEGVWREMEGLVKDGLVKDIGVCNYTVAKLNRLMRSANVPPAVCQMEMHPGWKNDRIFEACKKHGIHVTAYSPLGSSEKNLAHDPLVEKVANKLDKTPGQVLLRWALQRGTSVIPKSTRDERIKENIQVFGWEIPEEDFRALCGIKDEKRVLTGEELFVNKTHGPYKSATEVWDHED

SEQ ID NO: 14964 - protein, 176 aa, Zea mays
  VARIANT 69: note = Ancestral polymorphism is P, Derived polymorphism is A
  VARIANT 104: note = Ancestral polymorphism is S, Derived polymorphism is N
  VARIANT 107: note = Ancestral polymorphism is S, Derived polymorphism is C
  VARIANT 110: note = Ancestral polymorphism is K, Derived polymorphism is N
MGNSLRCCLACMLPCGALDVVRVVHLSGRVDELGCPLTAADVLAAHPSHALTDAWSAAGAARKVVVLAPDSELKRGRIYFLVPSSACSTPAAAAADERTKKRRSRASSRKKHGHRKGGGASVAPSLMSAAEQDNYLRELLSEKREASLVSHRRRRSGARPGVWRPRLESIAEEPSE

SEQ ID NO: 14965 - protein, 609 aa, Zea mays
  VARIANT 413..609: note = Derived polymorphism lacks residues 413 to 609
MYPVVTGTPPARLPAASRVDKATSHLLQGPDWAVNLEICDTLNADRWQTKDVVKAVKKRLQHKDPKVKFFTLTLLETMMKNCGEYVHFEVVDQHVLQEIVKIVQKRHDMQVRDKALLLLDSWQEAFGGPGGKYPQYYWSYIELKRAGVMFPQRPVDAPPIFTPPATHQAYGSPRYPSGSLNERITSEAGTLSFEGLNNIRNATELLYDMVNALNPADRMAVKDEIIADLVNQCRSNQQKLMQFVSSTGDEDLLKQGLELNDRLQSVLTRHDAIASGSPLPVETPIREPQREDPNPEPSTPITHDNKAQVEEDEDDEFAQIARRKNKSVICGDEASSSAGDQALVPVDPALSEVSSVESNAIVPLGATSVSGTRTKEQDMIDLLSLTLYSPESSEDSSTQNQNGSQPSVTSNGSETLPSYQPAVANGANYPANTQVYPTNQGYVPYNNYVAPWAQTGPVAQPGAYSTQTQQYVSSNPAPPWAMPASANSANPFQPVTYQTPNTPPAASVAPSAAPSAQHVPSPEPTPVQSYNFSIPQTYTGSNVATNARVNGNQRPKETPVAAARPYYMPDNLFGDLIDVKSFGAGSKISRSTSMPSPKGGGQPMIGRNK

SEQ ID NO: 14966 - protein, 314 aa, Zea mays
  VARIANT 31: note = Ancestral polymorphism is E, Derived polymorphism is K
  VARIANT 35..314: note = Derived polymorphism lacks residues 35 to 314
  VARIANT 104: note = Ancestral polymorphism is N, Derived polymorphism is Y
  VARIANT 126: note = Ancestral polymorphism is G, Derived polymorphism is C
MAKRLLPSLNRVLVEKLVQPKKTAGGILLPETSKQLNAAKVVAVGPGERDKAGNLIPVALKEGDTVLLPEYGGSEVKLAADKDCNCTSKCSAFTTKRKDAGAANDNSWILLPYLCAAFMVSNIWNGAVYDVNIGGLSNNLHCLARCVSAVIEGSEYTRVEREQRINSLSNVHTDELQEAELPSRVSAEANIKSSMQIYVKLSAGVVLDSWNDTSRYLVHCIFRIRVWQRFPTTPRSHTFEPGYYSSSGSQHDDGYDADRRAGRLLRSMRRSGPLDFGASRKAKKFVEGSSSGSSHGAGSLQRFAVSRSGPLSYK

SEQ ID NO: 14967 - protein, 145 aa, Zea mays
  VARIANT 113..145: note = Derived polymorphism lacks residues 113 to 145
  VARIANT 73: note = Ancestral polymorphism is N, Derived polymorphism is S
  VARIANT 69..145: note = Derived polymorphism lacks residues 69 to 145
  VARIANT 60: note = Ancestral polymorphism is R, Derived polymorphism is C
  VARIANT 59: note = Ancestral polymorphism is R, Derived polymorphism is C
MPVRAVVQVLFSEHGKLNRLAELSASFSGQRSPSPNPALELPGRCPSKCEVLAQHQEVRRLHDDVARLQVQCNALQAQVDRLGSERRRRGGGGFFKWSVFWFGGGMGADVGRRLGERHGAPDAAQGEEERHGDAQCQVVQVHVLR

SEQ ID NO: 14968 - protein, 530 aa, Zea mays
  VARIANT 93..530: note = Derived polymorphism lacks residues 93 to 530
  VARIANT 409..530: note = Derived polymorphism lacks residues 409 to 530
MYPVVTGTPPARLPAASRVDKATSHLLQGPDWAVNLEICDTLNADRWQTKDIVKAVKKRLQHKDPKVKFFTLTLLETMMKNCGEYVHFEVVDQHILQEIVKIVQKRRAGVMFPQRPVDAPPIFTPPATHQAYGSPRYPSGSLNERITSDAGTLSFEGLNNIRNATELLYDMVNALNPADRMTVKDEIIADLVNQCRSNQQKLMQFVSSTGDEDLLKQGLELNDRLQSVLTRHDAIASGSPLPVETPIREPQREDPNPEPSTPITHDNKAQVEEDEDDEFAQIARRTKEQDMIDLLSLTLYSPESSADSSTQNQNGSQPSVTSNGPETLPSYQPAVANGANYPANTQVYPTNQGYVPYNNYVAPWAQTGPVAQPGAYSTQPQQYVSSNPAPPWAMPASANSANPFQPVTYQTPNTPAASVAPSAAYPTMSTPYAAPSAQHVPSPAPTPVQSYNFSIPQTYTGSNVATNARVKGNQRPKESPVAAARPYYMPDNLFGDLIDVKSFGAGSKISRSTSMPSPKGGGQPMIGRNK

SEQ ID NO: 14969 - protein, 469 aa, Zea mays
  VARIANT 231..469: note = Derived polymorphism lacks residues 231 to 469
MQRLASSRRLLQAALAAAAVAAPAPANGAFPKMPAFDYTPPPYNGPRAEIFRKRAQFLSPSLFHFYDRPLDIVEGKMQYLFDEDGRRYLDAFGGIATVCCGHCHPDVVEAIVNQAKRIQHSTVLYLNHAIADFAEALASKMPGDLKVVFFTNSGTEANELALMIARLYTGCNDIISLRNGYHGNAAGTMGATAQSNWKFKVVQMGVHHALNPDPFRGAFGSDGEKYARDVQEIIEFGTTGRVGGFISEAIQGVGGIVELAPGYLPVAYSMVRKAGGLCIADEVQAGVARTGSHFWGFEGHGVIPDIVTMAKGIGNGIPIGAVVTTPEIAQVLTRKSYFNRSTFDGNPVSTAGGHAVLKVLEKEKLQENAFVVGSYLKEQLNNLKDKHEIIGDVRGKGFLLGVELVTDREKKTPAKAEISRVMNHMKDMGVLVGKGGFYGNVFRITPPLCFTKEDSDFFIEVMDIALSKL

SEQ ID NO: 14970 - protein, 409 aa, Zea mays
  VARIANT 258: note = Ancestral polymorphism is A, Derived polymorphism is T
  VARIANT 260..409: note = Derived polymorphism lacks residues 260 to 409
  VARIANT 289: note = Ancestral polymorphism is S, Derived polymorphism is W
  VARIANT 304..409: note = Derived polymorphism lacks residues 304 to 409
  VARIANT 318: note = Ancestral polymorphism is P, Derived polymorphism is L
  VARIANT 334: note = Ancestral polymorphism is A, Derived polymorphism is V
  VARIANT 354..409: note = Derived polymorphism lacks residues 354 to 409
  VARIANT 371..409: note = Derived polymorphism lacks residues 371 to 409
MQPRRLLNDHMSSCLKRPTKFTHTMVAHQTSAHIVAPFSGFRNGSKACLLLRSVGLCTIFVAEEMGDILIPSLMVGDCSHSLCVRVSRLREFLDPQDDSRLLHTDLVLLDEEGNSIHAQIYPPLCQQFSALLDEGGVYNLKYFLVRKANRFYKPVENCSMISFTKWTTVEVVLQIPLAFPVCTYNLTPIEQLQPRMDYKEYFTDVLGVVSVISHVSSLRTRGRQAKVMKRTVTISNARDTGPTVDVVLWGEWATAFPTEQVHRDSGSSPHIIIFVGTLVRSYADNVSLSGGSSCMWYINAPVPEVNALRASTEPNHRPIIWDQRKVAVESTIVAVPEHKKLKDIKYLHPFENKKKEWLVIVKVLKINRSWWYTACKKCLRTTKPHSDTYKCTNNSCDSIGSPTPRLNTL

SEQ ID NO: 14971 - protein, 231 aa, Zea mays
  VARIANT 212: note = Ancestral polymorphism is M, Derived polymorphism is I
  VARIANT 78: note = Ancestral polymorphism is R, Derived polymorphism is L
  VARIANT 27: note = Ancestral polymorphism is R, Derived polymorphism is L
  VARIANT 23: note = Ancestral polymorphism is Q, Derived polymorphism is K
MPPAPSPGAHGASGAATPPSKPQSPLRITHDGEFYARLLTRESSLGNPSFRYYGAGTGAVPFVWESQPGTPKDAYSCRMLATAAAGVGPVITPPPSYYLHGVPLGRANRRHGKTTGGYKYKQLKWVKLSFIATVFRRLAFGNKSRPSSAAAAAVKSSSSSSSSSSSARWLFSGSSAAEARDQECCGYDDPAAAEPRTKGAVLCLGIRATPWMVQFCGGQREQAGWVYGWRP

SEQ ID NO: 14972 - protein, 317 aa, Zea mays
  VARIANT 160: note = Ancestral polymorphism is N, Derived polymorphism is Y
  VARIANT 42: note = Ancestral polymorphism is P, Derived polymorphism is S
  VARIANT 18: note = Ancestral polymorphism is R, Derived polymorphism is C
MRKRTGEGSFVFDPRKTRECMVKWCISAEVAFNKFDDPFFASWMESLQPSFRGVGRQTMRNDCIARFKMMRQELRNELQSINSRICLTSDLWTSNQKLGYLCLTAHYIDANFILKKKTIAFKDVKYPHTGLAVEEVITKCLIEWGIKEKVFTITLDNASNNQSACDLLRESGRSDMLFGGEHLHIRCCAHILNLLVQDGMAIAHGAIDKIRDLVRHIISSPSRIQAFNEIAERSGLPSKAGLILDVPNRWNSTHNMIMEAIEYKVVLKRYAEEQLEPSPDDEEWTNSEAIGEFLGAFEEATKAFSAHRIYPVVFGPS

SEQ ID NO: 14973 - protein, 670 aa, Zea mays
  VARIANT 415: note = Ancestral polymorphism is L, Derived polymorphism is P
  VARIANT 434: note = Ancestral polymorphism is L, Derived polymorphism is I
MMSDAWPSSPYSSSAPDGEVLRSLHRLARDLSAAEAPAPFLRPVFAAVARRARLLAAVFDDLLLCGAAAGPLLLLLLPRSASLCLRELLLVLQRFKALVADCATRSRTRLLLQSDEVAARARELQHDLATLIDLLPAAELGLADDVSDLLALASRQCRRAAAPELELKAGVLALIQEVEREIVPERERLEGILEDVGINDPASCSDEIETLEREIGDRVAERWTSSMIALVGLLRYAKCVLFSAATPRPVDSKVDLDDAEPPSPPPDFRCPISLELMGDPVVASSGQTYDRDSITRWFGSGKSTCPKTGQVLLNLELVPNKALKNLISRWCRENGIPMESSESGKAEPAPAVGANKAALKAARMTASFLVKKLSASFSPEATKRVVQEIRQLAKSGSDNRAFIGEAGAAGLLVPLLLSEDSALQLNAVTALLNLSILEANKKRIMHAEGAVDALCHVMGTGATWRAKENAAATVLSLAAVHAYRRRLGRNPRVVESVVRLARTGPSSTKKDALAALLCLSAERENVPRIVEAGAAEAALAAVGEAEAEAAAAVLASLAKRGGAEAIVALDGAVARLVNEMRRGTEWSRECAAAALVLLCRRAGAAAASQVVAVQGVEWAIWELLGTGTERARRKAASLGRACRRWAAAANAEQSTECPAAADAPALTSAA

SEQ ID NO: 14974 - protein, 241 aa, Zea mays
  VARIANT 90: note = Ancestral polymorphism is S, Derived polymorphism is R
  VARIANT 107..241: note = Derived polymorphism lacks residues 107 to 241
  VARIANT 133..241: note = Derived polymorphism lacks residues 133 to 241
  VARIANT 134: note = Ancestral polymorphism is V, Derived polymorphism is I
  VARIANT 146: note = Ancestral polymorphism is A, Derived polymorphism is T
  VARIANT 164: note = Ancestral polymorphism is D, Derived polymorphism is G
MSFSSSSSAGSKPGLITLSSSSDDEQEAGSGKQRAPSAGSKPGLITLSSSSDDEQKAGSGKQRAPSAGSKPDVNIDPVFGSSSDDKKEASCWKRSSSFGSKSGPVVLTSSDDDDDAELLAKCRKRRPPRNVAWIFYDEVKILTALAAERQESGRLPGSPSALLDAIRRRVDLKRENPTAVDVAKKVHNLMDRFKKVIASGGPSAEVRDRELYDLSSEVWPELLPPVVHISSPSSPSDGTCH

SEQ ID NO: 14975 - protein, 167 aa, Zea mays
  VARIANT 94: note = Ancestral polymorphism is R, Derived polymorphism is S
  VARIANT 88: note = Ancestral polymorphism is R, Derived polymorphism is C
  VARIANT 85: note = Ancestral polymorphism is D, Derived polymorphism is H
MDMDEQGKLPAGGAAVVAVDVVMSRFSLDVSAGCGGRHSTLLDEYERLAFEAQLNRAIVLRRCYSEPSPVRYAEAEHQRPPAGADDARAPPPPRGAPDLQGGAARRDGGGGGDGDGGCRFWRLHEVLARWIEALRPVLRWLRSPWECRRRKQPPPPPPRVQLMDYLR

SEQ ID NO: 14976 - protein, 367 aa, Zea mays
  VARIANT 247..367: note = Derived polymorphism lacks residues 247 to 367
MGTCGLAAVVALLLASALLPGPDSASARSLLEGENPSSGEVRPLVRVWIQRRLFGSPQDAPAPAVSGQSSAAGQQTENKRHQESLPPVTSPPPPPPTQETNSQKAASPPPGPNVGTGQEDTGSQGRREETDKLKEAMEKCDASHKCSSGNEFSACLQVPDNALVGPYIIVHNEGQHDMDIDVKEPSSNTNNDKKPLHLVKGAFGQMNITYTASDGGNVTLSDGKNVDCIIHVGGTVERQSVSDLQKQFQQVAAYAMHLNPIYGASFFVFAVVLVSVVCVCCKFAKRRGNDGLPYQQLEMGGQAPNSSGVDITATTTDGWEHDWDDDWDDEAAAGPVDKKPTSSVSANGLPLRSQTNSKDGWNVDWDD

SEQ ID NO: 14977 - protein, 389 aa, Zea mays
  VARIANT 119: note = Ancestral polymorphism is P, Derived polymorphism is L
MRFGRCPYCRTMVYQNPQAVVFFCSKCRTPIRGKNPSSTEGIDQALSRLEILSVDNASVFSDELDACQDIVAPPRSSSPAPHGGFGSMWRGHPATNGAPASAGCDDSVVDSDEQDRIRLFSRRTRRTSGSDSSVLRYGMLMAADSETEEGFSSPRNACERQRHRRRRSLLGSQAFETSTGHDPYGVAPSLLRDPSFHNELVNALDNLRGLVAAIEPSSSSSGRRASAPPDARLFRRLESQLARALHVDGRGGHRRNASSAVSSSSSCSYRSERRKNHCRPVLGGAPFLVCGSCSELLQAPAATGLPRGKVVRLRCGGCEEVIEMTEVPAGVGGSAPHKKTWALSPPPVLDPSSCNSGAVGDGAQHLPPQPLHRALGYSSPSPLLQSRRY

SEQ ID NO: 14978 - protein, 238 aa, Zea mays
  VARIANT 134: note = Ancestral polymorphism is F, Derived polymorphism is S
MRQSKLRAVSARPWLLLLCLALAATAGVMQARAQPNSIGNLMGRAGDRARFISIDCGFPGTTSYVDDATTLPYAPDAAFTDAGENHNVSSEHVTPELPRIYRDVRSFVDGARNCYTLPSTLAVGLNKYLFRAAFMYGNYDGLNRPPVFDLYIGVNLWKTVNLSSSDPAAPVIAEAIVVVPDDFVQVCLVNTGTGTPFISGLELRPLKNSIYPQVNATQGLVLQSRRNFGPTDMTDIIR

SEQ ID NO: 14979 - protein, 1225 aa, Zea mays
  VARIANT 371..1225: note = Derived polymorphism lacks residues 371 to 1225
MIIDAIDWLVLSTTEKVRNIYDDLFEVPSKVMQTAITPRDATSSINFYWNSKGSSLGYIPVFHFSEVLQAGAGVVRQFNININGKRFTSHDYYTPRHLESGYVYGTRPYTNQIRYNVSIVKTDTSTLPPIINADEIFIVISTTNVGTDSEDGTWDGLTCSYAISDPPKITALNMSFSGLTGDISSAFANLKAVQSFYADNPDLCTNAGDSCQTAPQGKSKLVIYYVAVPMALIVVALAVLLCCLLRRRKTRGLADVSVKPRDKTPTSLASMAADEHRLSSLRLENRRFTYEDLEMITDSFKRVIGRGGFGYVYEGFLEDGTQVAVKMRSQSSNQGAKEFLTEAQILTRIHHKNLVSMVGYCKDGVYMALVYEYMSEGSLQEHIAGKRLTWGQRLRIALESAQGLEYLHRGCNPPLIHRDVKTSNILLNAKLEAKVADFGMSKALDRDTYASTNTLVGTPGYVDPEYLETMQPSTKSDVYSFGVVLLELVTGRPPILHSPQPTSVIQWARQHLARGDIEVVVDASMGGNHDVNSVWKAAEVALQCTEQASAQRPTMGDVVAQLLECLDLEKGRSANESFCDGDDSGSATASLSHSSAFVTGRIFGTVPMVETGPATRRALVCVSLSPLSPLPRARLPSAPPWDESAFLAMAASHLPPAATLVKKYPTLLHPFGAKPHAQRLIFRCRATSSEGADDGWASFVDELKRSLQVDPSDAVISNAGAGLTSNNDLVTALPLEPSAGPAAGDATTAAAGAVSELLGVDASGAVATPDRLLSSLLHLDASNPVASVAGGALSRLDALTSGLSDAQRWALFGFLAATWLYLTARPGVLSGAVDMYVLAPLQLALDSVLGRRSLKMSDFVVGERIGEGSFGVVYAGAVVPKNGAVVEERSGKAKTSLQNDDRYKEKVILKKIKVMTVGAKECGDYEEWFNYRVSRAAPESCADFLGSFVADKNKAEFVKGGKWLVWKFEGDRTLANYLSERGFPSNLERLMFGRVLQGLGPLEREALVVKQVMRQLITSLKRIHATGIVHRDIKPSNLVVTRRGQVKLIDFGAATDLRIGKNYVPDRALLDPDYCPPELYVLPEETPEPPPEPIAAILSPILWQQQPSLQLNSPDLFDMYSAGIVLMQMAIPTLRTQSGLKNFNAELRSAGYDLNRWRQSARRRPDLQILDLDSGRGWDLATKLISERGANGGGRLSAAAALRHPYFLLGGDQAAAVLSKFSLSK

SEQ ID NO: 14980 - protein, 634 aa, Zea mays
  VARIANT 439..634: note = Derived polymorphism lacks residues 439 to 634
  VARIANT 384..634: note = Derived polymorphism lacks residues 384 to 634
  VARIANT 249..634: note = Derived polymorphism lacks residues 249 to 634
  VARIANT 207..634: note = Derived polymorphism lacks residues 207 to 634
  VARIANT 172..634: note = Derived polymorphism lacks residues 172 to 634
  VARIANT 2: note = Ancestral polymorphism is W, Derived polymorphism is R
MWHLKLIALIYGSLFFMHIPYARGSDLNTDKQALLAFAASLPHGRKVNWTSTTQVCTSWVGITCTPDMKRVREVRLPAIGLFGPIPSGTLSKLDALEVLSLRSNRLTINLPPDVPSIPSLRSLYLQHNNLSGIIPSSLSSSLTFLDLSYNSFNGEIPSKVQDITELTALLLQNNSLSGPIPDLRLPKLRHLDLSNNNLSGPIPPSLQKFPATSFLGNAFLCGFPLEPCPGTPPASPSSPSSQNAKRSFWKKLSLGIIIAIVAGGGVVFILILILLVCIFKRKKNAESGIGSSSSKGKAIAGKRGEKSKGEYSSSGIQEAERNKLFFFEGSSYNFDLEDLLRASAEVLGKGSYGTTYKAVLEDGTTVVVKRLKEVVAGKREFEQQMELIGKVCHHQNTAPLRAYYYSKDEKLLVYDYVPLGSLCAALHGNKAAGRTPLDWETRVKIALGTARGMAYLHSVGSGGKFIHGNIKSSNILLSQELGACVTEFGLAQLMSTPHVHPRLVGYRSPEVLETRKPTQKSDVYSFGVLLLEMLTGKAPLRSPGRDDSIEHLPRWVQSVVREEWTSEVFDVDLLRHPNLEDEMVQMLHVAMACVAVVPDERPRMEEVVGRIEEIRSSYSDTKTSPEDNPREGAF

SEQ ID NO: 14981 - protein, 119 aa, Zea mays
  VARIANT 37: note = Ancestral polymorphism is Q, Derived polymorphism is L
  VARIANT 32: note = Ancestral polymorphism is A, Derived polymorphism is G
MGGSHDVNGVWKAAEIALQCTEQASAQRPTMADVVALLLECLDLEKGAEGRAGAAAAWGNNAAHGSFCYDDGDSGATASLAHSAHVVAKNQSTDDGSQSSAFEMEHVRFGMMATGPATR

SEQ ID NO: 14982 - protein, 267 aa, Zea mays
  VARIANT 15: note = Ancestral polymorphism is G, Derived polymorphism is V
  VARIANT 156: note = Ancestral polymorphism is A, Derived polymorphism is D
MPPAFAAAPSSSICGVRIPTVRRFEAQSTVSTPRFMRNRVAGKAPLPALQCTTLSELPTCCIHAFGFQSYGQKNGNAFVFSLLKNNSSTETVEPPPAPLEVEEPLPVEIVLLERTLPDGSTEQILFSSAGDVDVYDLQALCNKVGWPRRPLSKIAASLRNSYLVATLYSIIRSSETEGEEKKQLIGMARATSDHAFNATIWDVLVDPSYQGQGLGKALMEKVIRTLLQRDINNITLFADNKVIDFYKNLGFEVDPQGIKGMFWYPRF

SEQ ID NO: 14983 - protein, 272 aa, Zea mays
  VARIANT 223: note = Ancestral polymorphism is K, Derived polymorphism is E
  VARIANT 196: note = Ancestral polymorphism is L, Derived polymorphism is F
  VARIANT 171: note = Ancestral polymorphism is E, Derived polymorphism is V
MAPTIPADAITISSSLSEQPVSNTLVIVSSSGSDQPVSNTLVDLSSATFSSRSVAILPDPCASRGGGDQARDAPRNRRPHSTAPSVVPVLSSTVVTAASFADGSGAEATSRRRPTAAARQQCPSPRSVLSVRAPGGVAPAPAPPSSGGGDDEATSRPKRKARYRKWGIDDERKVLATLAELRRDNMGVLPQISVLLKKLCANGGLVRRGVDAIELSDKVYKLKKKYVKAAAKFAASGGRRIRKYRNQELYEISMEVWPELMRGENQDVRVGH

SEQ ID NO: 14984 - protein, 161 aa, Zea mays
  VARIANT 131: note = Ancestral polymorphism is F, Derived polymorphism is S
  VARIANT 108: note = Ancestral polymorphism is R, Derived polymorphism is C
  VARIANT 100..161: note = Derived polymorphism lacks residues 100 to 161
  VARIANT 62: note = Ancestral polymorphism is R, Derived polymorphism is C
  VARIANT 60: note = Ancestral polymorphism is G, Derived polymorphism is R
  VARIANT 59: note = Ancestral polymorphism is L, Derived polymorphism is I
  VARIANT 48: note = Ancestral polymorphism is E, Derived polymorphism is G
  VARIANT 46: note = Ancestral polymorphism is Q, Derived polymorphism is L
  VARIANT 32: note = Ancestral polymorphism is I, Derived polymorphism is S
  VARIANT 31..161: note = Derived polymorphism lacks residues 31 to 161
  VARIANT 16: note = Ancestral polymorphism is E, Derived polymorphism is Q
  VARIANT 7: note = Ancestral polymorphism is V, Derived polymorphism is L
  VARIANT 2..161: note = Derived polymorphism lacks residues 2 to 161
MQTIATVCMFLAGKVEETPRPLKDVILLSYEIIHKKDPAAVQRIKLKEVYEQQKELILLGERVVLVTLGFDLNVNHPYKPLVEAIKIFKVAQNALAQVAWNFVNDGLRTSLCLQFKPHHIAGGAIFLAAKFLKVKLPSDGEKVWWQEFDVTPWQLEGWSLD

SEQ ID NO: 14985 - protein, 154 aa, Zea mays
  VARIANT 25: note = Ancestral polymorphism is H, Derived polymorphism is P
  VARIANT 13: note = Ancestral polymorphism is T, Derived polymorphism is I
  VARIANT 11..154: note = Derived polymorphism lacks residues 11 to 154
MAAVELRDFACKTVKRSASLFLKSHRETRTAGAPVIKKNARSLHFSRTSLHSGDARASKVSSRDAAAKEGDGKRPCSDELANQKTTKTYEPAKKRGVGQPPKSEQRIVGAQENSPIKGRKSSAGAQVDSPSKGRKRSAEAHDDSSSKGGKRSQR

SEQ ID NO: 14986 - protein, 100 aa, Zea mays
  VARIANT 6: note = Ancestral polymorphism is S, Derived polymorphism is N
  VARIANT 19: note = Ancestral polymorphism is I, Derived polymorphism is T
  VARIANT 26: note = Ancestral polymorphism is S, Derived polymorphism is C
  VARIANT 28: note = Ancestral polymorphism is A, Derived polymorphism is T
  VARIANT 36: note = Ancestral polymorphism is P, Derived polymorphism is L
  VARIANT 38: note = Ancestral polymorphism is E, Derived polymorphism is K
  VARIANT 45: note = Ancestral polymorphism is E, Derived polymorphism is K
  VARIANT 48: note = Ancestral polymorphism is R, Derived polymorphism is M
  VARIANT 63: note = Ancestral polymorphism is V, Derived polymorphism is I
  VARIANT 67: note = Ancestral polymorphism is E, Derived polymorphism is G
MVAGTSNVVSLKLMGGALIGRCYESCAAAVDSTDPPAEKHEYQAEVNRLMDLIVHSLYSNKEVFLRELVRCVVTGSVALLGLWKNMKICWGQLGMTLVKP

SEQ ID NO: 14987 - protein, 218 aa, Zea mays
  VARIANT 7..218: note = Derived polymorphism lacks residues 7 to 218
MERYKKQVVKCSEECEPRYNGLKKKYTDECAERRRLYNELIELRGNIRVFCRCRPLSSDEVNHGCLSVVEIDPSHETELQFVPSEKERKPFKFDHVSGPEDDQGSRGEGGILRNSEGPLKDHIYLHQNHLPPEVLKERLPGISETAAIFAGVDVTKEPIPVLPTVHYNMGGIPTNYHKEVVDIKGDNPDAVIPGLMAAGEAACAAPRWWMIDRPVVCD

SEQ ID NO: 14988 - protein, 359 aa, Zea mays
  VARIANT 302..359: note = Derived polymorphism lacks residues 302 to 359
MAAKASRAAASGAAYEEQRKKRVLENLKHLEDLGIAEMSKSLLQAARLQKLNKAGVRAGPKERKKFDATEVRRSSRAKTTVSYKDDLELWRQTLEAKGFRLSRSKTEYMKCDFSAMGYEDDDVSLDGQVVPKKHTFRYLGSMLQKEGDINEDVSHRIKAGWLKWRQAFGELDAFLRGTRRSGGRNTEHGREYTGRIPSYEQQQRAFRKAEKLQDSLDPNNPSFVKTMVRSHVSSCFWLGLPISFCKNNLPSKEFRMVLEDEEGLEFDAVYIGNRTGLSGGWRGFAMHHNLEEGDSLVFELAEHDKFKIYIIKAIDDDVKEAEPDDKNDNGVTKEEPDQEESPVAEPPKGAKRRKLRGRR

SEQ ID NO: 14989 - protein, 121 aa, Zea mays
  VARIANT 104: note = Ancestral polymorphism is A, Derived polymorphism is T
  VARIANT 19..121: note = Derived polymorphism lacks residues 19 to 121
MKAIQESLEDISYLLRIPQRKPYGSMEGDVKKSMKIAMDNKEAILASIPEEHKEEGAKLYTSLLEEKTGLQTLLKYIKENNPDKLSIALASSLDTVAELELLQAPGLSFLLPQQYIEYPRT

SEQ ID NO: 14990 - protein, 363 aa, Zea mays
  VARIANT 144: note = Ancestral polymorphism is L, Derived polymorphism is P
  VARIANT 139: note = Ancestral polymorphism is R, Derived polymorphism is S
  VARIANT 58: note = Ancestral polymorphism is L, Derived polymorphism is V
MDGLHGTDACFSPARAISPQVRPPGPPDVGSQYLAELLQEHQKLGPFMQVLPICSRLLNQEIVRVSNIRRQHGVAGDFERFPAASPNQMHPAPPMTNFCGNGFSPWNGMHSEVIALVAYKYIAVNLQLAYLFTRQHGLRYCLRLVRLCFFFLVNATVLPVSFDDNIALLSSYILYTTSKEVNHLNTNAIGQRVGVPQGAMGWQGPPQSPSSYIVKKILRLEVPTEAYPNFNFIGRLLGPRGNSLKRIEASTGCRVFIRGKGSIKDSGKEEQLKGRPGYEHLSEPLHILIEAELPANVIDARLAKAQEILEELLKPVDESQDYYKRQQLRELAMLNSPLREESPHPGGAPPSPFSNGGMKRVKQ

SEQ ID NO: 14991 - protein, 140 aa, Zea mays
  VARIANT 46: note = Ancestral polymorphism is R, Derived polymorphism is G
  VARIANT 56: note = Ancestral polymorphism is N, Derived polymorphism is K
MSHAHNHHRYADVDATIPKVAITDVSDSLRIEKEEIRIEEFIESQRAAMDRFLTSNQRTSTNTNELAIVVVEEQPNINLGHQGITPNENVDINMDDNNVSGHEPIFSSSPTKNANVDEQSNFTEDNYDPRNILITSQGAY

SEQ ID NO: 14992 - protein, 64 aa, Zea mays
  VARIANT 10: note = Ancestral polymorphism is V, Derived polymorphism is I
MARLHWLEAVLPLGIIGGMLCIMGNAQYFIHKAAHGRPKHIGNDMWDVAMERRDKKLVEQSSGN

SEQ ID NO: 14993 - protein, 377 aa, Zea mays
  VARIANT 69: note = Ancestral polymorphism is C, Derived polymorphism is Y
MWRLSSAAALLRRSLAATARLSVPRYLMRALLVVQPTARTNSPMAVRCLQQCGSDNTDDDRVIQAFKRCCSTSASSGVSDASPCAAYVENLCRSGNLVDAVRVLRHLHDEQIHVGLHTFNMLLQHTAEANIFTLFAKVFRYLLLSELTPDSTSYMNVALALQKLDDCEMILKFVREILEITHSRDATVMNRIIFATAKYGHIDKSLVIFEELKKYETSLDVVTFNTVLDMLGKAGRVDQMLGEVKLMEKLRHFPDIVTYNTLINCMRRLGRLDLCKRFALEMVERGITPDLRTYTALIDSFGRSGHITEALEMFHEMKKSHQPSVYVYRALTSNLKKAGHFELAQKLTEDMNSSASELIGPEDFKPNNKGIRFRKNG

SEQ ID NO: 14994 - protein, 528 aa, Zea mays
  VARIANT 145..528: note = Derived polymorphism lacks residues 145 to 528
  VARIANT 279: note = Ancestral polymorphism is T, Derived polymorphism is M
MAAMEYSSLLPLALLAGWCALAAALVLAISAWLQRPRRVAEAFRRQGVDGPPPSSFLSGNLSEMQARAAAAAVAEAAGGRDFQKEGFDDYCMKIFPYFEKWRKAYGETYLYWLRRRPALYVSDPELIREIGRCVSLDMGKPTYLQKGQEPLFGRGVLKANGADWHRQRKLIAPEFYMAKVKGMVELMVDAAQPLLTSWEDKVAAAPGGVAELDVDEDIRSFSFDVISRACFGGDYSRGREIFLRLRALSGLMSETSVIFTIPSLRHLPTRKNRRIWKLTHEIRSLILQLASERKAAAAALAPGRDFLGSIIDSSRDQPRADDFVVDNCKNIYFAGHETSAVTATWCLMLLAAHPEWQDRARAEALGVCGAAAAPDFDAVARMKTLHAVVLETLRLFPPSSFVVREVFRDMQLGRLRAPKGTYLFVPVSTMHHDAAVWGPTARRFDPGRFRDGVAAACKHPQAFMPFGLGARTCLGQNLALVEVKVLVALVLARFSLALSPDYRHAPAFRFIIEPEFGLRLLLRRRLGH

SEQ ID NO: 14995 - protein, 491 aa, Zea mays
  VARIANT 404..491: note = Derived polymorphism lacks residues 404 to 491
MGSLATAEGQRPHAVCMPYPAQGHVTPMLKLAKLLHARGFQITFVNTEFNHRRLLHSRGPDALDRVPGFRFDAIPDGLPPSDADATQDIPALCYSTMTTCLPHLLALLARVDADAGSPPVTCLVVDAVMSFGFDAAREIGVPVAALWTASACGFMGYRNYRNLIDWGLVPFKSAADLQDNVGGGHLATVVTGARGMCDGVQLRDFPNFIRTTDRADFMFNFLMRESERLSLPDGVIVNTFEDLEGATLDAMRAILPTVYPVGPLLLRERLEIPASSPLAGLGSNLWKEEEGLLKWLAGRAPRSVVYVNYGSITVMTNSQLLEFAWGLANSGYPFVWNIRPDLVKGDSAVLPPEFASAVEGRALLTTWCPQEAAIQHEAVGVFLTHSGWNSTLESLCAGVPMLSWPFFAEQQTNCRYKRTEWGVGMEIGGEVRRDEVTVVLKEAMDGEKGREMRRRAEEWKEKAVKVTLPGGPAETNLERVIHEVLLSQKKG

SEQ ID NO: 14996 - protein, 497 aa, Zea mays
  VARIANT 163: note = Ancestral polymorphism is A, Derived polymorphism is V
  VARIANT 167: note = Ancestral polymorphism is S, Derived polymorphism is N
  VARIANT 251: note = Ancestral polymorphism is R, Derived polymorphism is H
  VARIANT 266: note = Ancestral polymorphism is G, Derived polymorphism is V
MSAGRGSDMQDSLSLMQFHDPYLYGGSAGSASLPLPHPFLPQHHQGFVHGCTSKGVAEFVDPEATAEVGGEQGFAVSKEVSEGGGDGAVEVEERNDAATTARGEEEAHGVRMIALLMESAVAVSVGNLADANGMLLELAQMASPYASSCGERLVAYFTKALAARLMSSWVGICAPLAPPCAAVHAAFRAFYNVSPLARFAYLACNQAILEAFHGKRLVHIVDLDVVPGGALQWLSLLPALAARPGGPPVLRVTGFGISRSALHDTGNQLAGLASKLSMPFEFYAIARRPGDAVVGAAAADMPSRRPGEALAVHWLRHALYDAAGDDAATMQLVRWLEPKVLTLVEQERGSPGDGGAGAGAAGHDEHGHFLDRFVSALHHYSAMFDSLGASRPSDEDASRHLVEQGVLGREIGNVLAVGGPSRSGRGKFGCWQAELDRLGFLRAGGGGRAQLVAGACPAGLGYTVADDQDGTVRLGWKGTPLYAVSTWAWCPSPHAQR

SEQ ID NO: 14997 - protein, 84 aa, Zea mays
  VARIANT 53: note = Ancestral polymorphism is S, Derived polymorphism is P
MSTYPRTYDLIHADSVFTLYRNREKILLVVKTYWTTHEAMTKISSRTVNMCCPRSINDMKEHCFWSQIMERKGPTVETPEWCQE

SEQ ID NO: 14998 - protein, 185 aa, Zea mays
  VARIANT 126: note = Ancestral polymorphism is D, Derived polymorphism is Y
MVVAVKKLKPEGFQGHKEWLTEVDYLGQLHHKNLVKLIGYCSDGENRLLVYEFMPKGSLENHLFRSEVLILCQGQRLKVAIRAARGLSFLHDAENQVIYRDFKASNILLASVSLIRNSRHPALIADHIEQHESLENIFSPVLETTAQAYGEDDNIQPSSGCTDAGPPLSSPNPVTKQALDIARVS

SEQ ID NO: 14999 - protein, 559 aa, Zea mays
  VARIANT 237: note = Ancestral polymorphism is F, Derived polymorphism is S
  VARIANT 219: note = Ancestral polymorphism is G, Derived polymorphism is S
  VARIANT 216: note = Ancestral polymorphism is F, Derived polymorphism is Y
  VARIANT 160..559: note = Derived polymorphism lacks residues 160 to 559
MATTTRVAAAATGVLLVLSALATLARAEDPYLFFEWKVTYGTKSLLGVPQKVILINGEFPGPRINCSSNNNIVVNVFNQLDHPLLFTWNGMQHRKNSWMDGMPGTQCPILPNTNFTYKWQPKDQIGSFFYFPSIGMQRAAGGYGAISVVSRLLIPVPFDQPPPENDHVVLIGDWYTKDHEVLARQIDAGKGVGRPAGVLINGKGGKDLEAAPAFTFEAGKTYRLRVCNTGIKASLNFRIQGHYMKLVELEGSHTLQNTYDSLDVHVGHCLSVLVDADQKPGDYYMVASTRFIHDAKSASAVIRYAGSSAPPSPNMTEPPAGWAWSINQARSFRWNLTASAARPNPQGSYHYGQINITRTIKVMVSRGHIDGKLRYGFNGISHRDPETPVKLAEYFNATDGVFSYNQMGDVPPAVNGPLHVIPNVITAEFRTFIEIVFENPEKSIDSLHVDGYAFFGVGMGPGKWSPEVRKTYNLLDTVSRHTIQVYPRSWTAIMLTFDNAGMWSVHSNIWERYYLGEQFYISVVSPARSLRDEYNMPDNALRCGKVVGLPLPPSYAPAR

SEQ ID NO: 15000 - protein, 974 aa, Zea mays
  VARIANT 150..974: note = Derived polymorphism lacks residues 150 to 974
MEEATRRRITPTTTLLLALAVLAASVPAGFCAINPQDASALNAIQSQWTNAPLSWSSASDPCDGGWDGIMCSNGRVTSLRLSSVNIQGTLSDSVGQLTQLMYLDVSFNLGLNGRMPATIGNLAQLTTLILAGCSFTGAIPQQLGNLQQLSFLALNSNKFTGTIPPTLGLLSNLFWLDLADNQLTGSIPVSTATTPGLDQLTHTKHFHFNKNQLSGTLTGLFNSNMSLIHILFDSNQLTGPIPEELGGISSLQVLRLDRNSLKGTIPPNISNLVNLNELNLASNQLTGPLPDLSSMTKLNVVDLSNNSFAVSAAPNWFTTLTSLTSVSISSGKLSGAVPKGLFRLPQLQQVVLSNNEFNGTLEVTGNISSQLQAINLMNNGIAAANVTPSYNKTLVLLGNPGCVDPELKVFCSLKQERMIAYNTSLAKCSSTASCSSDQRLNPANCGCAYPYAGKMVFRAPLFTDLTNSATFQQLEASFTTQLSLRDGSVFLSDIHFNSDNYLQIQVALFPSSGVSFSVADLIRIGFDLSNQTYKPPSNFGPYYFIADPYALLAGASSRGSKKSHISTGAIAGIAVAGGILVIALIGMVLFALRQKRRVKEVTGRTDPFVSWGVSQKDSGGAPQLKGARLFSLNELKNCTNNFSDTHEIGSGGYGKVYKGTLVDGTRVAIKRAERGSMQGVVEFKNEIELLSRVHHRNLVSLIGFCYEQGEQMLVYEYVSSGTLRENLLVRGTYLDWKKRLRIALGSARGLAYLHELADPPIIHRDVKSTNILLDDHLKAKVADFGLSKLVADTQKGHVSTQVKGTLGYLDPEYYMTQQLSEKSDVYSFGVVMLELVSGRQPIESGKYIVREVKLAIDPNDRDHYGLRGLLDPAIRDNARTAGFRRFVQLAMLCVDESAAARPAMGEVVKDIEAMLQNEVSGPDGATSSAGSSANDFDGAGGGARSHPYSDVEITRGSYGDNASDYMPYFEVKPK

SEQ ID NO: 15001 - protein, 99 aa, Zea mays
  VARIANT 37: note = Ancestral polymorphism is L, Derived polymorphism is M
  VARIANT 8: note = Ancestral polymorphism is P, Derived polymorphism is Q
MERHAEKPLLVLPSCLLLLLVLLLAPLVSAVPTPRSLRLGSHQQHPPALKLSSSQETTAIAAAMMNTGRPTARMDVEVNDYQPSGPNNRHDPPKGPGRT

SEQ ID NO: 15002 - protein, 152 aa, Zea mays
  VARIANT 89: note = Ancestral polymorphism is P, Derived polymorphism is R
  VARIANT 33..152: note = Derived polymorphism lacks residues 33 to 152
MTPSRSLPSGHRPPLQVEKHFGRCLDARKAGDWKSVLRESDAAIAAGADSCALLLAARAEALFRLNLLDEADVAISSASKLNYTSSCSPDTKLRADSAHAQIYPPLTGVFKPLIKEGNVYNVSYIQIKKANRMYKPVDNDILIGFTKWILCW

SEQ ID NO: 15003 - protein, 673 aa, Zea mays
  VARIANT 62..673: note = Derived polymorphism lacks residues 62 to 673
  VARIANT 265..673: note = Derived polymorphism lacks residues 265 to 673
  VARIANT 352..673: note = Derived polymorphism lacks residues 352 to 673
  VARIANT 425..673: note = Derived polymorphism lacks residues 425 to 673
  VARIANT 435..673: note = Derived polymorphism lacks residues 435 to 673
  VARIANT 454..673: note = Derived polymorphism lacks residues 454 to 673
  VARIANT 571..673: note = Derived polymorphism lacks residues 571 to 673
  VARIANT 581: note = Ancestral polymorphism is I, Derived polymorphism is V
  VARIANT 612..673: note = Derived polymorphism lacks residues 612 to 673
MTISRSISEPSQPAPAPNARTVRNPSGATDTLAYILGRQLATIASRSAAPPPGSQTLVGAPRTLEIPQEGHLHHRFLVNLDHFQVFITQVGSHNIHGNLNLANISGSLAPRNNSMAGIPSAGVQQPSGGISSGRFPPNNLQASLSQIPHGHSGISNRGGMNVGGNPGFGSSMNAIGGSIQGLSSNLANVGNRNSAPGLAASPVLGNLGPRIASSGNILGGSNIGRSISSGGLSMPGIASRMNLSGNSGSGAINIQGSNRIGMLQQASPQFMNLLGSSYPTPGGSLSQNQVQSGSGSLGSSGMLYEGSSGDNAPFDINDFPQLTGRPNSAGGGQGQYGSLRKHGVSVNAIVQQNQEFSIQNEDFPALPGNKGSSSDYPMDIHHKDHLQENINIMQAQHYPMARPSGFSLGSSYPPRQHQQSANSVQNAGLETIGLRPANSPSLSTNSGVYEQFMQKYHQPQTQNSLRLQAASGPQQYKDQSQKSVQGTQAVPDPYSLLGLLSLIRMKEPGPTTLALGIDLTSLGLNLNSQDNLYKTFGSPWSSEPAVGEPDYQIPACFSAEPPPALQPFHFQKFHPLTLFYIFYSMPKDAAQLYAANELYNKGWFYHKDYRVWLTRAPNSAPLVKTPLHERGSYICFDPSIWDTVHKDNFVLHYEAVEKRPVLPSAGQNIRREL

SEQ ID NO: 15004 - protein, 132 aa, Zea mays
  VARIANT 8: note = Ancestral polymorphism is P, Derived polymorphism is Q
MERHAEKPLLVLPSCLLFLVLLLAPLVSAVPTPSEPRPCMASANSHPPPLFPLLVSAADFACAIAGSLRLGSHQQHPPPALKLSYSQDTTAIAAAMMKNTGRPTARVDVEVNDYQPSGPNNRHDPPKGPGRP

SEQ ID NO: 15005 - protein, 414 aa, Zea mays
  VARIANT 311..414: note = Derived polymorphism lacks residues 311 to 414
MYHQHQGLSELFTTRTSFPMEQHLFLRGGNAQGDSGLVLSTDAKPRLKWTPELHQRFVDAVNQLGGAEKATPKTVMRLMGIPGLTLYHLKSHLQKYRLSKNLQAQANVSTSKNAIGCTSIADRIPGTSAATMSSTNVVPQAEKTIQIGEALQMQIEVQRQLNEQLEVQRHLQLRIEAQGKYLQAVLEQAQETLGKQNLGPANLEDAKIKISQLVSQVSTECFSNAITDVKGSSSVHRLEPRQIQFVESSTNSYLSVAEGFIKEQRLQHQQHHGVLKAHDGSSLFCRKRPHEHETQFALNRSLSERRMAHLQNDEQYSKAEFGYESDTEIVHEYTAPQNGGGSTTSSASGSKVDAEKLYLEEQKCARQVAEYPRESKLIDFENSCSGKKLDLNTHNVDDTDQAYRHFDLNDFSWS

SEQ ID NO: 15006 - protein, 309 aa, Zea mays
  VARIANT 31: note = Ancestral polymorphism is L, Derived polymorphism is I
  VARIANT 123: note = Ancestral polymorphism is G, Derived polymorphism is R
  VARIANT 125: note = Ancestral polymorphism is Q, Derived polymorphism is R
  VARIANT 136: note = Ancestral polymorphism is H, Derived polymorphism is R
  VARIANT 159: note = Ancestral polymorphism is M, Derived polymorphism is T
  VARIANT 166: note = Ancestral polymorphism is S, Derived polymorphism is Y
MEFLQGQRLETTLAVAAAVVAVAAGSAYLFLRSRKPRGCLDPENFKEFKLVEKRQLSHNVAKFKFALPTPTSVLGLPIGQHISCRGQDASGEEVIKPYTPTTLDSDVGSFELVIKVIVLCIFGHRCNYLCTVVIHHMFSFLLVVKMYPQGRMSHHFREMKVGDYMSVKGPKGRFKYLPGQVRALGMVAGGSGITPMFQVTRAILENPKDNTKVHLIYANVTYEDILLKEELDGMAKNYPDRFKIYYVLNQPPEVWDGGVGFVSKEMIQTHCPAPAADIQVLRCGPPPMNKAMAAHLDDLGYTKEMQFQF

SEQ ID NO: 15007 - protein, 880 aa, Zea mays
  VARIANT 569..880: note = Derived polymorphism lacks residues 569 to 880
  VARIANT 815..880: note = Derived polymorphism lacks residues 815 to 880
MAFSHDGKMKGCQTNLFRTKDKKVVKMTDSASCSTAKYGSSNSKSPSSSPFRKLSEVRSIRLNHFLSHSSNATKYEHVRIFVSTWNVGGKAPTAELKLDDFLPVDDHSDIYVLGFQEIVPLNAGNVLVIEDNEPAARWLALINRALNQPVDTVDDIFQHKPYPSLDSTSSRSTPCLDGSFSNRSRTASGSIIFQKSLKSIKKSYMPSQRKQLKFCNCPVEMAKKSYKDACFWCPQAYANDMDSSEEDELDDNLNDIFGLNDDGVTSSVSASRDQLKYNLISCKQMVGIFVTVWAKKELMQHIGHLRTSCVGRGIMGYLGNKGCISVSMTLYQTSFCFICSHLASGEKEGDELRRNLDVLEILRLTQFRRICRRAGRRIPEKILDHERVIWLGDLNYRISLSYEDTKKLLTENNWDALFEKDQLNIQRASGSVFKGWSEEKIYFAPTYKYSCNSDSYAGETATSKKKRRTPAWCDRILWHGDGIAQLSYFRGESQFSDHRPVCGTFIVEEAKVDPTPSAPAPGHHNIRASRLLDNEIRVLKDELQRTNLELESFKEKIKENQEKIKLNKQLPYLIGNIVETLEMNPDDEAEEDGANIDLDSQRKVKCVVLKTSTRQVHWTAVWLAEPAVRMRLMAVLVDGCQGLSGGAMAGVIHGQAQHGDPMFQEFAGRLLRRVCSPLFEMVRSWVLEGELEDVFAEFFIVGQPVNYQPERSLACFRRNVGLGDLNYRINLPYEKTHELISKQDWNELFGKDQNVLCKRLHQRKGNLYEDQRTLAGCLKTNVLAEMTGLRPVNCKIKGDDLEAMVHVCELVAEWRQPFHSNVVVHIVIRNHPSVFEIYQRKLLEPGKISKKYIDKLNKKVSTVLNEYFENSKDYVPNKRD

SEQ ID NO: 15008 - protein, 344 aa, Zea mays
  VARIANT 12: note = Ancestral polymorphism is P, Derived polymorphism is L
  VARIANT 48: note = Ancestral polymorphism is P, Derived polymorphism is L
  VARIANT 114..344: note = Derived polymorphism lacks residues 114 to 344
MKSYPWAGARPLAVVQLLLFLAHLVDRGGAAGGGSKGSSVYPAAVVYPHHSRQISCKPRVFLYQHFLSDDEANHLISLVSATLPPHNPTERLSLLLDNARTRLNFGYCSFSSFQARAELKRSAVADNMSGKSTLSEVRTSSGTFLRKGQDPIVEGIEDKIAAWTFLPKENGEDIQVLRYKHGEKYEPHYDYFTDNVNTVRGGHRYATVLLYLTDVPEGGETVFPLAEEPDDAKDATLSECAQKGIAVRPRKGDALLFFNLNPDGTTDSVSLHGGCPVIKGEKWSATKWIRVASFDKVHHPQGNCTDENESCAKWAALGECIKNPEYMVGTTALPGYCRRSCNVC

SEQ ID NO: 15009 - protein, 184 aa, Zea mays
  VARIANT 109: note = Ancestral polymorphism is R, Derived polymorphism is Q
  VARIANT 79: note = Ancestral polymorphism is R, Derived polymorphism is S
  VARIANT 71..184: note = Derived polymorphism lacks residues 71 to 184
MGLTFTKLFRRLFAKKEMRILMVGLDAAGKTTILYKLKLGEIVTTIPTIGFNVETVEYKNISFTVWDVGGQDKIRPLWRHYFQNTQGLIFVVDSNDRERVVEARDELHRMLNEDELRDAVLLVFANKQDLPNAMNAAEITDKLGLHSLRQRHWYIQSTCATSGEGLYEGLDWLSNNIANKVYHV

SEQ ID NO: 15010 - protein, 191 aa, Zea mays
  VARIANT 24: note = Ancestral polymorphism is S, Derived polymorphism is F
  VARIANT 39: note = Ancestral polymorphism is A, Derived polymorphism is S
  VARIANT 71: note = Ancestral polymorphism is G, Derived polymorphism is S
MEVTGTRRALPITAFALMAMALASLEPVLAGRDGDALTALRKGLEDPDGALTDWDPNLVDPCTWFHVVCDGDNRVIRLEIFGNSISGSIPSEFGSLVNLISLDLSSNSISGAIPAALGNAKSLKFLRLDHNRLTGPIPRELAGLPNLGIVDFSNNDLCGAIPTDGAFQNIPRSSFDNNPRLHEGGEFEPNC

SEQ ID NO: 15011 - protein, 142 aa, Zea mays
  VARIANT 69: note = Ancestral polymorphism is V, Derived polymorphism is I
  VARIANT 101: note = Ancestral polymorphism is S, Derived polymorphism is W
MAPTKKSKKSTESINNKLQLVMKSGKYTLGYKTVLKTLRNSKGKLIIIANNCPPLRKSEIEYYAMLAKVSVHHFHGNNVDLGTACGKYYRVCCLSIIDPGSFLLNCHYLVSVRTVTAQFLGRHCTILRPYLFRIIICSDYII

SEQ ID NO: 15012 - protein, 384 aa, Zea mays
  VARIANT 70..384: note = Derived polymorphism lacks residues 70 to 384
  VARIANT 237..384: note = Derived polymorphism lacks residues 237 to 384
  VARIANT 300..384: note = Derived polymorphism lacks residues 300 to 384
  VARIANT 321..384: note = Derived polymorphism lacks residues 321 to 384
MDAFLQRLKRLDAYPKVNEDFYKRTLSGGIVTLVAAVVMLLLFISETRSYFYSATETKLVVDTSRGERLRVNFDITFLSIPCTLLSVDTMDISGEQHQDIRHDIEKIRLDAHGNVIEARKVSIGGAKIERPLQKHGGRLDKGEQYCGTCYGAEESDEQCCNSCEEVREAYKKKGWALTNPDLIDQCAREDFVERVKTQQDEGCNVHGFLDVSKVAGNFHFAPGKGFYESNIDVPELSLLEGGFNITHKINKLSFGTEFPGVVNPLDGAQWTQPASDGTYQYFIKVVPTIYTDIRGHNIHSNQFSVTEHFRDGNVRPKPQPGVFFFYDFSPIKVIFTEESRSLLHYLTNLCAIVGGVFTVSGIIDSFIYHGQKALKKKMELGKYR

SEQ ID NO: 15013 - protein, 354 aa, Zea mays
  VARIANT 234: note = Ancestral polymorphism is P, Derived polymorphism is S
  VARIANT 139: note = Ancestral polymorphism is R, Derived polymorphism is Q
  VARIANT 102: note = Ancestral polymorphism is P, Derived polymorphism is S
MHPKARIHADPVREVDHFDCLPDSLVLLILNKVEDVRSLGRCYAVSKRLCGLVPLVHDVYVKIDRVVAVDGDAEDALNLSSPKPRNIFSHFLKLMLFTIIKPFHNMRNPNGTGRSLFPQLSHHSPAQVLRNFTHIRNLRIELPSGDVGTEEGVLLKWRAEYGSTLQSCVILGGTRVDRKPVGGEHEQSLEDNGSMPESFYTNGGLKLRVVWTISSLIAASTRHYLLRSIINDHSTLLSLVLTDADGQGTLCMGAEQLKEFRENQLSASACSNRTQVPACNMKLKYAPYLELPGGMALQGATLVAIKPSPDGSNGSHPNRKEADAFVFGAFDGPFKAAVKALMKRRTYLLEMNGF

SEQ ID NO: 15014 - protein, 227 aa, Zea mays
  VARIANT 175: note = Ancestral polymorphism is A, Derived polymorphism is D
MTKPTAGFQTPRPSSLRASSTAGARSSAAKLAVASAVPRDLASSTKVVRKCLDYDGDTTLPAPAASTTPLVDVLEDDLAPLLDLPDPDVSGDSSSSVIFAAPDDAVISSADSTVTELQVAAPTDSITNSDADLPVLEQINLAMSELHAADSLSPRSKRLLTALAEAAKAELIPSDTARRLRGAAFWGKVRVWVLAATVTTVTTIDVALAAYLYARRVNNRYHVMPPT

SEQ ID NO: 15015 - protein, 364 aa, Zea mays
  VARIANT 222: note = Ancestral polymorphism is D, Derived polymorphism is G
  VARIANT 154: note = Ancestral polymorphism is C, Derived polymorphism is R
MTPAVRVGNPRAPGPGAAVVEDEEEAAVAWRELRGKAAELAAAGEERAILARRIEAALQVRREALRQAEELDELTRMVDLQQARLEAAVVGRRRALEAVERGKERLQEQIDRVLPLSRSLTAAHHRVQEAKEALSGDKFRLKDLQRLLRTRQQCMVSQVAGLYPVRVFHDLPRHAENPCADTNGEHVTLPEENRTFSGGDGTHLPTIIKSPEARGWTFFGWDIMKHKMKQKSYRNKVLQRSAAVLGYAAHAVLLIACYLDVPLRYPLRFGGSRSYVSDRLPSADTASSAALASTRNTESELTEYPLFLECQDDDSTSASYAIYLLHKDTEQLLNYVGAESCGRHVFGNLRELLRIVQSDKFVYR

SEQ ID NO: 15016 - protein, 294 aa, Zea mays
  VARIANT 265..294: note = Derived polymorphism lacks residues 265 to 294
  VARIANT 13: note = Ancestral polymorphism is P, Derived polymorphism is S
  VARIANT 5..294: note = Derived polymorphism lacks residues 5 to 294
MVTGKKRTFVLYPSLGVGHLIPMVELAKHLLRHGHGALIAVVNPPDTDAVSAAAVERLAAANPAIAFRLLPVPASPDAGADWVKRDLDTLRLANPVLRDFLLRSQPAAALILDMFCVDALDVAAELGVPAYFFFASAAGDLAMFLNLPYLYPTLPSFRDMGEALVRCPGMPPVRAMDMSLTVQDRDSDRTKVRMYQFCRIPEGRGVLVNSFAWLEPRALRALGDGVCVPGRPTPRVFCVGPLVNDGSSTAGSGGRHECLAWLDAQPKRSVVFLCFGSKDACSVLIALFLYHEFY

SEQ ID NO: 15017 - protein, 169 aa, Zea mays
  VARIANT 147: note = Ancestral polymorphism is R, Derived polymorphism is S
  VARIANT 143: note = Ancestral polymorphism is D, Derived polymorphism is G
  VARIANT 132: note = Ancestral polymorphism is N, Derived polymorphism is I
  VARIANT 75..169: note = Derived polymorphism lacks residues 75 to 169
  VARIANT 46: note = Ancestral polymorphism is G, Derived polymorphism is S
  VARIANT 36: note = Ancestral polymorphism is N, Derived polymorphism is S
MATVPTWPPPFSSLLGSLISRPDRDRAPVPPRYSTNCGVRVGAVAGCITTKELGTVMRSLGQNPTEAELQDMINEVDADGNGTIDFPEFLNLMARKMKDTDSEEELKEAFRVFDKDQNGFISAAELRHVMTNLGEKLTDEEVDEMIREADVDGDGQINYEEFVKVMMAK

SEQ ID NO: 15018 - protein, 149 aa, Zea mays
  VARIANT 127: note = Ancestral polymorphism is R, Derived polymorphism is S
  VARIANT 123: note = Ancestral polymorphism is D, Derived polymorphism is G
  VARIANT 112: note = Ancestral polymorphism is N, Derived polymorphism is I
  VARIANT 55..149: note = Derived polymorphism lacks residues 55 to 149
  VARIANT 9: note = Ancestral polymorphism is R, Derived polymorphism is I
MLMDPLMRRLFFPNTNPSLVYSPSAGCITTKELGTVMRSLGQNPTEAELQDMINEVDADGNGTIDFPEFLNLMARKMKDTDSEEELKEAFRVFDKDQNGFISAAELRHVMTNLGEKLTDEEVDEMIREADVDGDGQINYEEFVKVMMAK

SEQ ID NO: 15019 - protein, 268 aa, Zea mays
  VARIANT 178..268: note = Derived polymorphism lacks residues 178 to 268
  VARIANT 90: note = Ancestral polymorphism is V, Derived polymorphism is G
  VARIANT 24: note = Ancestral polymorphism is A, Derived polymorphism is G
MTSPFNSCSIHMMYHAKNFSVPFAPQRAQDNEHASNIGGIGGPNISNPANPVGSGKQRLRWTSDLHNRFVDAIAQLGGPDRATPKGVLTVMGVPGITIYHVKSHLQKYRLAKYIPDSPAEGSKDEKKDSSDSLSNTDSAPGLQINEALKMQMEVQKRLHEQLEVQRQLQLRIEAQGRYLQMIIEEQQKLGGSIKASEDQKLSDSPPSLDDYPESMQPSPKKPRIDALSPDSERDTTQPEFESHLIGPWDHGIAFPVEEFKAGPAMSKS

SEQ ID NO: 15020 - protein, 1143 aa, Zea mays
  VARIANT 279..1143: note = Derived polymorphism lacks residues 279 to 1143
MPIGEVVLSAFTQALFEKVLAATIGELKLPPDVTEELQSLSSILSTIQFHVEDAEERQLKDKAARSWLAKLKDVADEMDDLLDEYAAETLRSKLEGPSNHDHLKKVRSCFCCFWLNKCFFNHKIAQHIRKIEGKLDRLIKERQIIGPNMNSGTDRQEIKERPKTSSLIDDSSVFGREKDKETIVKMLLAPNNNSGHANLSIIPIVGMGGLGKTTLTQLIYNDERVKEHFQLRVWLCVSENFDEMKLTKETIESVASGFSSATTNMNLLQEDLSKKLQGKRFLLVLDDVWNEDPEKWDRYRCALLSGGKGSRIIITTRNKNVGILMGGMTPYHLKQLSNDDCWQLFKKHAFVDGDSSSHPELEIIGKDIVKKLKGLPLAAKAVSSLLCTRDAEEDWKNILKSEIWELPSDKNNILPALRLSYSHLPATLKRCFAFCSVFPKDYVFEKTRLVQIWMALGFIQPQGRRKMEEIGSGYFDELQSRSFFQHHKSGYVMHDAMHDLAQSVSINECLRLDEGLRLHDPPHSSSPATARNARHLSFSCDNRSWTQFEAFLGFKRARTLLLLNGYKSITNSIPSDLFIKLKYLHVLDLNRRDITELPDSIGNLKLLRYLNLSGTGIEMLPSSIGRLFSLQTLKLQNCHSLDYLPKTITNLINLRWLEARTELINGIAGIGNLTCLQQLEEFVVRKDKGYKISELKAINGITGQICIKNLESVASVEEADEALLTKKTNINNLHLIWSESRRLTSKTADKDMKILEHLQPHHELSELSVKAFAGIYFPNWLSKLTQLQTIHLSDCTNCSVLPALGVLPLLKFLDFGGFHAIVHINQEFSGTSEVKRFPSLKELVFEDMSNLKGWTSVQDGQLLPLLTELAVIDCPLLEEFPSFPSSVVKLKISETGFAILPEIYTPSSQVSSSLVCLEIHQCPNLTSLERGLLCQKLSMLQQLTITGCPELTHLPVEGFRALTALKSIHIYDCPKLEPSQQHSLLPSMLEDLRISSCSNLINPLLREIDGIFSMTNLAITDCASLRYFPVKLPATLKKLEIFHCSNLRCLPPGIEATSCLAAMTILKCPLIPSLPEQGLPQSLKELYIKECPLLTKSCKENDGEDWPKIAHVPTIEIEDDSTMTDWSIRRSFYTHHSDTGGTD

SEQ ID NO: 15021 - protein, 499 aa, Zea mays
  VARIANT 17: note = Ancestral polymorphism is A, Derived polymorphism is V
  VARIANT 166..499: note = Derived polymorphism lacks residues 166 to 499
MHSLLPILLCSFLLATAANADNPFYTGCPNNTNYTRGSAFQANLNALLASLPSAAAASAGFATNTTGTAPDQAYGLAQCRADVNASDCRACLDGSTRDMARVCPGQKSAMLIYDACQLRHSNASFFGAVDASVVVWQPNAQNATQQEQFTTRLGALMGSVTERAAYASPRRFAVGSAAVTPFVNVYGMAQCTRDLAGDDCNRCLVGAVSFIPTCCDGRQGARIVYPSCSIRFEVYPFYDAQAADAAMSPAPAPGAGSVNGSDQSGLGESALLVAIPVAVALLQVAVFLFLRKRNRQPHKHVQVASNVHEDEEDMTSSEYLLYDLSTLRAATDNFSEENKLGEGGFGPVYKGTLQDGQEIAVKRLSATSQQGQVEMKNEVVLLAKLQHRNLVWTHWSRGSVQPLLEGCPDEGLRAQEMLRCIHVALLCVQEDPLDRPSMASVVVMLNSRSITLPAPGAPAYAVPRRGTTVRSAARQGLVDAAASREQSVNGASFSDMEPR

SEQ ID NO: 15022 - protein, 285 aa, Zea mays
  VARIANT 161: note = Ancestral polymorphism is A, Derived polymorphism is V
  VARIANT 131: note = Ancestral polymorphism is G, Derived polymorphism is R
MPFLSPLGGEDADDFYFGYDAGYHRSGGAGKSAKKEEKKKEKGFLSCLPCFIPCSPGASDPTAHRRLLSSDSSDSDNAAAAMDITADLARLRERYYRLAAGPPVRPRDVPGLVARPDDPPLAVSALSWLGGDLRPSCMLVALLPALFPSLPVHARHALSAAARRLSAREAALDEEVAEYKATYAMKLACEKTKDRVAETAAEEMCKMARAARRADKLRWRAVEAAAREVLAPAQAKEFLKAVEDVSGKVARHGARWRARAGTLTVPVEAFERVRTNARAAADDTW

SEQ ID NO: 15023 - protein, 471 aa, Zea mays
  VARIANT 81: note = Ancestral polymorphism is C, Derived polymorphism is R
  VARIANT 23: note = Ancestral polymorphism is D, Derived polymorphism is Y
MWSLLPLLLFLSSSLLAATTIAYDLWYTECASNTNYTRGGAFQANLDALLSSLPAAAAASYGFADNFTGAAPDQAYGLAQCRGDVNASTCLACLDGAARHMAATCPGQKDAMLIYDECLLRHSNASFLGAADASVRFCAWNPQNATQPEEFRTRLGALMGNLTARAAFASPRMFAAGKAAVSPFANVYGMAQCTRDLADDDCNRCLDGVVAFIPNCCDGKQGGRVIARSCSIRFEVYSFYDALGAQEAMSPAAAPVPGGGPTNGSGHSVDGNTVHEDEEDMRSSESLLYDLSTLRAATDNFSEENKLGEGGFGPVYKGTLQDGQDIAVKRLSATSQQGQVEMKNEVVLLAKLQHRNLVWTHWSRGSVQPLLEGCPDEGLRAQEVLRCIHVALLCVQEDPHDRPSMASVVVMLNSRSITLPAPAAPAYAVPGRAVTASENPPRRMSLGRQGPMAAAREPSINEASVSELHPR

SEQ ID NO: 15024 - protein, 191 aa, Zea mays
  VARIANT 4: note = Ancestral polymorphism is A, Derived polymorphism is S
  VARIANT 56: note = Ancestral polymorphism is P, Derived polymorphism is Q
MKEALALVGSARRLSAPEEDELLGLLAGFPDEDGGGGGGSDRELSFSDLVEAGARQAIADADLGAAKAPCGDRPWAAVALPSSHEAAGAAASKQPAARQRAARRSGGSRGSCGGGGDGVLLNFYVPGLLTRSMTAPRPSRGPPSPGAVQGAPAKPVAAAGKASSSRTQTAQGIGCWPALWGRGRRPAKACS

SEQ ID NO: 15025 - protein, 457 aa, Zea mays
  VARIANT 170: note = Ancestral polymorphism is S, Derived polymorphism is Y
  VARIANT 101: note = Ancestral polymorphism is R, Derived polymorphism is Q
  VARIANT 89: note = Ancestral polymorphism is E, Derived polymorphism is D
  VARIANT 28: note = Ancestral polymorphism is L, Derived polymorphism is Q
MGSTAAAPCHIVAVPYPGRGHVNAMLNLCRLLAARDGVTITIIVTEEWLSLLGAPAALPDLGLRVRFEAIPNVIPSEHGRANDMVGFMEAVYTKMASPFEQLLDRLAPPAPAAIVADMFVPWTVGVGERRGVPVCIMCPISATMFAVQYNFHLLPPAAAGGGASPDITGSCFVENYIPGTKSIRFADLAPTHTDALLLDKILEAHSSVKKAQCIVFTTFQELESDAIGAMRQNCPVYAVGPCVPFMALQEHKASPDGDDYMAWLDAQPAGSVLYVSLGSFLSVSAAQFDEIAAGLAGSKARFLWVLRDADACSRVRGLIRDPDAGLIVPWTNQLRVLCHPSVGGFFTHCGMNSTLEAVYAGVPMLTLPIAFDQPTNSRLVTEVWKNGIGLRDMARADGVIGRGEIASAVDRLMRPDAAEFQDMRKRVTLWKDAARAASEEGGSSWKDVTSFINFVSR

SEQ ID NO: 15026 - protein, 512 aa, Zea mays
  VARIANT 33: note = Ancestral polymorphism is P, Derived polymorphism is S
  VARIANT 179: note = Ancestral polymorphism is S, Derived polymorphism is F
  VARIANT 227: note = Ancestral polymorphism is E, Derived polymorphism is G
  VARIANT 230..512: note = Derived polymorphism lacks residues 230 to 512
  VARIANT 233: note = Ancestral polymorphism is R, Derived polymorphism is I
  VARIANT 234..512: note = Derived polymorphism lacks residues 234 to 512
  VARIANT 242: note = Ancestral polymorphism is L, Derived polymorphism is P
MDASLLLSVGLALVLIPLSLSLLNRLRVGRLPPGPRPWPVLGNLRQIKPVRCRCFQEWAERYGPIISVWFGSGLTVVVSTSELAKEVLKENDQQLADRPRNRSTQRFSRNGQDLIWADYGPHYIKVRKLCNLELFTPRRLEALRPIREDEVTAMVESVHRAATAPGNEGKPMVVRKHLSMVAFNNITRLAFGKRFMNANGDVDEQGREFKTIVNNGIKIGASLSVAEFIWYLRWLCPLNEELYKTHNERRDRLTMKIIDEHAKSLKESGAKQHFVDALFTLKQQYDLSEDTVIGLLWDMITAGMDTTVISVEWAMAELVRNPRVQKKLQEELDRVVGRDRVMLETDFQNLPYLQAVVKESLRLHPPTPLMLPHKASSNVKIGGYNIPKGANVMVNVWAVARDPKVWSNPLEYRPERFLEENIDIKGSDFRVLPFGAGRRVCPGAQLGINLVASMIGHLLHHFEWSLPEGTRPEDVNMMESPGLVTFMGTPLQAVVKPRLEKEELYNRVPVEM

SEQ ID NO: 15027 - protein, 338 aa, Zea mays
  VARIANT 60..338: note = Derived polymorphism lacks residues 60 to 338
MRKKLDTRFPAFPYGFAYFLFLVKGFPMIFLHWYALSLWLPQRGSCLSRFSFESYMLNYQPRIKKIMQTDEDVGKIAQAVPVLVSKALELFLQDLCDRTYDITIRKGVKTVGSSHLKQCIQTYNVYDFLREVVSKVPDIGPSDVIADDKLGKRRKAEEDGSEEELKRTRNETESHTSNGRGRGRGRGRGRRSVRGPWREVVTSPEQFKEENQSSKVASLKVEVADEVSNVTEAKQDTTPMSNARPSLRNIDLNLDPTDEEDEVTVPPEPQLSAPATSCAAATAAPGPSVPRLREGAKLKDFFGAWELADMNKMEMDPVQFALSTNHRLEEDEDYDNED

SEQ ID NO: 15028 - protein, 110 aa, Zea mays
  VARIANT 42: note = Ancestral polymorphism is S, Derived polymorphism is T
MAEVHNERPVGMVGDVRDAPVGRENDLEAIELARFAVAEHNSKTNAMLEFERLVKVRHQVVAGTLHHFTVEVKEAGGGEKKLYEAKVWEKAWENFKQLQSFELVGDAAVA

SEQ ID NO: 15029 - protein, 295 aa, Zea mays
  VARIANT 66: note = Ancestral polymorphism is Q, Derived polymorphism is H
MSESALTIRRLSGGGAGGGNAGESAGADGPWEEGGGNAARVRGVNAGIMDETVLQLVFRALNWDPQTLCAVARVSRRLRAVAERVLWRELCASRAPRMVAALTGGAAASAPAAGRIGGGWPALAKLLLFCCGAAGAGVRGHFVPVSRFSKTSGRSFLSRRCAGDLLYVSDPCEHAVAGANDDVGAYRGVFRGFMRSRTRACLVGHRTALEPRVRCPYCGARVWSMTAAGLAPRSASRRLGAHEDRLEYFVCVSGHLHGSCWLARLSDSEGGGPGGASDDDDDASAAASEEDDASL

SEQ ID NO: 15030 - protein, 124 aa, Zea mays
  VARIANT 25: note = Ancestral polymorphism is V, Derived polymorphism is A
MKTTTESRSWPSRLSRTCLFNTVKVRTIKVEKRINEIVNRLNKTKVERKPDLKAEREAISAAEKAERKAQLRDKKRREEMERLDKEKQADIRSYKGLMVQEKMTSNKQIASGSKTLQELEEDFM

SEQ ID NO: 15031 - protein, 229 aa, Zea mays
  VARIANT 12: note = Ancestral polymorphism is L, Derived polymorphism is I
MDDGADLPCQLLFSHPEMPDSFDEFFNSATTTCTHTHSCNPPGPSVAMHTHTCLHAHTLVLGSGGEDDDDAREDSAKPRRPLGNREAVRKYREKKKAHAAFLEEEVKKLRAANQQLQRRLQGHAALEAEVARLRGLLLDIRGKIDAEVGGVLPFQKPCSVGSVACADPALCFNGNSEVGGGWEESSRPAAADCRIDEVRGMSREIDVPEGLRHSMDVVASFVSSDPLAE

SEQ ID NO: 15032 - protein, 90 aa, Zea mays
  VARIANT 37: note = Ancestral polymorphism is S, Derived polymorphism is I
MATEGPGGLQLCVWVQVVVALLKNSSKLSGISGWEKSSWQGRSAPSSIVAENVCREQISPPVVNGQVAQERCLKREREVKESRACLKDVP

SEQ ID NO: 15033 - protein, 333 aa, Zea mays
  VARIANT 134..333: note = Derived polymorphism lacks residues 134 to 333
  VARIANT 103..333: note = Derived polymorphism lacks residues 103 to 333
MPAAMRSWIPRDILLHHAMAAPDVLRVAPARLAMRKPASTDAATLSSHPLTLRRLARLLTLLARPPRPCGSLLPISRRGLHISRSLSLLPATCSADLVREQPWMPQLMYVACLTIAAKMEETVVLRRLDIHQNQVPSEKYSFDLDAIQRMEIYVLDSLNWRMQVVTPFYYINYFVDKFTGGKPLSCGFISRRTEIVLGSLEATKLLQFRPFEMAAVVLSAAAESQENVRICHEALQEVGLVKKKTDYTASPSRVLDASCFSFKTDDNQTAGSALTVLFASDICTVFVMRLIFNRDAQFGLFDGDGKLAKALDARPLTKVVKDLEAKMKGGQSS

SEQ ID NO: 15034 - protein, 210 aa, Zea mays
  VARIANT 12: note = Ancestral polymorphism is P, Derived polymorphism is L
MTSAKENVPVAPQTLPRQNSSSGSAHPLPPLRPRMANGATEPPVSGVLKCTCFRLPSRTKKPLPPSPAPKLSSRASRRSAVAPDLSATTTASQSQRVTFRASAPLSTWWPSSPSAVSAGAGATATPAPGGSGGIAVAPRRASSASVAPTMKAGAGSMSSSSFSHWRCRSLSSSRVMPHGGRASFSFPVSPASASSSCVSTPKIPQGWQHK

SEQ ID NO: 15035 - protein, 131 aa, Zea mays
  VARIANT 73: note = Ancestral polymorphism is R, Derived polymorphism is L
  VARIANT 32: note = Ancestral polymorphism is A, Derived polymorphism is V
  VARIANT 29: note = Ancestral polymorphism is R, Derived polymorphism is Q
  VARIANT 26: note = Ancestral polymorphism is G, Derived polymorphism is R
MEATVAAAEAEEEEAAAAASTPQRSGRKRPRAIGSGRYRSVSRFSPAFLILLPLYVFAFNRCDSIALASSRCRLPLVILLPVALALASRQAVGQGRMDGDDGWKPQPLASHTADRACRRKKRCLHGLGLPT

SEQ ID NO: 15036 - protein, 1255 aa, Zea mays
  VARIANT 1048..1255: note = Derived polymorphism lacks residues 1048 to 1255
MAMEMSPRQSPPRTPRRAAKPRLFIKEMVLRNFKSYAGEQRIGPFHKSFSAVVGPNGSGKSNVIDAMLFVFGKRAKQMRLNKVSELIHNSSNHQNLDSAGVSVHFQEIIDMDDGNYSAVEGSDFVISRVAFRDNTSKYYINERGSNFTEVTKLLKGKGVDLDNNRFLILQGEVEQISLMKPKAQGPHDEGFLEYLEDIIGTNQYVEKIEEAYKQLELLNEKRTASVQMLKLAEKERDSLESAKNEAETYMLKELLLLKWQEKATKLASDDAISRVNQCQENVADLEKNLAAEREKIHQNSQTLKEMEAIYSKHVKRQEDLENNMKSCKDQFKEFERKDVKYREDLKHLKQNIKKLDDKAEKDTSKRDEKTKEMEESSNLIPQLEAEIPKLQKRLNEEEKVLEQIKASSREETERFRAELTQVRTELEPWENQIIEHKGRLDVASAEKKLMKQKHDGAQAELTDAQNQMESIKEKVKTKDSYIVGLQEKIEKHLNEASEARKIEQECQKQEDSLIPLEQAARQKVAEMKTTRDSEKNQSTALKAILQAKESNEIQGIYGRLGDLGAIDAKYDVAISTSASSGLNYIVVETINSAQACIELLRRRNREETVTCLILEKQTHLLHKIKEKVKTPEGVPRLFDLVKVKDEKLKLAFFHVLGNTVVANDLDQASRIAYTAAKEFRRVVTLGGELFEKSGTMSGGGKRVQRGMMGTAIRESFSEEAIKNAENELTKLVDELNKLREKMNNAKKQYRSMEDAKSRLEMELAKAKKEVESMNAQYIYNEKRLDSLKTASQPKADELRRMQELDGIISSEQAELERLTKCSSKLKDQASAYRQSRFHFQASELQQKVENAGGKKLKDQKTKVGNIQSELDKTSSEINRHKVNVTSGEKLVKRLTKGIEESKKDREKLSAETEKMMSMFKEIEKKAFVVQEEYKKTQEMIDNHKVELDKTKEEYTKLKKAMDELRATEVDAEYKLQDTKKLAKEWEMKVKTFKKRLDEIQINVVKHMDQIQKDAVDPDKLKATLGDEQLNDTYDMKRAMEMVALLEAQIKDLNPNLDSIAEYRTKACLYGERVDELNATTQERDDLKKLYDGLRKRRLDEFMAGFNIISLKLKEMYQMITLGGDAELELVDSLDPFSEGVVFSVRPPKKSWKNIANLSGGEKTLSSLALVFALHHYKPTPLYVMDEIDAALDFKNVSIVGHYVKDRTKDAQFIIISLRNNMFELADRLVGIYKTDNCTKSITINPGSFAESMKVV

SEQ ID NO: 15037 - protein, 210 aa, Zea mays
  VARIANT 8: note = Ancestral polymorphism is M, Derived polymorphism is T
MQQMEWDTRGGGGGGGGGGGGHGGAVGDGGPRGGGLTVGGVAVGVADQQRVEAHYRGVRKRPWGRYAAEIRDPWRKTRVWLGTYDTPVDAAMAYDRAAVALRGAKARTNFAAGRGSRATPPVQARPLPYPALAPGHFGVLDGARSSPWHVVYLPPPRLHHAVAPPMPLVAVAGDAASSLPSTALELRTGPKALPFDLNEPPSLLLGSRSP

SEQ ID NO: 15038 - protein, 71 aa, Zea mays
  VARIANT 37: note = Ancestral polymorphism is R, Derived polymorphism is C
  VARIANT 43: note = Ancestral polymorphism is H, Derived polymorphism is Y
  VARIANT 49: note = Ancestral polymorphism is E, Derived polymorphism is D
  VARIANT 53: note = Ancestral polymorphism is G, Derived polymorphism is E
MAETRTACGMVDDVQNAPTGCESDLEAIELACFSHERDARTMHFTVEVDAGSGKKLCKAKVGAVWNNFKQL

SEQ ID NO: 15039 - protein, 135 aa, Zea mays
  VARIANT 22: note = Ancestral polymorphism is P, Derived polymorphism is L
  VARIANT 48: note = Ancestral polymorphism is D, Derived polymorphism is E
  VARIANT 49: note = Ancestral polymorphism is K, Derived polymorphism is N
  VARIANT 54: note = Ancestral polymorphism is S, Derived polymorphism is F
  VARIANT 60: note = Ancestral polymorphism is I, Derived polymorphism is T
  VARIANT 63: note = Ancestral polymorphism is P, Derived polymorphism is L
  VARIANT 67: note = Ancestral polymorphism is V, Derived polymorphism is G
  VARIANT 70: note = Ancestral polymorphism is L, Derived polymorphism is F
  VARIANT 78..135: note = Derived polymorphism lacks residues 78 to 135
  VARIANT 83: note = Ancestral polymorphism is G, Derived polymorphism is E
  VARIANT 86: note = Ancestral polymorphism is Y, Derived polymorphism is N
  VARIANT 92: note = Ancestral polymorphism is L, Derived polymorphism is V
MLHGLKWTGLGVFGILEYCSHPDRLSLPNKFCPLIIAISLKNYDPQKDKRFSGSVKLPHIPRPKMKVCMLGDAQHVEEAEKMGLDYMDVEALKKMNKNKKLVKKLAKKYHAFLASETIIKKIPRLLGPGLNKAGK

SEQ ID NO: 15040 - protein, 51 aa, Zea mays
  VARIANT 3: note = Ancestral polymorphism is C, Derived polymorphism is Y
  VARIANT 6: note = Ancestral polymorphism is T, Derived polymorphism is I
  VARIANT 9: note = Ancestral polymorphism is E, Derived polymorphism is G
  VARIANT 22: note = Ancestral polymorphism is D, Derived polymorphism is G
  VARIANT 25..51: note = Derived polymorphism lacks residues 25 to 51
  VARIANT 31: note = Ancestral polymorphism is A, Derived polymorphism is D
  VARIANT 38: note = Ancestral polymorphism is P, Derived polymorphism is L
MYCVLTGQETPVNIHRHHMGYDCYRILEAKAKENAPSPAFPLQADLCVQLS

SEQ ID NO: 15041 - protein, 121 aa, Zea mays
  VARIANT 18: note = Ancestral polymorphism is V, Derived polymorphism is M
MRHGTRLLCALALTLLCMATHFQGASCRGGGGGGRGGGGGGGGGGGGRGGGSGTGGGRSGRGRSGRPFLGGVGAGAAAGVGARTAAGGSHGHRSVAAGGAGGPGVWRVAGAGAALTAALLA

SEQ ID NO: 15042 - protein, 97 aa, Zea mays
  VARIANT 23: note = Ancestral polymorphism is R, Derived polymorphism is L
  VARIANT 40: note = Ancestral polymorphism is S, Derived polymorphism is N
  VARIANT 52: note = Ancestral polymorphism is G, Derived polymorphism is S
  VARIANT 77: note = Ancestral polymorphism is A, Derived polymorphism is T
MGNCACHASSSRHGAEPPAWAELGQERERSVKVTVRISRNRLQKLMASGVGGAEGMTTTLGSVLAEIVSAGEVVVDARHRRRGWEPALESIPETMES

SEQ ID NO: 15043 - protein, 323 aa, Zea mays
  VARIANT 15: note = Ancestral polymorphism is F, Derived polymorphism is S
  VARIANT 27: note = Ancestral polymorphism is G, Derived polymorphism is V
  VARIANT 220: note = Ancestral polymorphism is Y, Derived polymorphism is H
  VARIANT 296: note = Ancestral polymorphism is A, Derived polymorphism is S
MASWAALLALLLSAFSAAAQLDERFYGQSCPSVEDVVRKEMVRALSVAPSLAGPLLRMHFHDCFVRGCDGSVLLDSTANNTAEKDAKPNLTLRGFGFIERVKAAVEKACPDTVSCADVLALMARDAVWLSKGPFWAVPLGRRDGRVSISNETDQLPPPTGNFTELAQLFGAKGLDTRDLAVLSAGHTIGTSHCFSFSDRLYNFTGLDDARDTDPELDRAYMARLRAKCASLDDNTTLVEMDPGSFRTFDLGYYANVAKRRGLFHSDAQLLADPSTRAYVLRHATGAHRDEFFADFAASMVKMGSVGVLTGGQGEVRKKCNVVN

SEQ ID NO: 15044 - protein, 422 aa, Zea mays
  VARIANT 349: note = Ancestral polymorphism is M, Derived polymorphism is T
  VARIANT 265: note = Ancestral polymorphism is I, Derived polymorphism is L
  VARIANT 166: note = Ancestral polymorphism is G, Derived polymorphism is V
MIRAPRLLAAHAPSPIRHRLSLAPISTIYRRLPWSPRAAFLAAQAPISTTRLASSSRLVPLLALPMDPAAPEPVPAPATDTDAETNGYEDASEFEDAEAGGEGAGAGTETGTGTGSGSGTMPAGGVAEMKELPEELAKGVVCLECETSAEAAVSGVGGTCRVYVVGTAHVSQESCDQVKAIINYLKPQAVFLELCMSRVAILTPQNLQVPTMNEMIDMWKKNKMNTFGIIYSWFLAKVASQLEVLPGAEFRVAFEEAMSYGGKVILGDRPVQITLRRTWGKMSLWHRAKFLYYIIFQSVFLPSPEELNKMLKDMDDVDMLTLVIQEMSKAFPSLMDTLLHERDMYMSSTLLKSAREYSSVVAVVGKGHVSGIKKNWQQPIQVNCLLELPDANQGPSKLKILASIGALTGVIIASGIYVWGRK

SEQ ID NO: 15045 - protein, 135 aa, Zea mays
  VARIANT 67..135: note = Derived polymorphism lacks residues 67 to 135
  VARIANT 90: note = Ancestral polymorphism is S, Derived polymorphism is I
  VARIANT 107..135: note = Derived polymorphism lacks residues 107 to 135
MDAGSSERAQDIAQQREGMMRRCCTSSLNPSTSSRSPTSSRRPRAGAAEPKLRPAPKTEGKDRSAAQPAAANVDSEESRAEVVGGGSFHSINDGVLLTFYMSRAPTWSFIVRLARTPSSASICRSPNVASDCSKR

SEQ ID NO: 15046 - protein, 112 aa, Zea mays
  VARIANT 3..112: note = Derived polymorphism lacks residues 3 to 112
  VARIANT 34: note = Ancestral polymorphism is Q, Derived polymorphism is P
  VARIANT 40..112: note = Derived polymorphism lacks residues 40 to 112
  VARIANT 41: note = Ancestral polymorphism is E, Derived polymorphism is K
  VARIANT 102..112: note = Derived polymorphism lacks residues 102 to 112
MEQRFFDVATRDNKDNTKEEASETKEAVANQDAPEKNKGSENGVEGQSGGDVNMAEAKITKEGDDDVVLGKQVDSSDVDLKQSNILVGDDIKVKVADVGLVWLAPTVGKCVP

SEQ ID NO: 15047 - protein, 344 aa, Zea mays
  VARIANT 274: note = Ancestral polymorphism is G, Derived polymorphism is A
  VARIANT 196..344: note = Derived polymorphism lacks residues 196 to 344
  VARIANT 147..344: note = Derived polymorphism lacks residues 147 to 344
MASNNLLNLPPFKIALNPPPPPLPTRPSVFLAPRQIPPCRSLLRSKPPPRQGVRSSTSPQLDTANTPSPPSSRQEAVAQARSCLATALQKPLNSSIPLKRQRQPRFRAEIPVVDESPGSLARLAFDVLSGGAGASRKGAPARLLLIWPSAEALSVALREFEDQGDSATAHARLGSMAPDALGACDAAVFLATGPAQVEQVKAAAAALEPRPVVLFNPSWSFDEEGDGEKFGAGARGFVGSFDVVYSFTGLEVRGLLSKKRGVLLRCAEAGRFGGEGWVLMVENDGGASDGQEFKVVSRLKKRPTIGEVESMLYNIMAANSPVTKSARFLREIVSNVTGAKSKAQ

SEQ ID NO: 15048 - protein, 101 aa, Zea mays
  VARIANT 37: note = Ancestral polymorphism is T, Derived polymorphism is P
MGLFSWWRGGRRGGAPPDQQASAVAGVVGTDVAASGTHGAVEVRRQRQAADATVFEFGSAAESGAAVTLAGYCPVSDELEPCRWELVPAAVDGAPQFRIVF

SEQ ID NO: 15049 - protein, 197 aa, Zea mays
  VARIANT 34: note = Ancestral polymorphism is S, Derived polymorphism is C
  VARIANT 101: note = Ancestral polymorphism is S, Derived polymorphism is C
  VARIANT 140: note = Ancestral polymorphism is G, Derived polymorphism is S
MPGRRAIDVRLLPGGGDAAAAPKWRMSLLENTFSGFLQGAGADTAARAVFAEGSLFCPFLFGNFFDPADPFPLWEFESDVLLAALRRGNARTTVDWAETDCEYYLRADVPGGRRCDVEVSGDAMKVIDICGLWRAPAADGRDWRCGRWWEHGFVRRVELPEDAEWRKVEAHFDDCEGALEIKVPKTADDDDAHHATA

SEQ ID NO: 15050 - protein, 426 aa, Zea mays
  VARIANT 63: note = Ancestral polymorphism is A, Derived polymorphism is D
  VARIANT 122: note = Ancestral polymorphism is E, Derived polymorphism is D
  VARIANT 143: note = Ancestral polymorphism is R, Derived polymorphism is C
  VARIANT 198: note = Ancestral polymorphism is V, Derived polymorphism is M
  VARIANT 281: note = Ancestral polymorphism is G, Derived polymorphism is C
MEQELRTGGRGGGNLRAHSSACLSGALIDGPRIQQLLLHCAAALESNDVTLAQQAMWVLNNIASSQGDPSQRLTSWLLRALVARACRLCAPPGSTTQSAAAAAAARTPAPRERAMSVTELAEYVDLMPWHRFGFTASNGAILRAVVGSAAVHVVDLSVTRCMQWPTLIDMLSKRPGGPPELRITVPSARPAVPPQLGVSDAEIGLRLANFAKSKGVQLHFSVVEGVTSPPPEKQAAALCQDLASVLSDRQALGLRDGEALVVNCQSWIRHVAPGSRDAFLGAVRALNPCLVTVTDEDADLDSPSLATRIAGCFDFHWILFDALDTSAPRDSPRRAEHEAAVGRKIEGVVGADDADGAERSESGARLAERMRRNGFVSVAFDEEAAGEVRRLLSEHATGWGMKREEDMLVLTWKGHGAVYTSAWMPN

SEQ ID NO: 15051 - protein, 224 aa, Zea mays
  VARIANT 66: note = Ancestral polymorphism is R, Derived polymorphism is H
  VARIANT 88: note = Ancestral polymorphism is P, Derived polymorphism is R
  VARIANT 134: note = Ancestral polymorphism is P, Derived polymorphism is S
  VARIANT 157: note = Ancestral polymorphism is P, Derived polymorphism is L
  VARIANT 167: note = Ancestral polymorphism is A, Derived polymorphism is V
  VARIANT 175: note = Ancestral polymorphism is A, Derived polymorphism is V
  VARIANT 184: note = Ancestral polymorphism is T, Derived polymorphism is I
MAAVATLSLLYLLRHASIYCSPASHQPALTISLASFPRTSCDAASRRVVPPDHRLAKLRASPRWRRRAASLATSAFPPLRGLGILATPSRVLCLAAGAGHAVDAFRAAGTRDATGIDLVDFPPLVRRADPHHLPFSDGAFDLVFSDDPSATSGALFPSRLAREAERAVRRGGGIALAFDREIETAVVATLFKRSRVLDVKDVTLDGSHVRLLIMQSNGTTTDPY

SEQ ID NO: 15052 - protein, 88 aa, Zea mays
  VARIANT 15: note = Ancestral polymorphism is P, Derived polymorphism is L
MTTHGVVSCPPPWLLVLKKRPAGLPARLCSRHSPPVASKKAFICAAIMPNRVGKPKRMPSAGLGELLRRDDRRVRLGWCAHLAEHLLG

SEQ ID NO: 15053 - protein, 44 aa, Zea mays
  VARIANT 34: note = Ancestral polymorphism is G, Derived polymorphism is S
MMAAQMKAFFDATGGLWREQSLAGKPAGLFFSTSSQGGGQETTP

SEQ ID NO: 15054 - protein, 169 aa, Zea mays
  VARIANT 139: note = Ancestral polymorphism is R, Derived polymorphism is W
  VARIANT 107: note = Ancestral polymorphism is G, Derived polymorphism is E
  VARIANT 106: note = Ancestral polymorphism is G, Derived polymorphism is R
  VARIANT 94: note = Ancestral polymorphism is T, Derived polymorphism is I
  VARIANT 86: note = Ancestral polymorphism is T, Derived polymorphism is I
  VARIANT 85: note = Ancestral polymorphism is V, Derived polymorphism is D
  VARIANT 84: note = Ancestral polymorphism is T, Derived polymorphism is I
  VARIANT 79: note = Ancestral polymorphism is A, Derived polymorphism is T
  VARIANT 64: note = Ancestral polymorphism is S, Derived polymorphism is T
  VARIANT 49: note = Ancestral polymorphism is T, Derived polymorphism is S
  VARIANT 36: note = Ancestral polymorphism is S, Derived polymorphism is L
  VARIANT 27: note = Ancestral polymorphism is C, Derived polymorphism is R
MAPEECAPAAVEAGLAAKLQLVIQSGCALELKQKASELLKLCRLNYTDTPSISKCKLTRTIHFTSSILAEEIWVVEQMARLVMTDTCRSGNGITEAIHFVEWGEKGGRQFLTPAGILTFNRNSMSAKDKATRKDQIDLRVGCLRLTSRRWCKKLNCVPRRIRNGKALII

SEQ ID NO: 15055 - protein, 751 aa, Zea mays
  VARIANT 213..751: note = Derived polymorphism lacks residues 213 to 751
MGRQPKPPASPSPPPCPPSDSDPDPGSGFDPIEEWLVDFDPAMSSELEAKGPELAEQAAAVPLTLETAAQKSFELEFGVKDQKVEVVSSELDGLLAPDQLLVSGIGDLAVREDIPEEAVAMKMAATPPAAADTDMNTTVSVEVESEGGKEGQEAPAAPADAEMMNTMVSVEVEAQGGKEGQESSDEESESESSEDDDELSSSEDSSSSEDEKEQGVNKDEESSEASSSEEEGLEVRRHGGKADNLQSLLEEGELMMGSDVENEEQKGGTKSKYEAEVLPPVPKIEIQLEPHHQTLPVGTISAIMGERVIVEGSVQHNPLNEGSILWITESRMPLGIVDELFGPVKNPYYLVRYNSEEEVPAGISAGTDVCFVAEFADHILNMKELYAKGYDESDSVDKDAEDLPDFSDDEKEAEYKRSLRQAKRQTDRQHEPMKTSCYMKGSQPRGSGIRKPMPPRNLDTSTRGHQPQPHFRRSDMAPAGTENTARSLGPQNAPMIAPTMLQPGPMNPAVPPPVPLANQMGGCFMNLAQQQLLPQQPNMVWPGGFPQPPLPNMGVDGAALAANIMQNLLAGASQFQHQFQNLNFSGAGANQFPQQFQNQNFSGGTGANQFPQQFQNQNLSGPGTNQFQQQFPNQNFSGFPNQMPMPFLQTMHQTGMPANPMPFGGRPPANPPSGPASIAPMGQGNFGQPPNPQGFTIPAPPGEDGKQGSPPQFSSRQFHQGSSSSFGRGRTQHRGGRHSYGRGGRGGRHPR

SEQ ID NO: 15056 - protein, 60 aa, Zea mays
  VARIANT 2: note = Ancestral polymorphism is A, Derived polymorphism is V
  VARIANT 8: note = Ancestral polymorphism is R, Derived polymorphism is M
  VARIANT 25: note = Ancestral polymorphism is S, Derived polymorphism is L
MAATLKLRILIVAAAVAASLVGTASAAEGPAPAPTSAAASMAAPAVAAASFTALVFGYLF

SEQ ID NO: 15057 - protein, 85 aa, Zea mays
  VARIANT 9: note = Ancestral polymorphism is M, Derived polymorphism is I
  VARIANT 11: note = Ancestral polymorphism is L, Derived polymorphism is Q
  VARIANT 15: note = Ancestral polymorphism is A, Derived polymorphism is V
  VARIANT 16: note = Ancestral polymorphism is L, Derived polymorphism is I
  VARIANT 24: note = Ancestral polymorphism is A, Derived polymorphism is T
  VARIANT 44: note = Ancestral polymorphism is T, Derived polymorphism is I
  VARIANT 57: note = Ancestral polymorphism is K, Derived polymorphism is M
  VARIANT 58: note = Ancestral polymorphism is G, Derived polymorphism is C
MADATLTLMLQTIVAILVSGGATAELRPGQCTRINMSHSGMRCTPGDACPAICARIKGKDGKCKNGACMCTMCAPSSYHPIKSSK

SEQ ID NO: 15058 - protein, 266 aa, Zea mays
  VARIANT 21..266: note = Derived polymorphism lacks residues 21 to 266
MEQLLLSDEGLAVVVPILVYWAYCGLHVVLGQSMYMDRYRLHPSAHEDSKNYVSKRQVIGNVLKQQLVQVTIVAMVFKLTGGRSTSSTTTEASSYLKLACQILVAMVFFDVWQYACHRTMHASRFLYRNLHSWHHRLVVPYAFGALYGHPLEGFVADTVGGTAAFLVSGMSPRASVFFFSLCTVKVVDNHCGLSLLPCWDRLGLWNSAAYHDVHHQLRGGQYNFSQLFFVVWDRVFGTHMPFVIEDRAGGGGMLQVRAPGLDYRSK

SEQ ID NO: 15059 - protein, 31 aa, Zea mays
  VARIANT 25: note = Ancestral polymorphism is W, Derived polymorphism is S
MFNGTNISIRSLLAMSKSLLADSDWRPLKVQ

SEQ ID NO: 15060 - protein, 96 aa, Zea mays
  VARIANT 21: note = Ancestral polymorphism is D, Derived polymorphism is N
  VARIANT 25: note = Ancestral polymorphism is G, Derived polymorphism is S
  VARIANT 44: note = Ancestral polymorphism is D, Derived polymorphism is E
  VARIANT 58: note = Ancestral polymorphism is V, Derived polymorphism is I
  VARIANT 59: note = Ancestral polymorphism is V, Derived polymorphism is I
  VARIANT 63: note = Ancestral polymorphism is G, Derived polymorphism is S
MACRFSILLAIATLAMMFAVDQEHSGDDFSFTLKEGPTVTWTLDTKAPLKYPFCIRFIIKSSSYGITNNVILPISRPAPSAYDHPLMTNNLSKELI

SEQ ID NO: 15061 - protein, 120 aa, Zea mays
  VARIANT 3: note = Ancestral polymorphism is S, Derived polymorphism is F
  VARIANT 10: note = Ancestral polymorphism is A, Derived polymorphism is V
  VARIANT 11: note = Ancestral polymorphism is M, Derived polymorphism is T
  VARIANT 13: note = Ancestral polymorphism is A, Derived polymorphism is V
  VARIANT 19: note = Ancestral polymorphism is A, Derived polymorphism is V
  VARIANT 21: note = Ancestral polymorphism is G, Derived polymorphism is S
MASRSSILLVMVALATLFVVGSCTTPLTFQVGKGSKPGHLVLTPNVATISDVEIKEHGGDDFSFTLKEGPTGTWTLDTKTPLKYPLCIRFAVKSGGYRIADDVIPANFKAGTTYKTTLSI

SEQ ID NO: 15062 - protein, 64 aa, Zea mays
  VARIANT 20..64: note = Derived polymorphism lacks residues 20 to 64
MLSCARSMLQKSGLESSLPQRSHPSDVKKENYIDLSYALKVDVIKKKHLDVAAHGFRENKHARC

SEQ ID NO: 15063 - protein, 97 aa, Zea mays
  VARIANT 25: note = Ancestral polymorphism is L, Derived polymorphism is F
  VARIANT 42: note = Ancestral polymorphism is T, Derived polymorphism is M
  VARIANT 63: note = Ancestral polymorphism is W, Derived polymorphism is S
MDAPLRGKSTARAAWRRPAVSCLLFVFVLVLLISTTATATATTVQSRQAGLTSRQRGSGFRAWRRDVLRPDRTAGEAWAPPAPKANSNVPGGPFGRR

SEQ ID NO: 15064 - protein, 120 aa, Zea mays
  VARIANT 3: note = Ancestral polymorphism is S, Derived polymorphism is F
  VARIANT 22: note = Ancestral polymorphism is S, Derived polymorphism is L
  VARIANT 74..120: note = Derived polymorphism lacks residues 74 to 120
MASRFSIMLATTALATFFVIGSCTTPLTFKVGKGSKPGHLVLTPNIATISEVEIKEHGGDDFSFELKEGPAGTWTLDTKAPLKYPLCIRFAIKSGGYRIADDVIPENFKADTTYKTTLSI

SEQ ID NO: 15065 - protein, 298 aa, Zea mays
  VARIANT 184: note = Ancestral polymorphism is R, Derived polymorphism is G
MASSKRRFGAAGGADKKDLFHVVHKVPAGDSPYVVAKHLQLVEKQPDVAIVWFWKAINSGDRVDSALKDMAMVMKQQDRSEEAIEAIRSFRHLCSKQAQESLDNLLIDLYKKCGKVEEQIELLKQKLKSIYLGEAFNGKATKKARSHGKKFQVSIQQETSRILGNLGWAYMQQNNFEAAELVYRKAQAIEPDANRACNLGLCLIKQGRHDEARQALEDVRLRRIYGSEDGKVVARAEQLLRELNPLQCVSSPFQVGLSVHEGIMGKPDLVVMNEWTPFRSRRLPVFEEIATFRDQMAC

SEQ ID NO: 15066 - protein, 318 aa, Zea mays
  VARIANT 243: note = Ancestral polymorphism is S, Derived polymorphism is L
MELFENARSVRLKSHLGTYLCAADDAEAVSHGYRRNSRGTVWAVEPAGDEYVRIQGQRGLYLGAADPTAALDAATPSCRVVQGVPSTPNDSAFLWTPRRERGAGCLTLSGPLGRLLRASFGETPRDNAVTLDFDVGPEESAWVVEAVPAEQAARPPPCRAQSCDARMQATAATTSDTASSSFIRFYSTKEPKTKLEEPPPTEEPLHMPARRTIFHNTAREDGAVDDFDEGTWRYFTFDEQSLSALSRRLQEETKHKDFVICRRSAGGDAPRLFPVVLDLPPGNDEMEFVLVLVPSTGALLLLLIKNILGTYANVVHHL

SEQ ID NO: 15067 - protein, 1609 aa, Zea mays
  VARIANT 723..1609: note = Derived polymorphism lacks residues 723 to 1609
MAVKGKGKQVAPESPGPGGGGASGAGGKRRKASGDTGEGPSSSSAAKRRRRAGVLQFVDDVAGVDDDNEDEDEDELESEDDPDDGFFTGGEHAEKLSHKRTERSHPLPFLVKEEELSGDELEEFIKNRYSNRVKYAADRSYSREDDDIFPMDCALKEPTIWRVKCMVGRERQMAFCFMQKFVDLRKIGTKVPIITAFALDHIRGFVFVEAEKAGYVTEACKGFCSVYTSRITSVPATEVPSLLSSRTKPFEISRGTWIRMKNGNYKGDLAQVVNMDSGRKKVMIKIIPRVDLHAISKKFGGAVSLKEAAVPAPRLISSQELEFFRPHIEIKRDRQTGEVFEVLDGLMFKDGFLYKKVALSSLIYWGIQPTETELLKFSSSPSNRASADDLDWLSGMYGSKKRNLPAERDMKSSSSKIKSSKAPDLKGSTSTENYDDNDEFNLHDLVLYGRKDFGVIIAVEKDGFRILKGGPEGSAVTVRKQDIKKGCVDKMFTAVDHHKKTISINDTVNVVEGPFQGKQGLVKHLYLGILFIFNESESENCGFFCAQSGSCEKIRKGLGSSTTENSDFPTPMFSEPAYEQNEHRNTEGPYRSTREQLFSIGQMLRIRKGPLKGYLCRVVRIFRNDVTVKLDSLLKIVTVQADLLSVPANRGDNLSGAPASKFGSQDTPFFGSEAGKTSWDRGLPSFGSDSWQPFSSSTLPVQNAAGCGTCTFSGAESEADPWCKKTSAEDDSDPWGKKTDGDSDPWGKEAVSAADGDCNPWGKETVPSAAGDSDPWGKKVFSADGDSDPWGKKAISSAVEVWNTSATQKEGSSGNAWDKQAGVGGSDAAGSSWDRAVVNKESEKSDNWGEACRVMDMGTGADTDPWGSKVKAVDMEGPNSWEKATMPPDNKLEDVSQGWNQHKGNSTEDQAKDNVSKDEDNNRAWSSSLPVTEDGTWGKSKDDNCDGAGGAGGWDASVANWNKSSVLADAQDEGWGKGNWSSAKSEETNNEIGNWNKAGASDQAGPKSFGGDGWNKGGDQNSSWNSPGNFGGGRGFGRGRGRVRGRESGDFNGRNDQGNWKNSWGGDNAEKSSWRSDNQVDNEAGDSGGYRGRGRGGRGQYGGRGRGRDNGWRNGDGPKWGGGDNWNATNPPSNQPWSSSGGTKSYGQNQPSTWNNPEDNKPSVGEQGDPWASKVSSTEGKGQQNDSWSSKMTSRGAEDTSGGWDSKEKGSSCNGGGEGLQNDPWANKIGSNEGKEQEADPWASKMSSAVGADDKNGTWDTTTKGTLSNEKADDPWNSKRGNDDDSKKTDAWGAGSSGGNQESSWSKPIFSLGDQEPTWNNPRFGDDDNVNNRGGFGRGNQGRGRGRSFGGGGGGSSWNESNKNGESGGGRSGEPWNRRGFDGGRGRGRFGRGDRNQGNNLGSGDGGSWGSGRGNGGGRGGYRNWNDNNERRPFGQGGGWSQSSDWNANKGSGEGNQAFSKSKPSWDAQNASGGDDQAGKKSDTDNSWSQNRSSPSILGQPSGDANNKSSAWDGAPNGGAGRGGSGSWGKSDEDGWNSSSGGSAREKPSWGGGAEAPPRKEDDGAWGKGGEGSRSLGGGGEGGSSSSWDKPADGAWSGNNKGGSGSGGW

SEQ ID NO: 15068 - protein, 128 aa, Zea mays
  VARIANT 62: note = Ancestral polymorphism is V, Derived polymorphism is I
  VARIANT 85: note = Ancestral polymorphism is T, Derived polymorphism is A
MAASEAAAAAATPVTPTEGTVIAIHSLEEWSIQIEEANSAKKLVVIDFTATWCPPCRAMAPIFADMAKKSPNVVFLKVDVDEMKTIAEQFSVEAMPTFLFMREGDVKDRVVGAAKEELARKLELHMAS

SEQ ID NO: 15069 - protein, 128 aa, Zea mays; identical to SEQ ID NO: 15068
  VARIANT 62: note = Ancestral polymorphism is V, Derived polymorphism is I
  VARIANT 85: note = Ancestral polymorphism is T, Derived polymorphism is A

SEQ ID NO: 15070 - protein, 108 aa, Zea mays
  VARIANT 2: note = Ancestral polymorphism is W, Derived polymorphism is R
  VARIANT 67: note = Ancestral polymorphism is Q, Derived polymorphism is R
  VARIANT 93: note = Ancestral polymorphism is L, Derived polymorphism is R
MWMAYSMSYVVVFYAVGIIQDVPFRAAAAWTSGSCCCCLVLKTVAKIATGRNASYQDAIWAFDLGTQRAQGAAGQRCRQDMGFYLAFALFKVLKRRFYGYVPAEARLG

SEQ ID NO: 15071 - protein, 1300 aa, Zea mays
  VARIANT 996..1300: note = Derived polymorphism lacks residues 996 to 1300
  VARIANT 1110..1300: note = Derived polymorphism lacks residues 1110 to 1300
  VARIANT 1166..1300: note = Derived polymorphism lacks residues 1166 to 1300
MAGSVVTDDSAASTTGMRDDENSLSGESFSEWRSCDRADSDTPSTSPPFWDSDGDDDDPGPKPSELFGHHTWRIENFSKEKKREMKSEPFEAGGYKWYILVYPQGCDVSNHLSLFLCVANHDKLLPGWSHFAQFTIAVANIDPKKMKYSDTLHRFWKKEHDWGWKKFMELSKIQDGFLVDDVLEIIAQVQVIREKVDRPFRCLDRPYRRELIRIYMTNVEQIYRRFVEERRSKLSKLIEDKMKWSSFRAFWSAIDPNTRHHMSREKTETILKILVKQFFVEKEVTSTLVMDSLYTSLKALEYRMKSKKCKTKLADLEELPAPMVHVDMDMFVLADDVIALLERAALEPLPCQPVAPKDDKTSQSRMKVGIIQFDMLYLGFISKFCDGSSGEVYKVSMEREERRLTELAQKILETFVLSHIFSGIEVAYQEAVALKRQEELIREEEEEAGLLEHQMKGKRGGGANEKDKRAKKKQTKQKKNNRKAKDKERDVKCEVKILERLHDETVIDNSDGLPAKVEVIAKVDALEEGSSDGSDMPNRGKNQCNKGLSISLAKEGDGLPSTSSVTGGSGRNSSGCCTAPKLDQDTVLLTLRDKLRKLGQRLQEKNIEGQKLLKAHFEARDTKVKVEESSDSSNSLDRPPDVPESSMHSSEDTVDLKVNGTPNKDASVVNPVLEESVSGIPVTAKNESLPSARTKEGPVSNKDNASSLKMKTMASCLKLHPADVDKDAPFPSKSPRINRAAPVPSKLPSADKATPVLPKSSLSVNKAALVRPKSPAVDKATPVCPESPAVDKVTPVRPRSPAVDKATPVRSQSPAVDKATHVCPQSPSVDKATPSIDKATPVRPKSPAIDKVTPIPPKSPPVDKASPAPPKSLSGAKDVPVPSRSLQIDRFIPAPPRLSQVDKAALPSSEQPHISPATNSEAQGATTSRKVTASSVLEVAAASRPSSAPVLPTPRSTAPVASHIQTSTLLSRSMSEAAGRRSVNDPSFSAPSYTPQTYRNAIIGKTGLATTSANLAYQSYSLGQDTAPSQPLSAYASSTAVMMPPAGRSDQSSARHGFKSGSGKLEAHDSWQQWKGDNNVDMHLWRDHTTYQQMTRGQAYDQSRRDDTYQQTCSRGTEKFSRHAGLQARQFQTETPASHVWHQQQGQVAEEFPHLDIINDLLEEDQINGSIPESFHQDYNVFGLPFSPRGNVSDMGMASVRSPARFNSTKYEYDGGFSGAYDINAVNGLRERQFPSLDSYSNGLSDVSASKPWLNGSPSPSVMSLGVNTNGYHPQVADYPSLGNGVNGVSLWRRHANGRW

SEQ ID NO: 15072 - protein, 316 aa, Zea mays
  VARIANT 13..316: note = Derived polymorphism lacks residues 13 to 316
  VARIANT 25: note = Ancestral polymorphism is S, Derived polymorphism is N
MVPVAHCNRSPVLLLMGGGMGAGKSTVLKDILKEAFWSGAAANSVIVEADAFKETDVIYRAISSRGHHNDMLQTAELVHQSSLDAASSLLVTALNEGRDVIMDGTLSWEPFVQQTIAMARAVHRQRYRMGCGYKLTDDGTITEEYWEPVEDSNTDEENEVPARKPYRIELVGVVCDAYLAVVRGIRRAVVTGRAVRVKSQLQSHKRFATAFNSYCSLVDNARLYSTNTLGVPKLIGWKDGESSLLVDPEEIGCLDRLRSLNEEADCVHELYADGQPTGGSSSAWQDLLVMSPSRVSAQRELKAAIERNEGRFVKPA

SEQ ID NO: 15073 - protein, 324 aa, Zea mays
  VARIANT 31..324: note = Derived polymorphism lacks residues 31 to 324
  VARIANT 207: note = Ancestral polymorphism is R, Derived polymorphism is C
MRRKRKTGRLFYFYLASQASQGGHTPIPPPSPAPSSPTAGHATMLPPAARLAARRLLGLASASASEAAGRRVASSPIASAGYSAAASRGSVSSTRPFSTALNYHLDSPENKPDMKWEFSQANMKKVNEILSHYPSNYKQSGIIPLLDLAQQQHGGWVPVAAMDAIAKIVEVAPIRVYEVATFYTMFNRTKVGKYHLLVCGTTPCMIRGSREIEETLLEHLGVKRNEVTSDGLFSVGEMECMGCCVNAPMIAVADYSKGSEGYTYNYYEDLTPKRVVEIVEMLRRGETPPRGTQHPERKNCGPAGGNTTLHGEPKPPPCRDLDAC

SEQ ID NO: 15074 - protein, 482 aa, Zea mays
  VARIANT 318: note = Ancestral polymorphism is Q, Derived polymorphism is L
  VARIANT 58: note = Ancestral polymorphism is R, Derived polymorphism is C
  VARIANT 43: note = Ancestral polymorphism is D, Derived polymorphism is G
  VARIANT 37: note = Ancestral polymorphism is R, Derived polymorphism is C
MVLAELGGSIARALARMSNATVVDEKVLADCLNEICRALLQADVRFDTVRDVKANINRIVNLDALAAGTNKRRIIQQAVVDELRRMLDPGKPSFTPSKGKPNVVMFVGLQGSGKTTTCTKYADYHRRKGFNPALVCADTFRAGAFDQLKQNATKAKIPFYGSYTESDPVKIAVEGVDMFMKEKYDLIIVDTSGRHKQEAALFEEMRQVSEATKPDLVIFVMDGSIGQAAFDQAQAFKQSASVGAVIVTKMDGHAKGGGALSAVAATKSPVIFIGTGEHIPDFEFTTVYLTSVYLSGMGDLSGLVNKIQEFMPDNQQMQIMDKLGEGTFTLRLLYEMFQNLQRIGPLGQLVSMIPGFSGQFIEKGNEKEGQAKIKRYMTMMDSMTDAELDGTDPKLMNQSRINRIARGSGRRVEEVVHMLDEYKRIAKVWKKLPVLNNNRRSDMNRDIRRISDAIPPNMLTQLGGIAGLQNMIKQMGGRDRSR

SEQ ID NO: 15075 - protein, 92 aa, Zea mays
  VARIANT 3: note = Ancestral polymorphism is W, Derived polymorphism is C
  VARIANT 8: note = Ancestral polymorphism is R, Derived polymorphism is Q
  VARIANT 38: note = Ancestral polymorphism is R, Derived polymorphism is H
  VARIANT 41: note = Ancestral polymorphism is G, Derived polymorphism is R
  VARIANT 79: note = Ancestral polymorphism is A, Derived polymorphism is T
MVWWLTYQKRHSYATKSNQTRVVKTPGGKLVYQYTKKRASGPKCPVTGKKIQGVCVAHLSILSFRYCVRDKKALEKKAAKKTLLCLKQHLEI

SEQ ID NO: 15076 - protein, 535 aa, Zea mays
  VARIANT 11..535: note = Derived polymorphism lacks residues 11 to 535
  VARIANT 139..535: note = Derived polymorphism lacks residues 139 to 535
  VARIANT 199..535: note = Derived polymorphism lacks residues 199 to 535
  VARIANT 252: note = Ancestral polymorphism is L, Derived polymorphism is P
  VARIANT 271..535: note = Derived polymorphism lacks residues 271 to 535
MMEGGSRADGQNPNQLRLFTCIGNLLHRAHGCTRWAQGGIVMLSAVYGPKPGTVRGRTPEKASIEAVWKPRTGQIDTPLFPSSSFCPTAVRVIGSLKWRVVFAGRQEREYEMTLKRMLQSICLLTVHANTTTSVVLQAQGSLDRRDVFSLDTHSPSVCLLIQLEKAATEEGGVTPSVYSHKEPVHLAEKEKQKLQVWSRIMPCKESFAWAMIPLFEGNHAGGLSDAAHKYYISNLFQSITRYHLHVTPYLALILTRTFLLQLKRKHNDRTENEAAESNDWMSPGYANAGSSPVPTPPSGKGLKASTKPKATKGQKSGPETPLGFGSPGNLSTPVGGCRYDSSLGLLTKFLNLLKGAPGGIVDLNNAAETLEVQKRRIYDITNVLEGIGLIEKKLKNNIRWKGVDDSRPEEVSDDMSILQADIDALTLQERNLDERIRLDTSWRFDPAEIPTTIGGLVATVSDNVVSILDVERQAFARRFESHTKGVDSVCWDPTGEYVVSVSEDTMKVWSLNDESFVNELSCGGRKLSRYYMFQM

SEQ ID NO: 15077 - protein, 141 aa, Zea mays
  VARIANT 17: note = Ancestral polymorphism is W, Derived polymorphism is C
  VARIANT 40: note = Ancestral polymorphism is R, Derived polymorphism is C
  VARIANT 77: note = Ancestral polymorphism is R, Derived polymorphism is C
  VARIANT 101: note = Ancestral polymorphism is G, Derived polymorphism is R
  VARIANT 104: note = Ancestral polymorphism is V, Derived polymorphism is A
  VARIANT 112: note = Ancestral polymorphism is G, Derived polymorphism is R
  VARIANT 132: note = Ancestral polymorphism is K, Derived polymorphism is M
MLRTTKSHDVAIVSLNCAEDDPLSKSDKDEFLSYEDRTTRFFPPVMPRIGGLRSGDTGLADENEEAIPEFSNASCQCFNIVCSGGKDGCVCFSIFGIFPVGKIATFPVIGSGDLSTLTAHLEICSTQKYFVKLICSFKQSK

SEQ ID NO: 15078 - protein, 292 aa, Zea mays
  VARIANT 270..292: note = Derived polymorphism lacks residues 270 to 292
  VARIANT 253: note = Ancestral polymorphism is D, Derived polymorphism is Y
  VARIANT 238: note = Ancestral polymorphism is K, Derived polymorphism is E
  VARIANT 237..292: note = Derived polymorphism lacks residues 237 to 292
  VARIANT 235: note = Ancestral polymorphism is S, Derived polymorphism is W
  VARIANT 213: note = Ancestral polymorphism is G, Derived polymorphism is E
  VARIANT 211: note = Ancestral polymorphism is S, Derived polymorphism is F
  VARIANT 199: note = Ancestral polymorphism is E, Derived polymorphism is V
  VARIANT 192: note = Ancestral polymorphism is I, Derived polymorphism is F
  VARIANT 76..292: note = Derived polymorphism lacks residues 76 to 292
  VARIANT 4: note = Ancestral polymorphism is P, Derived polymorphism is R
MMPPPPLRLHLLFRSETLIPLLRQRPSCDAPHCRTRRYISVRASAAQLAAADVSTAQQPALELGLEAAAAGFVTGKRKATEVAHAFWRNIVQKGDTVVDATCGNGNDTLALLKMVADETGRGRVYGMDIQDSAIENTSSFLKMAVDDEHQRGLVKLFPICHSRMEEIVPKDAPVRLVAFNLGYLPGGDKTVITVPRTTELALRAASRILSSGGLISVLVYIGHPGGRTLNSGQIWLKEVVVALLIFFSLIPRDELDVVESFSSSLPVDTWVTCKLQMLNRPVSPVLVLLNKK

SEQ ID NO: 15079 - protein, 804 aa, Zea mays
  VARIANT 756: note = Ancestral polymorphism is P, Derived polymorphism is L
  VARIANT 726..804: note = Derived polymorphism lacks residues 726 to 804
  VARIANT 454..804: note = Derived polymorphism lacks residues 454 to 804
  VARIANT 437..804: note = Derived polymorphism lacks residues 437 to 804
  VARIANT 350..804: note = Derived polymorphism lacks residues 350 to 804
  VARIANT 315..804: note = Derived polymorphism lacks residues 315 to 804
  VARIANT 289..804: note = Derived polymorphism lacks residues 289 to 804
  VARIANT 203..804: note = Derived polymorphism lacks residues 203 to 804
MRGVRADGGGGAFSSSTAENSCFDAAQYSFFGKAPMEGAELGGLLEGGVDGDGGGFGGHDDAGYQFSSTGEEVRSLYLDIDCMSNLSEIDDLASTFAMLNRNISGTRNPGIIGDRRSISRESSLTADWVQDADFSNWVDQDILDGDESLDSKQWCSQLQSSPHFGESKPLSRTSSYPNQPLQHRSSEPILLHRSTSFTSYPPSGESPGLPYPAQGLTRHSSIPSPGAGHLMGSPSSSLSGSPYHMPGLSHGLPYGRNMSYTTGDLSTNNVLQNEWSNQAGPLVFDHLNRRPSFLQPHLSLSSSSMSSLLFSQQHQRLAPGQPPLQNYINMQPHLFHHHQPPDVPSPRDKRSRSGRGGKHNIRFSQQPSDAGSQHSESSGIKFRSKYMSSEEIESILKMQHSANHSNDPYFDDYYHQACKAKRSVTFQKSNFCPMSIKDFPSKSRSGVDQHSYLQVDANGGVSFSAIRRPRPLLEADLPGSGDGFYDHKSSKRSLEKEPMLAARITVEDSLRLLLVVDDIDRFLQSSQPQDSSFQLKRRREVLLEGLATSLQLVDPFGPNKHGHSGGLAPKDDLIFLRIISLPKGRKLLARYLRLLFSGSELTRIVCMAVFRHLRSLFGGLPSDYSAAETTIVLAKAVSSCVRHMELSALSACLAAVVCSSQQPPLRPLGSASGDGASLIIKSVLDRATELLADPHSAANYSRSARSLWHASFDAFFGLLTKYCDSKYESIVQRFAMQGSNSMGGPETTKAVSREMPVELLRASLPHTNEQHRQTLLDFARKSTHLPGFSPTANRGLVNSESVPG

SEQ ID NO: 15080 - protein, 538 aa, Zea mays
  VARIANT 57..538: note = Derived polymorphism lacks residues 57 to 538
  VARIANT 351..538: note = Derived polymorphism lacks residues 351 to 538
MTAAAVRFESHRLTHPSTSPPPESMVERRYTEEEEALEIKSLRRIIAAYANYQDAAERDVERYERSFKMLPTAHKKLLFHLGLKYQSLRWCISMNASFIMKMLEAFEPPFDMSQYVDDDVHAHPSILHDHSHMDCTHSSERGDCSIIAISRSNLSLDEQHDSPKEYTKRHEPSRETDNNKGGEDHMAGCSQPVGNMGMSQGAGIACNGDKNTGAAAYFQDKDVSASSAIENVALRHCTASSLKLNVPPIDVDKVRCIVRNIVRDWGDEGQKERDECYKPILEELNRLFPNRSDQRPPSCLVPGAGLGRLALDISSLGFVSQGNEFSYYMLICSNFILNHTQEANEWSIYPWIHSNCNSLSDNDQLRPVSFPDIHPSSAGITEGFSMCAGDFVEVYSEESQEYMYDGAMHFLTFFAILSVVPAAWDAVVTCFFLDTAHNIVEYIEIISKVLKDGGVWINLGPLLYHFADSYGPDDDMSIELSLEDVKKVAYHYGFTMEVEKMIETTYTANMKAMMQNRYRAAFWTMRKDASRSKACKPR

SEQ ID NO: 15081 - protein, 702 aa, Zea mays
  VARIANT 174..702: note = Derived polymorphism lacks residues 174 to 702
  VARIANT 200..702: note = Derived polymorphism lacks residues 200 to 702
  VARIANT 204: note = Ancestral polymorphism is R, Derived polymorphism is L
MAPSWWGRDARANGVVGGGTPVVVRMENPNWCISEVAAAASEVDAPPPAAAGGGKAGRRGKNARQITWVLLLRAHRAAGRLTGAASAALSVAAAARRRVAAGRTDSDADADAAPGESAALRARSYGCIRLFLALSLLLLAVEVAAYLRGWHLEVDVGAGILAVDGLFAAAYAAWMRARLDYLAPPLQFLTNACVLLFLVQSVDRLVLCLGCFWIKLKGVRPVPPLPADKEDVEAGPDGVPMVLVQMPMCNEREVYQQSIGAVCSLDWPRSNFLVQVLDDSDDATTSALIKEEVEKWQREGVRIVYRHRVIRDGYKAGNLKSAMNCSYVKDYEFVVIFDADFQPQADFLKRTVPHFKGKDDVGLVQARWSFVNKDENLLTRLQNINLCFHFEVEQQVNGAFLNFFGFNGTAGVWRIKALEESGGWMERTTVEDMDIAVRAHLKGWKFLFLNDVECQCELPESYEAYRKQQHRWHSGPMQLFRLCFVDIIKSKIGFWKKFNLIFLFFLLRKLILPFYSFTLFCVILPMTMFVPEAELPAWVVCYIPATMSILNILPSPKSFPFIVPYLLFENTMSVTKFNAMVSGLFQLGSAYEWVVTKKSGRSSEGDLVALVEKHSKQQRVGSAPNLDALTKESKGTEEEKNKKKRKKKHNRIYRKELALSFLLLTAAARSLLSAQGVHFYFLLFQGVSFLVVGLDLIGEQVD

SEQ ID NO: 15082 - protein, 515 aa, Zea mays
  VARIANT 158: note = Ancestral polymorphism is C, Derived polymorphism is R
  VARIANT 329: note = Ancestral polymorphism is D, Derived polymorphism is V
MAAAAVASSSTPRPLRLAQRGAVSAHASHHVSAPPHRSRRPRLSVSASAGVEGTSGSERFYFNFTGFPFPLGPFLNRRTIRTEAVKGSIWLFEQEQALGFSSVSTNIRMTVIKLKSGGLWVHAPIAPTKECIQARTLPDPIGPYHPLVSSPIEFYSLCCWLQMLKELDAPVEHIVLPTFAYEHKIFVGPFSRKFPKAQIWVAPRQWSWPINLPLEFFGIFRAKPLKDEDDATPWVAEIEQKVLSSPEVGIGPYVEVAFYHKPSRTLLVTDAVIFVPQQPPECISKESLLASAKNGLAVKLLSKGKEVPDEPVVDNKLNRQKESSLIVVVELSCADRCSDYAEHALISNYAMFSMHYSKLVDNGKCVCLGWERMVLQILFLGPSNLLEPNASFAQMSQKLIVSPIVKTLVFSKVPEKVRDWVDRIAADWRFRRIIPCHFAAPINASRSDFLAAFAFLDEFLPERAAAAPGLSLLLASFMGKAASYFPPDDMKTLSSLDEFLVSVGAVKKTVSGRKR

SEQ ID NO: 15083 - protein, 119 aa, Zea mays
  VARIANT 44: note = Ancestral polymorphism is A, Derived polymorphism is V
MELSWCRGLRLLLVASLLVLSAAALPPSRRVGNQPPAEPFAADALFGRMCDPRGAHPAPPTWCHTVHPRQHVGAAGHRRHHRPVPMPPPGRDGGGEEEIDVRFGVSKRLVPTGPNPLHN

SEQ ID NO: 15084 - protein, 151 aa, Zea mays
  VARIANT 129: note = Ancestral polymorphism is T, Derived polymorphism is R
  VARIANT 128: note = Ancestral polymorphism is R, Derived polymorphism is G
  VARIANT 78: note = Ancestral polymorphism is I, Derived polymorphism is V
  VARIANT 56: note = Ancestral polymorphism is S, Derived polymorphism is R
  VARIANT 55: note = Ancestral polymorphism is D, Derived polymorphism is H
  VARIANT 51: note = Ancestral polymorphism is R, Derived polymorphism is H
  VARIANT 46: note = Ancestral polymorphism is K, Derived polymorphism is E
  VARIANT 41: note = Ancestral polymorphism is S, Derived polymorphism is T
  VARIANT 23: note = Ancestral polymorphism is M, Derived polymorphism is V
  VARIANT 16: note = Ancestral polymorphism is S, Derived polymorphism is N
MTETILAFNASAIHMNLSSITSVMEYACINNLHGIFKEHLSLSVEKNSMCRIGSDSLITCFTKLFRTCCNSGVLVLGVHRHFVLYGLMEYLRKSLDRQFSSDEVLQLLDRFFNLEMLVLWVSSGREIRRLVLSDSLFLVALSSGTSAAGRH

SEQ ID NO: 15085 - protein, 371 aa, Zea mays
  VARIANT 63: note = Ancestral polymorphism is L, Derived polymorphism is F
  VARIANT 73..371: note = Derived polymorphism lacks residues 73 to 371
  VARIANT 109..371: note = Derived polymorphism lacks residues 109 to 371
  VARIANT 144..371: note = Derived polymorphism lacks residues 144 to 371
  VARIANT 159..371: note = Derived polymorphism lacks residues 159 to 371
MASKQAAAGEALAAQINGMSRPEMYDMMSKMKTMIDHDQETVRRMLVDNPDVTRALFRAQVVLGMVKTPKTTQALDMVQPTAVPTAPSSVKTTAPDHVSLPPPPLPANQQSVAQLSAPFSSGLSNVGSTMDPPTISANPPQSAQAKGYLIHQMPSSAPQPSQHPNMALPHAPPQYSNVPSHIPIVHSQPQQPLQSPAIYNQQLQPPLPQLSRPPFPHQMHSQVPNSFGLTHANAPQHMLQQPMFHPVANPQTNFLPGQPPLPSQPPPQQLYQASSHYNTQNTTPMQVDRGAPWGRAPDAPTPGSHFPGQLPGLPGQMTQGIGGIQAGQAPLTPEMEKMLVQQVLGMSAEQINMLPPEQRQQVLQLRDMLRQ

SEQ ID NO: 15086 - protein, 701 aa, Zea mays
  VARIANT 296: note = Ancestral polymorphism is P, Derived polymorphism is S
  VARIANT 221: note = Ancestral polymorphism is S, Derived polymorphism is I
  VARIANT 34: note = Ancestral polymorphism is G, Derived polymorphism is E
MLLPQHHHHREPPRRGGRRPLRGGVAGLASSLAGCLLLGLVATAAMLCLSSPPSRARQHGGSRGIVPAGGSGATPRVTIFSAPRPPPEGSPARQELAARSWLALPWNVSVVLLGAGPESVALAARLGHRVTADAAIDFAFTGTPFFHSMVARAQAAADTDVCVLVDAEIVLLPEIVNALDRFSKVDGDWFLVSLSRNVTDPRYQLADSGSHWVQADGKEVSFTELQEIPAEWSSSEGSDRGLIMAWNNPSSALHAGVLPSFLYGRGAQNWWLAHEVLSSEMRLFFDASSLVLGLYPESISAMQHVMASSKNGRLPSVSWEYGVNHHLAAVYGSYCCRSPARRFPMLHRVVKQSEDYMLSKVDTLVSSDFFISKQGNAHGVDSLRKKQNVSLSGYLHGCSSETSAPDLPYSLSMLLDLVADENGSVVLGVAGKSYRDMLMSWACRLRRLRVTNFLVCALDHETYEFSILQGLPVFRDPLSPTNVSFDDCHFGTKCFQQVTKVKSRIVLEILRLGYNVLLSDVDVYWFGNPMPLLYSLGLATFGAQSDEYNETGPINLPRRLNSGFYFARSDNATIIAMEMIVKHAASSGLSEQPSFYDVLCGENGTNRIGEDRCLEPNTNLTVVFLDRDLFPNGAYKGLWEKRDVRATCKELGCFIIHNNWINKRRKKVHRQMVSGLWDYDPTSRQCLQEWSAQNDGAIPFV

SEQ ID NO: 15087 - protein, 217 aa, Zea mays
  VARIANT 116: note = Ancestral polymorphism is V, Derived polymorphism is A
MSVTKFIKCVTVGDGAVGKTCMLICYTSNKFPTDYIPTVFDNFSANVSVDGSIVNLGLWDTAGQEDYSRLRPLSYRGADVFVLAFSLISRASYENVLKKWVPELRRFAPNVPVVLVGTKLDLRDHRAYLADHPGASAVTTAQPLFLQGEELRKQIGAAAYIECSSKTQQNVKSVFDTAIKVVLQPPRRREAVPARKKNRRGSGCSIMNLVCGSTCAA

SEQ ID NO: 15088 - protein, 369 aa, Zea mays
  VARIANT 321: note = Ancestral polymorphism is P, Derived polymorphism is H
  VARIANT 291..369: note = Derived polymorphism lacks residues 291 to 369
  VARIANT 248..369: note = Derived polymorphism lacks residues 248 to 369
  VARIANT 191..369: note = Derived polymorphism lacks residues 191 to 369
  VARIANT 184: note = Ancestral polymorphism is R, Derived polymorphism is G
  VARIANT 172..369: note = Derived polymorphism lacks residues 172 to 369
  VARIANT 151: note = Ancestral polymorphism is G, Derived polymorphism is S
  VARIANT 88: note = Ancestral polymorphism is A, Derived polymorphism is T
  VARIANT 77: note = Ancestral polymorphism is Y, Derived polymorphism is H
  VARIANT 36: note = Ancestral polymorphism is C, Derived polymorphism is Y
MGFLTREFVTVVFSVPPFAGEGGLGCVQAKGTRRRCRASLSVPIAAQMDPSSEPLYAQVEPYDSGFLKVSDVHTIYYEQSGNPQGHAAVFLHGGPGAGTSPGNRRFFDPQFYRIVLFDQRGAGRSTPHACLEQNTTWDLVADIEKLREHLGIPEWQVFGGSWGSTLALAYSQEHPDKVTGLVLRGIFLLRKKEFDWFYEGGAAAIFPDAWEPFRDFIPEDERNCFVDAYNKRLTSSDPIVQVEAAKRWTMWEMMTAQLIQNNDNIKRGEDDEFSLAFARIENHYFVNKGFLPSDSFLLDNVDKIRHIKGFIVQGRYDVCCPMMSAWDLHKAWPEAEFKVVADAGHSANEVGIAAELRSATDKLRDLLRK

SEQ ID NO: 15089 - protein, 503 aa, Zea mays
  VARIANT 430..503: note = Derived polymorphism lacks residues 430 to 503
MDATPPSSRDLSPQPRRPASSAGPAKRVGLLLGRYELGRLLGHGTFAKVYHARQADTGETVAIKVLDKEKALRNGLVPHIKREIAILRRVRHPNIVRLFEVMATKSKIYFVMEFVRGGELFARVAKGRLKEDTARRYFQQLISAVGFCHARGVFHRDLKPENLLVDERGDLKVSDFGLSAVADQFHPDGLLHTFCGTPSYVAPEVLARRGYDGAKADIWSCGVILFVLMAGYLPFHDQNLMAMYRKIYRGEFRCPRWFSKDLSSLLIRLLDTNPETRITVAQIMESRWFKKGFRPVRFYVEDDQVHSLADGEDEVPELGPSEPPTPPPPPPPQKEDDGDDSGWESDSSVASCPATLSSEERRRPAGSLPRPVSLNAFDIISFSRGFNLSGLFEERGNEVRFVSAHPMQTIITKLEEIAKVKSFAVRRKDWRVSLEGTRESEKGPLTIGAEVFELTPSLVVVEVRMKAGDRQEYEDFCERELKPGMQHLVHHTASVPDIPSDTD

SEQ ID NO: 15090 - protein, 367 aa, Zea mays
  VARIANT 4..367: note = Derived polymorphism lacks residues 4 to 367
  VARIANT 128: note = Ancestral polymorphism is N, Derived polymorphism is I
MVSWRRSASWLSSASRSSLGTAVGGEAKVTPEADPAAQHDEADEERWSRLLPELLTEIMRRVDAGAERWPPRRDVVVCACVCRRWRDAAVSVVRPPLECGRITFPSSLKQPGPRDAPMHCFIRRDKKNSTFSLYLSLTQALTDKGKFLLAARRFRQGAHTEYIISYDYDDLHPRSSSYVGKLRSDFLGTKFIIYDSQAPYDGAKPSRTRSTRRFASKQISPQVSGGNFEVGQVTYRFNFMKSRGPRRMQCNIQCPVGQGSASDPSKEKTPSPSSLDLKNKAPRWHDHLQCWCLNFHGRVTVASVKNFQLVATAGSGGPWGVGDEETVILQFGKIEDDAFTMDYRQPLSAFQAFAICLTSFGTKLACE

SEQ ID NO: 15091 - protein, 515 aa, Zea mays
  VARIANT 436..515: note = Derived polymorphism lacks residues 436 to 515
MGMPDANRRINLAAPLLSVRRHGGAETAPTGTRLPAYKQAGAATSSEPPGRTTTSAVAVAVPFGWERRPGHPKSVRTRRQPPPPPLTTIVDDPSPATRPSDDTLSRDDAASCVTANCSATTGLSDAASAGAGTGSSEPRARARGGAMMDRFLPAAHAVAAAGSPQNAFRRKAARTAPAAADRRLYLLPAQPQRRVPLHHIAACHLPPPVPPAPMSSPRGKNDDYDGASSDARSTPGFVSRTRRCGLLSVRCVRSALRRRAGRPFRSNGGARSRREKKPLLPHTGDDHGMVLQCWEEVYIKSLLRSGRGSLMGPAAAVASELDRTVCELYSRRRHGQAAVRPKASHLGLLLVLDRSNEACGHAASPPARKFSITGGGDTALLLRGGAATKGSLRLPNGGEKRLGRDDDAAAADAAAGGGGYGFPLLLDDKEGGSAGREMALSSPQPLLPLPLPKSPTESWLARALPSVSTRPPTTSFLGLHVQPRKHAPLPCCSIDSSRDVHHDRQRQIRVHDLHK

SEQ ID NO: 15092 - protein, 231 aa, Zea mays
  VARIANT 37: note = Ancestral polymorphism is V, Derived polymorphism is M
MLPPHVEMPTTRAAGIKLFGKVITTHYQQQQQPPQPVRHAGAAPASSGRGSGGGPGPDLLEEVARARAAAAEARLPCPRCLSRDTKFCYFNNYNVNQPRHFCRACHRYWTAGGAIRNVPVGSGRRKNRPVLLPPPPPPPHAATATTTGSSATISADDSNDRRRSASGSPPPVFTSAFTAPYYLGSPAQFATSSPAYAAGAAGPPGTAGQCLWLVAATTTTDRSAATETALF

SEQ ID NO: 15093 - protein, 340 aa, Zea mays
  VARIANT 240: note = Ancestral polymorphism is G, Derived polymorphism is R
MVVLAKPPALDQISLLRSPQPGDASSFPGVPAVDLSSPGAALAVVDACERFGFFKVVNHGVPAGVVDRLEAEAVRFFASPQAAKDACGCGPASPLGYGNRRIGRNGDMGWLEYLLLALDGNASVSKASPVPSSSLRSGPACRDAVNQYVASVRGLATSVLEAVAEGLGVAPRDALSGMVADAASDQVFRINHYPACPLLQRLPDSCGVTGFGEHTDPQLVSVLRSNGTPGLQLALHGDDGRWVPVPPDRDAFFVIVGDSLQVLTNGRLKSVRHRVVANSLKPRVSMIYFAGPAPAQRIAPLPQLLGHGKQSLYRDFTWGDYKKAAYRSRLGDNRLDPFRI

SEQ ID NO: 15094 - protein, 226 aa, Zea mays
  VARIANT 21..226: note = Derived polymorphism lacks residues 21 to 226
  VARIANT 38..226: note = Derived polymorphism lacks residues 38 to 226
  VARIANT 156..226: note = Derived polymorphism lacks residues 156 to 226
  VARIANT 159..226: note = Derived polymorphism lacks residues 159 to 226
  VARIANT 161..226: note = Derived polymorphism lacks residues 161 to 226
  VARIANT 179..226: note = Derived polymorphism lacks residues 179 to 226
  VARIANT 189..226: note = Derived polymorphism lacks residues 189 to 226
  VARIANT 196: note = Ancestral polymorphism is E, Derived polymorphism is G
MYDNVLDGMRGGGGGGQLASWAGAPEFFPDSTSFRRPQGRPWGSRQMYQRGGGILMPGREKNGGRHGPSISFGDHEHGHVPNEIDRKGHGDAAHDLRIVAERVQDLRHSQSEADTKRAKQLKGKHIAIPQAAHQTIRSEISCSQDPIYSELERRVQSLQTEGIEVTAEIDFIGQQNIMLDLENKALKQWLESLSQEHLIKRYQHEMFEREIGSLRTLFQQQQQHVP

SEQ ID NO: 15095 - protein, 94 aa, Zea mays
  VARIANT 51: note = Ancestral polymorphism is H, Derived polymorphism is R
MAGTGGARELLCVALLLAAVVVQHTCSARPLQQETTTTPAPAKEGFGGLLHAAAQVHVDAAGAAAAAAQGQVGDAAVPYEDKRLSPGGPDPQHH

SEQ ID NO: 15096 - protein, 359 aa, Zea mays
  VARIANT 17: note = Ancestral polymorphism is L, Derived polymorphism is P
MALTTSTNNQALLDAQLELWHTSFAFIKSMALKSAVDLGIADAIHSHGGNATLPQIVSRAALHPSKIPCLRRLMRVLTAAGIFSAAHRSPDDGGGELVYGLTPASQLLVGGSSSLAPFMSLVLHQVYVSPFLGLGTWLQHERSDPTLFEMTHGLTAWDLNDHKPAFGELFNQGMVCDSSFVMDIVVKECGDVFRGLSSLVDVAGGLGAAALAISTAFPHVQCSVLDLPHVAANAPANTSVKYIAGDMFESIPPADAVFLKWVLHDWGDADCIKILKNCKKAIPSRDAGGKVIIVDMVVGGQSSNIKHKETQVLFDLFIMTINGAERDEHEWKKIISEAGFSDYKIIPVLGVRSIIEVYP

SEQ ID NO: 15097 - protein, 368 aa, Zea mays
  VARIANT 90: note = Ancestral polymorphism is V, Derived polymorphism is G
  VARIANT 61: note = Ancestral polymorphism is V, Derived polymorphism is A
MAPAKAQHTSTNQQTLLDAQLQLWHHAFGYVKSMALKAALDLGIPDAIHQHGGSATLPQIVTELAALHPSKTPCLRRLMRVLTLTGVFGVVVQHSTTDGGSDLVYELTPASRLLVGSAPSNGPNVSPFLNMILGTAFVSSFLDLGEWFQHELPDPSPFKLAHGQHVWDMARHDASFAKLCDSGMVADSGFIMDVMVEECADGVFRGISSLVDVAGGLGGAAQAIAKAFPHIDCSVLDLPNVVAAAPTSTDVKYIAGDMFQSIPAADVVFLKWVLHDWGDAECVKILQNCKKAIPSEGGKVIIMDIVVGAGSSDRKHVETQVLFDLFIMAINGAERDEEEWKKIIFEAGFSSYNIIPVLGVRSIIEVYP

SEQ ID NO: 15098 - protein, 356 aa, Zea mays
  VARIANT 307: note = Ancestral polymorphism is T, Derived polymorphism is M
  VARIANT 275: note = Ancestral polymorphism is N, Derived polymorphism is K
  VARIANT 132: note = Ancestral polymorphism is D, Derived polymorphism is G
  VARIANT 117: note = Ancestral polymorphism is F, Derived polymorphism is Y
  VARIANT 100: note = Ancestral polymorphism is L, Derived polymorphism is P
  VARIANT 80: note = Ancestral polymorphism is V, Derived polymorphism is D
MAPANVQHTSTNQQTMLDAQLQLWHHTIGYVKSMALKAAVDLRIADAIHQHGGSATLPQIVTKVTLHPSKIPCLRRLMRVLTLTGVFSVHAGGDEPVYGLTPASRLMVSPGPNLTPFLTLLLSTFFVSSFLDLNEWFQHETGPSPFELANGRDIWALSGHDASFGKLFDDGMVADSGFIMEVVVKECGDVFRGVGSLVDVAGGLGGATQTIAKAFPDMECSVLDLSHVVANAPTDTTVKYIAGDMFESIPSANVVFLKWILHDWGDAECVKILKNCKKAIASQEEGKVVILDMVVGAGSSDEKHVEMQIVFDLFMMFINGTERDETEWKKIIFEAGFSRYKIIPVLGVRSIIEVYP

SEQ ID NO: 15099 - protein, 358 aa, Zea mays
  VARIANT 277: note = Ancestral polymorphism is N, Derived polymorphism is K
  VARIANT 267: note = Ancestral polymorphism is G, Derived polymorphism is S
  VARIANT 260: note = Ancestral polymorphism is K, Derived polymorphism is N
  VARIANT 136: note = Ancestral polymorphism is D, Derived polymorphism is N
  VARIANT 111: note = Ancestral polymorphism is G, Derived polymorphism is S
  VARIANT 75: note = Ancestral polymorphism is R, Derived polymorphism is L
  VARIANT 51: note = Ancestral polymorphism is H, Derived polymorphism is N
MTLSKKQGAGTDQQALLDAQLQLWHHTIAFVKSMALKAAVDLRIADAIHLHGGSATLSQIVTKVTLHPSKIPCLRRLMRVLTLTGVFSVNSGAVVDEPVYGLTPASRLLVGPGLNQTPFLTLMLSTFFVSSFLGLDEWFQHETGPSPFELANGRDIWTLSGHDASFGKLFDDGMVADSGFIMDVVVKECGDVFRGVGSLVDVAGGLGGATQTIAKAFPDVACSVLDLSHVVANAPTDTTVKYIAGDMFESIPSANVVFLKWILHDWGDAECVKILKNCKKAIASQEEGKVVILDMVVGAGSSDEKHVETQIVFDLFMMFINGTERDETEWKKIIFEAGFSRYKIIPVLGVRSIIEVYP

SEQ ID NO: 15100 - protein, 503 aa, Zea mays
  VARIANT 253..503: note = Derived polymorphism lacks residues 253 to 503
MTDFYAASCRESRLTHALEQKRNTVYPARAAGRSASTRQQPADPRAMHVHGARVAIVTNTGEGGAGGACGDRGAGVGEGGRLLGAAGGSGRSGDGVAGGGSGVRGDGGMIGAGTPGGDGVTGEGGDGLAGEGNGGTGIDGDGITGDGGDGTGGTGVTGEGGDGKGGAGGVGVGGTGATVGGDGVTGAGTAGDGGGNGVSGVAGVTGGDGGVGVGAGTGGIGGAGVGVDGEGGVIVGWDGVGVTGAGIAGGDGGEITDGAGNGGGITGAGGEGIGGCGIGEGDAGGAAGTGIAGGCGIGAGDAGGADGVTGGCGVGGDAAGGGAAGVTGDCGRGAGGAGGADGVGPGGGVDGASGGGESAGGADGGAGGCTGGERSGGAGGEGAGRSGGGDTVAGGPAGGVPGGETAGGATGVGGGGGGGTGACGGGSDGAAADVVEFDGSGVLGEGGDRAAAAAAGVEVDGGEVLDGGGADMAAAACAATTPSRVAVGGRGLERGDLVVSVRF

SEQ ID NO: 15101 - protein, 209 aa, Zea mays
  VARIANT 3: note = Ancestral polymorphism is S, Derived polymorphism is L
  VARIANT 67: note = Ancestral polymorphism is T, Derived polymorphism is I
  VARIANT 68: note = Ancestral polymorphism is A, Derived polymorphism is V
MASRRRTLLKVIILGDSGVGKTSLMNQYVNKKFSNQYKATIGADFLTKEVQFEDRLFTLQVRLIWDTAGQERFQSLGVAFYRGADCCVLVYDVNSMKSFDNLNNWREEFLIQASPSDPDNFPFVLLGNKVDVDGGNSRVVSEKKAKAWCASKGNIPYFETSAKDGTNVEDAFQCIVKNALKNEPEEELYVPDTVDVVGGNRAQRSSGCC

SEQ ID NO: 15102 - protein, 173 aa, Zea mays
  VARIANT 54: note = Ancestral polymorphism is R, Derived polymorphism is L
  VARIANT 82: note = Ancestral polymorphism is R, Derived polymorphism is W
  VARIANT 110: note = Ancestral polymorphism is P, Derived polymorphism is L
MAMAPAAATRARAIGGSGPSHFISTSSFLGPPPNPIRLPRRAGANRAVLLGAGRRDAWGADGGSSPSSEGGRLVDEDMATLRRRIREARAESSEEDGILDADDAGIPLPPTGWTELERRHHGSYVVGVRGAVGLLEALLVNARPGLGAGLLAVMLLGVPASLFLVCAQLIRGR

SEQ ID NO: 15103 - protein, 191 aa, Zea mays
  VARIANT 49: note = Ancestral polymorphism is D, Derived polymorphism is N
MGFSEAQEELVLRSWKAMKSDSESTALKFFLRIFEIAPGAKQMFSFLRDAGDAPLEKHPKLKAHAVTVFVMACESATQLRSTGDVKVREATLKRLGATHARAGVADAHFEVVKTALLDTIRDAVPDMWTPEMKAAWEEAYDQLAAVIKEEMKNAAAAEEQTKNAATAAEETTNAAAAEEETTNAAAAVDAS

SEQ ID NO: 15104 - protein, 103 aa, Zea mays
  VARIANT 83: note = Ancestral polymorphism is H, Derived polymorphism is Y
  VARIANT 82: note = Ancestral polymorphism is K, Derived polymorphism is T
  VARIANT 9..103: note = Derived polymorphism lacks residues 9 to 103
MDLENADLRMMRVMEAYQVKEFHPDVCKDPEIADLRMSERWRSIRECSSLLSIVKHVLQYPLPTSSCICCLLDSLKHRVWRKHNIYRMDYDLLVHVLHIDLSF

SEQ ID NO: 15105 - protein, 191 aa, Zea mays
  VARIANT 53..191: note = Derived polymorphism lacks residues 53 to 191
  VARIANT 66..191: note = Derived polymorphism lacks residues 66 to 191
  VARIANT 67: note = Ancestral polymorphism is E, Derived polymorphism is K
  VARIANT 82..191: note = Derived polymorphism lacks residues 82 to 191
  VARIANT 85..191: note = Derived polymorphism lacks residues 85 to 191
MSFTGLPLWPEVLRHGEEDGVAECTAGEEQVWDVRARDFDRPPKEDVGNDSDWGIDARDKLLECRSERDGSGCQRLGAGRGRPRRSAAARLRRTKLGCVRGRVVEEDVVVGGLNVVEEMVGARGEHGSGASSPWRRFDKALTDRRINRLRLGKMPPAHADTEGMAGVRSASVKMSEQSRLSEKDPKAAAMA

SEQ ID NO: 15106 - protein, 405 aa, Zea mays
  VARIANT 20: note = Ancestral polymorphism is W, Derived polymorphism is C
  VARIANT 47..405: note = Derived polymorphism lacks residues 47 to 405
  VARIANT 74..405: note = Derived polymorphism lacks residues 74 to 405
  VARIANT 173..405: note = Derived polymorphism lacks residues 173 to 405
  VARIANT 179..405: note = Derived polymorphism lacks residues 179 to 405
  VARIANT 247..405: note = Derived polymorphism lacks residues 247 to 405
  VARIANT 297: note = Ancestral polymorphism is P, Derived polymorphism is L
MAMDGAAVEEETMHIGQGLWVAMGQGNMVVAMAMDALGCRAAVAAGRGMAGDRLAREEAGMVEVGNAVVVVTTEVEVAVVKAAAEVEMAAAAMVEVAKAGRASSGGSGPASWLKLTSSTVSSRSRPISGGKQEERSLLMRRISLSVPDMVATLAGRQPPKALCARTTTDAGRWRRAGGRRGEAGRCPRPLEVVEADTQEAQRREVQDDVRERADEAVVAEVELVEEAEAAKRAGEYVAEAVGVEVEQGEVGEEGELRREEARDVAMVEVDLGDRERAAAVGAEGERRAVDVRVVAHPRAYLIGGEVVGVGEDGLLLSRPAGVGSGTATTGPPPLPPSAAPLKPRSPRRLGNRHDGSTSTATVGRPSEAAVAAPKKEEAAAARSARITDPLISSPAPKEGVAAESW

SEQ ID NO: 15107 - protein, 605 aa, Zea mays
  VARIANT 516..605: note = Derived polymorphism lacks residues 516 to 605
MSCFRCFSGSRTKRGKGEKRLEGSTAPTSPAAASFLSTVSTGAPSNLTFSTASSAVVTSHSEDSSAVMRPEATKSSGSASVSSARSIPELYEERGASSLREFGFRELRAATSDFSRLLKVGEGGFGSVYKGVVRLPGGPAGGTVVAIKNSIPMVIRSSRLSHSGISHLPADEVKPLVKYDNDEGIMHTHLVAVEGVVVVEAVGGAGAEVDVEMGSMSMLMLVGKTITPLHIWAMDMPVEEVTVSGAVVGEEATITSLNTNRSEVLVGIGFKGMRVMRVKNLNLYAFGLYMQPTSIREKLGPKYASFPTDKLMENPDFYRNGFNEYADAGWEDDHAPTYMGNGYAHGRGRSFRGRGRRGGDNNQPEYQQVGGYYEEAPVHAPALGGFSPFVMELKPASHRSGNLFLVVNIYMVYPVHVPCAAISALISRAGNANWNWKGLLLIQSNWAPMVKAYGHSRLKNSEYLEARQVRGLLYMLWQHSSSMRKASQPLLHARMLPAEERSCSSPGQVSVRFLQQARTGQLPRPSCGVTDRPTLKSSTTLTSYEIRPSDKKVDYQIQKLTNAADNATAREKSGNAETNGKDGHSDEEDLLKYRPNPDMMDTDWS

SEQ ID NO: 15108 - protein, 184 aa, Zea mays
  VARIANT 70: note = Ancestral polymorphism is V, Derived polymorphism is I
  VARIANT 123: note = Ancestral polymorphism is V, Derived polymorphism is A
  VARIANT 150: note = Ancestral polymorphism is C, Derived polymorphism is Y
  VARIANT 151: note = Ancestral polymorphism is G, Derived polymorphism is V
MDPTDQSPEEVYSVWALPPEPVRDRFRRIMEGLRAAYGGPAFEPHVTVVGDFRGRRSEAVKVLRAAAASVQPYTARVTGVARGSFFYQCVYILLDPTAEVVGASDHCCANFGYNRKTPYMPHVSLLYGDLTDEEKEEARKKAEELDKDIYVLEFEISELALYRTDTTDKTLESWELVEVCHLGS

SEQ ID NO: 15109 - protein, 117 aa, Zea mays
  VARIANT 31: note = Ancestral polymorphism is T, Derived polymorphism is I
  VARIANT 21..117: note = Derived polymorphism lacks residues 21 to 117
  VARIANT 18: note = Ancestral polymorphism is S, Derived polymorphism is R
  VARIANT 17: note = Ancestral polymorphism is P, Derived polymorphism is L
  VARIANT 1: note = Ancestral polymorphism is M, Derived polymorphism is V
MRTFYTLVLIDPDAPSPSHPSLREYLHWMVTDIPETTSVNFGQELVFYERPDPRSGIHRLVFVLFRQLGRGTVFAPEMRQNFNCRSFARQYHLSIASATHFNCQREGGSGGRRFREE

SEQ ID NO: 15110 - protein, 359 aa, Zea mays
  VARIANT 234: note = Ancestral polymorphism is P, Derived polymorphism is A
MYRTAVVTAAALALAVLSAAAMTAAAPQVPCYFIFGDSLVDNGNNNFIVSMARANYPPYGIDFAGGPTGRFSNGLTTVDVIGKLPLPAAGRVNKTRAKTSEPAARILAIATTKLLGFDDLVPPFSEASGQQLLRGANFASAAAGIREETGQQLGARISFSGQVQNYQAAVQEVVSILGDDEAAAAAHLGRCVFTVGMGSNDYLNNYFMPALYSTGSRYTPERYADALAEQYAGALRAMYRYGARKVALVGVGQVGCSPNELAQRSSDGVACVELEQINGAVRMFNRRLVGLVDSFNRILPGAHFTYVNVYGIFEDIIKSPGAHGLKVTNAGCCGVGRNNGQVTCLPFQTPCGNRHEYLF

SEQ ID NO: 15111 - protein, 94 aa, Zea mays
  VARIANT 22: note = Ancestral polymorphism is D, Derived polymorphism is N
  VARIANT 33: note = Ancestral polymorphism is E, Derived polymorphism is K
  VARIANT 38: note = Ancestral polymorphism is V, Derived polymorphism is M
  VARIANT 58: note = Ancestral polymorphism is V, Derived polymorphism is A
  VARIANT 60: note = Ancestral polymorphism is R, Derived polymorphism is W
  VARIANT 65: note = Ancestral polymorphism is D, Derived polymorphism is V
  VARIANT 70: note = Ancestral polymorphism is R, Derived polymorphism is W
  VARIANT 71..94: note = Derived polymorphism lacks residues 71 to 94
  VARIANT 91: note = Ancestral polymorphism is S, Derived polymorphism is L
MDIDVVQLKKMHQEKQLDTLVDKGLESKYDRIELEEMVQVALLCTQFFPGHRTKMSEVVRMLEGDGLAKRWEASQHTKETQIQGAQFFLQSLPL

SEQ ID NO: 15112 - protein, 950 aa, Zea mays
  VARIANT 372..950: note = Derived polymorphism lacks residues 372 to 950
MPTSSPFVGDSGTAGSPIRAERAVGEHGRRYDVFASDAMDTDAAEAASASAGAFALDGVHSPGRASPANMEDAGGAAAGHAARPPLAGSRSGFRRLGLRGMKQRLLVVANRLPVSANRRGEDHWSLEISAGGLVSALLGVKDVDAKWIGWAGVNVPDEIGQRALTKALAEKRCIPVFLDEEIVHQYYNGYCNNILWPLFHYLGLPQEDRLATTRNFESQFDAYKRANQMFADVVYQHYQEGDVIWCHDYHLMFLPKCLKDHDINMKVGWFLHTPFPSSEIYRTLPSRLELLRSVLCADLVGFHTYDYARHFVSACTRILGLEGTPEGVEDQGRLTRVAAFPIGIDSDRFKRALELPAVKRHINELTQRFAGRKVMLGVDRLDMIKGIPQKILAFEKFLEENPDWNDKVVLLQIAVPTRTDVPEYQKLTSQVHEIVGRINGRFGTLTAVPIHHLDRSLDFHALCALYAVTDVALVTSLRDGMNLVSYEYVACQGSKKGVLILSEFAGAAQSLGAGAILVNPWNITEVADSIHHALTMPSDEREKRHRHNYAHVTTHTAQDWAETFVFELNDTVAEALLRTRQVPPGLPGQTAIQQYLRSKNRLLILGFNSTLTEPVESSGRRGGDQIKEMELKLHPDLKGPLGALCEDERTTVIVLSGSDRSVLDENFGEFKMWLAAEHGMFLRPTYGEWMTTMPEHLNMDWVDSVKHVFEYFTERTPRSHFEHRETSFVWNYKYADVEFGRLQARDMLQHLWTGPISNAAVDVVQGSRSVEVRSVGVTKGAAIDRILGEIVHSENMITPIDYVLCIGHFLGKDEDIYVFFDPEYPSESKVKPEGGSASLDRRPNGRPASNGRSNSRNPQSRPQKAQQAASERSSSSSHSSTSSNHDWREGSSVLDLKAENYFSCAVGRKRSNARYLLSSSEEVVSFLKELATETAGFQSSCADYMFLDRQ

SEQ ID NO: 15113 - protein, 189 aa, Zea mays
  VARIANT 152: note = Ancestral polymorphism is P, Derived polymorphism is L
  VARIANT 148: note = Ancestral polymorphism is T, Derived polymorphism is M
  VARIANT 135: note = Ancestral polymorphism is G, Derived polymorphism is R
  VARIANT 126: note = Ancestral polymorphism is G, Derived polymorphism is S
  VARIANT 120: note = Ancestral polymorphism is G, Derived polymorphism is S
  VARIANT 112: note = Ancestral polymorphism is Q, Derived polymorphism is H
  VARIANT 111..189: note = Derived polymorphism lacks residues 111 to 189
  VARIANT 104: note = Ancestral polymorphism is V, Derived polymorphism is I
  VARIANT 103: note = Ancestral polymorphism is F, Derived polymorphism is S
  VARIANT 97: note = Ancestral polymorphism is A, Derived polymorphism is P
  VARIANT 81: note = Ancestral polymorphism is R, Derived polymorphism is T
  VARIANT 75..189: note = Derived polymorphism lacks residues 75 to 189
  VARIANT 68: note = Ancestral polymorphism is N, Derived polymorphism is S
  VARIANT 66: note = Ancestral polymorphism is D, Derived polymorphism is Y
  VARIANT 61: note = Ancestral polymorphism is W, Derived polymorphism is C
  VARIANT 60: note = Ancestral polymorphism is G, Derived polymorphism is S
  VARIANT 56: note = Ancestral polymorphism is S, Derived polymorphism is L
  VARIANT 48: note = Ancestral polymorphism is P, Derived polymorphism is L
  VARIANT 41: note = Ancestral polymorphism is L, Derived polymorphism is I
  VARIANT 34: note = Ancestral polymorphism is C, Derived polymorphism is Y
  VARIANT 14..189: note = Ancestral polymorphism lacks residues 14 to 189
MESCELCLLSKLVRMDGDSSQELHEISCGHHFHCTCIDKYLYIIATCPRAIGIMQSAKKGWVKVTDYNSYQTVKGSLKFKRKGQDLFYEHTLSLIEALCWFQFVLTHLDNWQLLIKSIPGEVVKPGRFKAINDDGMSIMKGKLYIHFTVEFPDSLVLEQCKALESVLPPKLSSNLIDMEIDECEETTMH

SEQ ID NO: 15114 - protein, 257 aa, Zea mays
  VARIANT 123: note = Ancestral polymorphism is W, Derived polymorphism is L
MEVLSSSRFARALLPNLLDPAIRLLSKPPCRRRRAVQTLASNAHAPTAAPSPSPSLALLLATALRGGRTGGELPDLATAATGGAGIGTLLMSTTAAAVTKARESPYLLALAANPTFVSGLVAWAVAQAAKALLTSVVERRWDLRMLFSSGGMPSSHTALCTALTASVALCHGVSDALFPVCLGFSLIVMYDATGVRRHAGMQAEVLNKIVEDLFEGHPISERKLKELLGHTPSQVFAGAILGILVAWYCCQGCIVPM

SEQ ID NO: 15115 - protein, 666 aa, Zea mays
  VARIANT 182: note = Ancestral polymorphism is V, Derived polymorphism is D
  VARIANT 344..666: note = Derived polymorphism lacks residues 344 to 666
MSLSKPVSARRLVPALFPLAHADAASATASRRERRKDTFVATPPIPAPSPRAVRLAEPLPTLAPSRLAFHNRILALLSGPQADLPEAALLTRHALHSNCRPSSFTCAAVLAALLRTRRLEDFFALHRFALQAAVPPTAATHVLYLSALAARRLADDALHHLRIIARPGSPVPPSPTAYRVVVECLVADHGRLADAVKLKDEMLTSGFVGPDPKVYSLLMAGFVGAGDGAKALELYQELKDKVGGEPILDGIVYGTLMKAYFLMGTGEKVMECYKEVLCVESAVRFGAESYNEVVDALGQNGRLEDALKLFDRMLEEHDPPLRIAVDLRSFRVMVDTYCAAGRFEDAVAVFRRMGEWKLVPDVASYNNLIRHLQINQLIDKAEVLYNEMCESGVGADKETYLLLTEACFSVDRIDDGISYFDKMDELELKPDATAYHKLIDGLVGFSMVDKAQEYFNQMKEKGVNPSISSYETLLKAYIAADRLDDAVNVAKGILLNEKVLFSYGMRELLEGALRGDGRGNDIAKLYEDVEREKAEAEARAAEEKARAEALAREERERRRAEIAAKDEAAAKASAAAIEAILAHKRKTENEGGAPAPDANTLDGGFLSKLGLKTAGEGALQDNPTESGDDGEGALHGNPTESGDDGEGALQGNPTERNGGNVQQGYL

SEQ ID NO: 15116 - protein, 351 aa, Zea mays
  VARIANT 144: note = Ancestral polymorphism is A, Derived polymorphism is T
  VARIANT 187..351: note = Derived polymorphism lacks residues 187 to 351
  VARIANT 201: note = Ancestral polymorphism is R, Derived polymorphism is W
  VARIANT 236: note = Ancestral polymorphism is G, Derived polymorphism is D
  VARIANT 277: note = Ancestral polymorphism is I, Derived polymorphism is T
MSSVLGSLLKSQQQLAAHQKDMDHWPAFLFHAPPTRPGARRNPIPPRAQRCRPASRTRTKPLPPPAEVVPAYPPPESEDDETWVWTQIKAEARRDADAEPALASFLYATVLSHPSLPRSLSFHLANKLCSSTLLSTLLYDLFLATLTAHPSLRAAVVADLLAAHSRDPACVGFSHCLLNYKGFLAIQAHRVAHVLWAQQRRPLALALQSRVADVFAVDIHPAAVVGKGILLDHATGVVIGETAVVGDNVSILHHVTLGGTGKAVGDRHPKIGDGVLIGAGATILGNVKIGAGAKIGAGSVVLIDVPARSTAVGNPARLIGGKKAEGANEEDMPGESMDHTSFIRQWSDYTI

SEQ ID NO: 15117 - protein, 174 aa, Zea mays
  VARIANT 118: note = Ancestral polymorphism is R, Derived polymorphism is L
  VARIANT 106: note = Ancestral polymorphism is S, Derived polymorphism is L
  VARIANT 95: note = Ancestral polymorphism is S, Derived polymorphism is C
  VARIANT 86: note = Ancestral polymorphism is R, Derived polymorphism is L
  VARIANT 62: note = Ancestral polymorphism is P, Derived polymorphism is R
  VARIANT 58: note = Ancestral polymorphism is S, Derived polymorphism is T
  VARIANT 57: note = Ancestral polymorphism is K, Derived polymorphism is N
  VARIANT 18: note = Ancestral polymorphism is S, Derived polymorphism is A
MTTTMAYLLASNKCVLLSLSVVVVLCLGGGASAMGSLPPPPPMVNFSIGVQGVVWCNTCRYPGYFAPMDASPLPGAKVYLRCKHGLRALTVAGQCGPGGYFLIQTSQQVSAFTSQQCRVYVPRSPVRACGVPAYPAGRRGMPLKFQEFVKRDNGLQGMYSVGNRLFRPKNPAKC

SEQ ID NO: 15118 - protein, 200 aa, Zea mays
  VARIANT 144: note = Ancestral polymorphism is S, Derived polymorphism is Y
  VARIANT 143: note = Ancestral polymorphism is R, Derived polymorphism is C
  VARIANT 6: note = Ancestral polymorphism is D, Derived polymorphism is N
MASLKDHCAVVAVVVAICFVVLAAALPSHASTAVDEPAKYKPSRAPAPSPASASSYVPPPVQPVIVVQGVIYCKSCKLRGYNSGMDASPLPNATASLVCYGDAESKYRVLNQTSTATDTNGYFIVMVYDVGMFDRRSCRLYLRSSPTALCAAPFIPSNPKLGLTLVRDRAATAPRGARGIFHPKTALMYAPGTGGKCPPY

SEQ ID NO: 15119 - protein, 468 aa, Zea mays
  VARIANT 4: note = Ancestral polymorphism is A, Derived polymorphism is E
  VARIANT 29: note = Ancestral polymorphism is A, Derived polymorphism is V
  VARIANT 151..468: note = Derived polymorphism lacks residues 151 to 468
MAPAPSSSRTRALPPAILYILLSLQIAAAAAAMDPVERETLLRVMESVSSDRDWREAAGADPCGSPWPGLECRPGAAPGPGGGAARMHVSRLDFGVPPNPTCKDTATFPAAAFALPELRALFLVGCFKNPDAVAAFALPPASNLSSSRLQQLSVRANPSLSGALPPQLASMRSLQVLTVSQNALIRGAVPNGIGALASLVHLDLSYNSLTDPIPSRLGGLRRLVGLDLSYNSFSGRIPSRLGDLAQLQKLDLSSNNLTGGVPPAITRLRALTFLALSNNGLRGRLPAGLSGLRDLQYLIMENNPMGVPLPPELGNIARLQELRLANSGYSGSIPDTFGLLSSLTTLSLENNSLTGRIPAGLSRLKRMYHLNLSKNGLDGVVPFDSAFLRQLGRNLDLSGNPGLCVTDRAVVPDVGVGVCGGDVACESSAAAESSLVGRVVRREVTRGRWPAGLLRPAAVALCSCGLLL

SEQ ID NO: 15120 - protein, 839 aa, Zea mays
  VARIANT 682..839: note = Derived polymorphism lacks residues 682 to 839
MEGAGRDANPLSGYRIGKTLGIGSFGKVKIAEHILTGHKVAIKILNRKKIRSMDMEEKVKREIKILRLFMHPHIIRLYEIISGVEYCHRNMVAHRDLKPENLLLDSKCNVKIADFGLSNIMRDGHFLKTSCGSPNYAAPEVISGKLYAGPEVDVWSCGVILYALLCGTLPFDDENIPNLFKKIKGGIYTLPSHLSPSARDLIPRMLVVDPMKRITIREIREHVWFKIRLPRYLAVPPPDTAQQVKKVDEETLNDVIKMGFDKNQLIESLQNRLQNEATVAYYLLLDNRLRTTSGYLGSEFQESMDSSLSQVIAETPTSATELRQHGFSESPGSGLRQHFAAERKWALGLQSRAHPREIISEVLKALQELNVYWKKIGHYNMKCRWSPGCLESMMHNSDSFSAESAIIETDVFMEKSTPTVKFEIQVDREIQLPSYCRGHGRTANPRSPPKRPTIPSRPAARPDPSRPRIRRRASRASASVAACSGERDPARLYSPTARYTMEGAGRDANPLSSYRIGRTLGTGSFGKVKIAEHILTGHKVAIKIINRLKIRSLKMEKKVKREIKLLRLLMHPYIIRLYEVIISSKLYVGPDVDVWSCGVILYALLCGTLPFDDENILELFYKIKGGIYILPSHLSLSARDLISRMLVVDPMKRITIHGIREHVWFKIQLPRYLAVPPPDTAQQVKKLSEETLNDVLNMGFDKNLLIESLQNRLQNEATVAYYLLLDDRLCTTSGYLGSDFQESMDSSFSQVITETPTSATELQQHVFTEGTFGCLPLPCFAWLSIKIHRLVGLLPVSVLALSRIFIASPSDLKPLSAAGKPGLAERGEASWPHKPTKRA

SEQ ID NO: 15121 - protein, 555 aa, Zea mays
  VARIANT 321..555: note = Derived polymorphism lacks residues 321 to 555
  VARIANT 324..555: note = Derived polymorphism lacks residues 324 to 555
MEISLEASWVGVQRHGQDLADRLAQGFSGLLLHAQPPQLPPWSPAALLPPKLVIPFDLDLPVVPFVAGMRRGVGTVDLPAVAVSSLVEIGGRLGQAGSELGAAVQHLARQVPVPVPFRKWEAAQPPTVVTGDVALAVGTVGSANVALERAVDIGSLEVAAAAAAAATGSATAGSVGAVGAMDDDRLDDEEDGFDCEIGTLENIKKAKGTVNVSATYNTRHHDFESSVVARGDLWRLESSRGNLTSGNDSSPLFLVQLGPLLFVRDSTLLLPVHLSKQHLLWYGYDRKNGMHSLCPAIWSKHRKWMLMSMMCLNPVACVSVYAFYLSKCTIYPIAFEPMKNVILIFCGMPFCRSTDCIILPLHYDIFLLFIALCFAFLFQSFMDVQFPNGQMTYVAGEGITASGFIPLFGGLLQAHAKCPGDTRVSFSFKNKQGTRFSPTFQWPDNSVSFGVAQAVAWKRSGLMVRPSIQISVCPTFGGTDPGICTEFVHSLKEEVSVMCGFSCSRHPSAFTALSLGRSKWNGQVGSSGLVITLETPLDNMARPSLSVQLNGGFEF

SEQ ID NO: 15122 - protein, 125 aa, Zea mays
  VARIANT 109: note = Ancestral polymorphism is G, Derived polymorphism is V
  VARIANT 68: note = Ancestral polymorphism is V, Derived polymorphism is A
  VARIANT 26: note = Ancestral polymorphism is C, Derived polymorphism is R
MGSRSGDRAPTSSSSSSLALRAAWACLALCLLLLLSRCPPCQGRELLQAEAEGEGGKVMLMHFEGGLVFRVPPAPASVDVGEEEEPAPAAAVPVPVPSSRRGFAPVAAGRAARSMRSVPSPGVGH

SEQ ID NO: 15123 - protein, 343 aa, Zea mays
  VARIANT 68..343: note = Ancestral polymorphism lacks residues 68 to 343
MAPPLLSPPLLADALATPPRSFLCSRPTRQLPTVGLAGAVRGDRGRWSVRRRDPRVFATSTEADRERSEEDVADDYYSVLGVMPDATPEEIKKAYYSCMKECHPDLSGDHPDVTNFCMFINEVYSVLSDPAQRAVYDEIHGYTATAINPFFDDSAPKDHVFVDEFTCIGCKNCANICPGVFQIEEDFGRSRVYSQSGSTELIQDAIDSCPVDCIHWTSAAQLSLLENEMRRVERVNVGLMLAGMGASINVFRMASARWEKRQAKVLEKARTRMVKQETSDTRSSWSEVWASSPPRDDQSNGDGEASERAKRAAAAARRWREFSRRGADRPPTHKLPEAVGNKD

SEQ ID NO: 15124 - protein, 150 aa, Zea mays
  VARIANT 42..150: note = Derived polymorphism lacks residues 42 to 150
MGCAGSTPKVDENSKKLKRPKAWKHTQPITPARLKQMRDEFWDTAPHYGGQKEIWDALRVAAESDLALAQTIVDSAGIIVSNPDMTLCYDERGRRQVRAAQVCLERASEPDPRRVILDPKRFCSSTKQGHVNLCGWLIRSLVLDCNFQGQ

SEQ ID NO: 15125 - protein, 319 aa, Zea mays
  VARIANT 80: note = Ancestral polymorphism is R, Derived polymorphism is C
  VARIANT 182..319: note = Derived polymorphism lacks residues 182 to 319
  VARIANT 194: note = Ancestral polymorphism is A, Derived polymorphism is T
  VARIANT 207: note = Ancestral polymorphism is P, Derived polymorphism is L
  VARIANT 217: note = Ancestral polymorphism is P, Derived polymorphism is L
  VARIANT 232: note = Ancestral polymorphism is P, Derived polymorphism is T
  VARIANT 241: note = Ancestral polymorphism is P, Derived polymorphism is L
  VARIANT 242: note = Ancestral polymorphism is R, Derived polymorphism is C
MNAFRFLGDMTHLFSVLVLLLKIYATKSCSGVSRKTQELYMLVFVARYLDLFTDYVSLYNSVMKVVFITSSAAIVWCMRRHPQVRRTYDKEQDTFRHTVLVAAAFLLALIFHERFTFREICWAFSIYLEAVAILPQLVLLQRSRNVDNLTGQYVFFLGLEIYQHLIDMHILTKWHNPIEEFRQLCLGLHVKKRARHHAASRFHIHVPASVLLLDLFPPDTIPDIKLQFLPPPGCCDLFLPPCATGLPCVLHSKLDLSLFHGGSSQQMDPLACWFGANSSVCRFLLLLFLKLEEQCEARVACLSMLRFARKRASYVTQVL

SEQ ID NO: 15126 - protein, 242 aa, Zea mays
  VARIANT 5: note = Ancestral polymorphism is E, Derived polymorphism is D
  VARIANT 18: note = Ancestral polymorphism is D, Derived polymorphism is E
  VARIANT 75: note = Ancestral polymorphism is R, Derived polymorphism is L
  VARIANT 81: note = Ancestral polymorphism is D, Derived polymorphism is N
  VARIANT 87: note = Ancestral polymorphism is A, Derived polymorphism is V
  VARIANT 89: note = Ancestral polymorphism is D, Derived polymorphism is N
MCTLEQRGRVFVLTLTGDGEHRLGHALISSLRSAVASAAAGAAKAGPGAALVTVGEGRFFSNGLDIGWAGTSRARLGELVDALRPLVADLLALPMPTVAAVTGHASAGGCLLALCHDYRIMRGDRGVLYMSEVDIGLPLPPYFMAVLRAKITAANALRDVVLRGKKVRAAEGKDMGIVDAVYPSALETADQAFKFAEQLAARKWDGGVYASIRMSMYPEACRSVGIVEESDEEKRKHFASKL

SEQ ID NO: 15127 - protein, 273 aa, Zea mays
  VARIANT 190: note = Ancestral polymorphism is G, Derived polymorphism is D
MGDNKSPLSLSPMGGRDRDRELLIPVSGGGSAPGDGVEDGDRASSASAALSSSGREAFHKVVRSWASKKFMTGCVILFPIAITFYITWWFIHFVDGFFSPIYAQLGINIFGLGFVTSVTFIFLIGVFMSSWLGASVLSLGEWIIKRMPLVRHIYNASKQISAAISPDQNKQAFKEVVIIRHPRVGEYAFGFITSSVSLQSYSGQEDLYCVYVPTNHLYIGDIFMVNSKDVIRPNLSVREGIEIVVSGGMSMPQILSTLDPQMILGDRTGPSRS

SEQ ID NO: 15128 - protein, 180 aa, Zea mays
  VARIANT 162: note = Ancestral polymorphism is L, Derived polymorphism is R
MATANIDAYKYEFKVLGAFVVSLTVITLLAKLLRLCLRSLIKGDEQEAGDRRGRRAPTPSNAGGPRRVPSAVVDVGRGGGRGSREERVVVQPPPPQLPAPAAVAVEMVRSMGPLVCTYLRADGWPAEAACAVCLAELADGEAVRVLPVCMHYFHAACVGEWLRAHHDCPLCRAPLAPPAA

SEQ ID NO: 15129 - protein, 308 aa, Zea mays
  VARIANT 164: note = Ancestral polymorphism is L, Derived polymorphism is F
  VARIANT 206: note = Ancestral polymorphism is T, Derived polymorphism is I
  VARIANT 212: note = Ancestral polymorphism is G, Derived polymorphism is R
  VARIANT 215..308: note = Derived polymorphism lacks residues 215 to 308
  VARIANT 218..308: note = Derived polymorphism lacks residues 218 to 308
  VARIANT 233: note = Ancestral polymorphism is P, Derived polymorphism is L
  VARIANT 251: note = Ancestral polymorphism is S, Derived polymorphism is F
  VARIANT 257: note = Ancestral polymorphism is D, Derived polymorphism is N
MEGPTRHHSIDPNRHGSTLRVLFHGRSAWFPLLHPMIRMPPQHGRRLGSSDPDTRALRRVDLLDHAGARPQVRRRDHEVAAAVCRAGHYRRHRHMLASIAPLNLYVPPRGLIRRLGPSTSHLLYSPALEQQLVISGSFRKRRSCPMLEGATEDMDLMGRLLDELDLLQRHSPDVDLDMVDMDLLKHIVVHKKFISITKYHCKLGLTEEPKLGRAWKFLSSMSEIVDLKKLFAPSTIAVYFSGGMPPICRGSVEISKDKQVNISRCEVMWTLQGVLWANVVCKQSLTVNGEESVKVKHPIYVTVDPFIC

SEQ ID NO: 15130 - protein, 120 aa, Zea mays
  VARIANT 4: note = Ancestral polymorphism is F, Derived polymorphism is S
  VARIANT 6: note = Ancestral polymorphism is T, Derived polymorphism is M
  VARIANT 7: note = Ancestral polymorphism is T, Derived polymorphism is I
  VARIANT 8: note = Ancestral polymorphism is T, Derived polymorphism is N
  VARIANT 13: note = Ancestral polymorphism is Q, Derived polymorphism is H
  VARIANT 14: note = Ancestral polymorphism is A, Derived polymorphism is V
  VARIANT 15: note = Ancestral polymorphism is V, Derived polymorphism is A
  VARIANT 18: note = Ancestral polymorphism is E, Derived polymorphism is K
  VARIANT 21: note = Ancestral polymorphism is S, Derived polymorphism is L
  VARIANT 28: note = Ancestral polymorphism is P, Derived polymorphism is S
  VARIANT 29: note = Ancestral polymorphism is G, Derived polymorphism is R
  VARIANT 41: note = Ancestral polymorphism is P, Derived polymorphism is L
  VARIANT 43: note = Ancestral polymorphism is T, Derived polymorphism is I
MYAFSTTTYIGFQAVMTEEMSEKFRGLPGVVFILPDSYLYPETKEYGATWMATRTTDVGDPTFFFSTSQFLRTDDSSFLLQPSSVDTHCSKEKEERGAHPWKKERLRRGLLAYGHTGSCD

SEQ ID NO: 15131 - protein, 408 aa, Zea mays
  VARIANT 1: note = Ancestral polymorphism is M, Derived polymorphism is I
  VARIANT 75: note = Ancestral polymorphism is A, Derived polymorphism is S
  VARIANT 79..408: note = Derived polymorphism lacks residues 79 to 408
  VARIANT 83: note = Ancestral polymorphism is P, Derived polymorphism is L
  VARIANT 114: note = Ancestral polymorphism is A, Derived polymorphism is T
MVELSELFLRRGLAVTVVVVVPPAASTDASSAVARAVEANPSINFHMLPLPPPNTVPPAAVEQDQGQEPPHNPFALLRQSNAPLRDYLRSALQSASVCALVLDIFCVDALDVAADLGVPAYLFYTSGASSLAVSLHMPQKQAEVNASFGDIGDAPLCFPGVPAFRPTELPVNALDRDNQVYRVFLSAFERVPACRGMLVNTFEWLEPRVVAALRDGACVPGRPTPPVYCVGPLVSGGGEVQDKKHACLVWLDAQPENSVVFLCFGSMGSFSKRQLEAIATGLEMSGQRFLATGAFVTHCGWNSILEGITAGVPLLCWPLYAEQRLNKVFMVEDARVGVEIAGYDGEVVTAEEVEAKVRWVMHSEDGRALRGSSMAAKEKALEALQQGGTSHNALLELLSDLGMRHSSE

SEQ ID NO: 15132 - protein, 473 aa, Zea mays
  VARIANT 88: note = Ancestral polymorphism is D, Derived polymorphism is Y
  VARIANT 119..473: note = Derived polymorphism lacks residues 119 to 473
  VARIANT 167: note = Ancestral polymorphism is L, Derived polymorphism is P
MVTGKKRTFVLYPSLGVGHLIPMVELAKHLLRHGHGALIAVVNPPDTDAVSAAAVERLAAANPAIAFRLLPVPASPDAGADWVKRDLDTLRLANPVLRDFLLRSQPAADADALILDMFCVDALDVAAELGVPAYFFFASAAGDLAMFLNLPYLYPTLPSFRDMGEAPVRCPGMPPVRAMDMPLTVQDRDSDRTKVRMYQFRRIPEGRGVLVNSFAWLEPRALRALGDGVCVPGRPTPRVFCVGPLVNDGSSTAGGGGRHECLAWLDAQPKRSVVFLCFGSKGSFPAAQLQEIAHGLESSGHRFLWAVRSPPEEPDTDLGKLLPEGFLDRNRDRGMVVKDWVPQAEVVRHEAVRAFVTHCGWNSTLEAIMSGLPMICWPLYAEQGLNKVFMVEEWRIGVELRGYEKFVKAEELEAKVRLVMEAEEGRILRERLAVAREKALGATKEGGSSEVAFAEFFGDLDKSSSPSVNGECD

SEQ ID NO: 15133 - protein, 478 aa, Zea mays
  VARIANT 293..478: note = Derived polymorphism lacks residues 293 to 478
  VARIANT 172: note = Ancestral polymorphism is L, Derived polymorphism is P
  VARIANT 171: note = Ancestral polymorphism is A, Derived polymorphism is T
  VARIANT 106: note = Ancestral polymorphism is L, Derived polymorphism is P
  VARIANT 67: note = Ancestral polymorphism is N, Derived polymorphism is D
MAEPSPHPTVVLHACLGVGHLIPMVELAKLLLRRDLAVIIAVPTPPSSTADFFASSASAVATLEAANPAVSFHHLPPPDYPVPDPDPFLRMLDALRLTVPSLTAFLRSLPSVAGLVLDLFCGDALDAAASAGIPAYFYYTSCAGDLAAFLHLPHYFATTEGGPSFKDMGKALLHFPGVPPIPASDMPHTVLDRAARTCASRIVHYGRVPEARGLLINTYEWLEARAVGALRDGVCVPGRPTPPVYPIGPIIVRGQEAAEKGERHACLSWLDAQPERSVVFLCFGSLGAVSAAQVKEIARGLESSGHRFLWVVRSPPEDPTKFFLARPEPDLDSLLPEGFLERTSDRGMVVKMWAPQVEVLRHAATGAFMTHCGWNSVLEAASAGVPMLCWPMYAEQRVNKVFVVDEIKAGVVMDGYDEELVSAAEVEKKVRLVMESEEGEKLRERLALAKEKAAEALADGGPSRMAFEEFLKDIMLAK

SEQ ID NO: 15134 - protein, 299 aa, Zea mays
  VARIANT 180: note = Ancestral polymorphism is C, Derived polymorphism is G
  VARIANT 38: note = Ancestral polymorphism is C, Derived polymorphism is Y
  VARIANT 36: note = Ancestral polymorphism is T, Derived polymorphism is M
  VARIANT 28: note = Ancestral polymorphism is L, Derived polymorphism is Q
MPVRRRQPRRPETGAAERYREMGIGAALSRPWDYPTACGELAALLRLGYADLPKAAQALVASDVLLAFRLLPDVQTGYAVSTANVLLQAVEVALPKQKKAQAVSEFKHSIIAHKRRARVQQISGSPHIPQDILVHIFSFLDMHSLVAAGLVCWSWNSAANDNKLWKMNYSIFFGLSHLSCNNIPVSGVQYSTNSVPNYPNFSWKESFHTKYAECASWKFVSNRALCAHCRSVIWLSNLTCASPHHCPKNRHHEVKLRPLLPDTVAKYILRVEDLAASSSESDDTDDSDYENWHPRFWAL

SEQ ID NO: 15135 - protein, 113 aa, Zea mays
  VARIANT 94: note = Ancestral polymorphism is S, Derived polymorphism is L
  VARIANT 64..113: note = Derived polymorphism lacks residues 64 to 113
  VARIANT 63..113: note = Derived polymorphism lacks residues 63 to 113
  VARIANT 27: note = Ancestral polymorphism is Q, Derived polymorphism is E
MAMDDLAGTSSSSMAATASSDPSYDWQTMLYPKRNRKQAQPPRATALDLALQSNGCCSAAPRQEGEVKKPKVMVAEAAVLIDAENLAAHLFEISASYENQEDIQLMRFADYFG

SEQ ID NO: 15136 - protein, 1248 aa, Zea mays
  VARIANT 1197..1248: note = Derived polymorphism lacks residues 1197 to 1248
  VARIANT 1093..1248: note = Derived polymorphism lacks residues 1093 to 1248
  VARIANT 1031..1248: note = Derived polymorphism lacks residues 1031 to 1248
  VARIANT 906..1248: note = Derived polymorphism lacks residues 906 to 1248
MAHCRLLHRYVSSAAARAAAPIPARHVPRSPGTSAQSARIRELGRLGRLHEAREVFDSMPFRDIIAWNSMIFAYCNNGMPDAGRSLADAISGGNLRTGTILLSGYARAGRVRDARRVFDGMGVRNTVAWNAMVTCYVQNGDITLARKLFDAMPSRDVSSWNTMLTGYCHSQLMEEARNLFERMPERNGVSWTVMISGYVLIEQHGRAWDMFRTMLCEGMTPEQPNLVSVLSAVRHLGKPGILESIHVLVHKTGFERDVVVGTAILNGYTKDVNMLDSAVKFFEGMAARNEYTWSTIIAALSQAGRIDDAFAVYQRDPLKSVPSRTSMLTGLARYGRIDDAKILFDQIHEPNVVSWNAMITGYMQNEMVDEAEDLFNRMPFRNTISWAGMIAGYARNGRSEQALVSLQALHRKGMLPSLSSLTSSFFACSNIEALETGKQVHSLAVKAGCQFNSYVCNALITLYGKYRSIGSVRQIFDRMTVKDTVSYNSFMSALVQNNLFDEARDVFNNMPSPDVVSWTTIISACAQADQGNEAVEIFRSMLHERELPNPPILTILLGLSGNLGAPQLGQQIHTIAIKLGMDSGLVVANALVSMYFKCSSADSLKVFDSMEERDIFTWNTIITGYAQHGLGREAIRMYQLMVSAGVLPNEVTFVGLLHACSHSGLVDEGHQFFKSMSSDYGLTPLLEHYACMVDLLGRAGDVQGAEHFIYDMPIEPDSVIWSALLGACKIHKNVEIGRRAAEKLFSIEPSNAGNYVMLSNIYSSQGMWDEVAKVRKLMKERGVNKDPGCSWMQIKNKMHSFVTGDEEHEQIQNIYATLWELYTLLKATGYVPDTDFVLHDIDEEQKESSLLYHSEKLAVAYGLLVTPKGMPIQIMKNLRICGDCHTFIKFVSSVTKREIDVRDGNRFHHFRNGSCSCEFLKLDPVWSAVRATRVRHKSLADVCMFYAFIRYEKLLEEDTSRHVVALLEGMGAAIQRRTRLGPASTLLSFLSSLACCPTLLLFPPPSLSSTPSCPPTLDARHPHPRARGRVQGRQDEPDRDRLAVSSKEEARAPVDVRVPSWWPARSRFNKKEDDALLCLNTERTATIGQSEEETEELSKITLENKDIQLDIDIRVSDGADPMELHVYDFKGPGVALSMYNSDEFIRPFAESSMDMALSKKLSLYLSTKNTILKKYDDSFKYPLYNMQAVDSNVHLQRSDGDGVFDVQDRINGRTLCDCDSIVVCEVCSFGPSMLNLVSPATTSDGVAT

SEQ ID NO: 15137 - protein, 528 aa, Zea mays
  VARIANT 188..528: note = Derived polymorphism lacks residues 188 to 528
MYRAAGSHLRSLKHHGASRLASTSVAKQSSGGLFSWLLGGKSSELPPLDVPLPGISIPSPLPDFVEPSKTKVTTLPNGVKIASETSSSPAASVGLYIDCGSIYETPASSGVSHLLERMAFKSTVNRTHLRLVREVEAIGGNVSASASREQMSYTYDALKSYTPEMVEVLIDSVRNPAFLDWEVKEQLQNIKSEIADASANPQGLLLEALHSVGYSGALAKPLMASESAVNRLDVSSLEEFVAEHYTAPRMVLAASGVDHDALISVVEPLLSDLPCVKRPEEPKSVYVGGDYRCQADSPNTHIALAFEVPGGWNQEKTAMVVTVLQMLMGGGGSFSAGGPGKGMHSRLYLRVLTNFQQIESFSAFNSVYNNSGLFGIYAVTSPDFSSKAVDLAAGELLEIATPGKGFFLASFLFLFWVDHYQSQSFVLHVLPPVVTQEQLDRAKEATKSAVLMNLESRSIASEDIGRQVLTYGERKPIEYFLKTVEEITLNDILSTAKEMMSTPLTMASWGDVIHVPSYESVSRKFHSK

SEQ ID NO: 15138 - protein, 560 aa, Zea mays
  VARIANT 25: note = Ancestral polymorphism is R, Derived polymorphism is L
MVDLDEPLDAAVTAEKGKAALQRLLEADPALFLSPSADLAAAARAASQHIYSSLVPLYPAQPPPLPTLLTDPAFDAEQIWSQIELLARPLLPQLGRQLRRIVQQPSSQQPPLKMPAVAEGEQLEEDGESSDSEELKNAEELEGTEDGEELEGTDDEEEMGDKEEEEAELDGRGGNGVEDEFLKIDELTEFLEKGEEEEYGDGAKRREKSVKNWMVESDTEDEDEDQLDLEDFEDDDEDGEAGGGDILLLVKAKRFLYYINDAAKGFSRYEDFFENGHNKQAKKRDGSTKKVQFKDEAHEVELHDSENDDGNDEQEHGLSTHEKERLKMRTKIEQMEKANLEPSTWTMQGEVTASRRPKNSALEVDLDFEHNVRPAPVITEEVTASLEEMIKKRIAESHFDDVEKPSLLPSKAPKEHKELDETKSKKGLAELYEDDYAQKAGIAPAPLSISDELKEEANTLFKRICLKLDALSHFHFAPKPVIEDMSVQANVPALAMEEIAPVAVSDAAMLAPEEIFEGKGDVKEEGELTQAERKRRRANKKRRYAASHKERTAPAKLQKD

SEQ ID NO: 15139 - protein, 150 aa, Zea mays
  VARIANT 19: note = Ancestral polymorphism is C, Derived polymorphism is Y
  VARIANT 25: note = Ancestral polymorphism is P, Derived polymorphism is L
MECGSSWRLPAVVVGILFCAALFSPPAAALNIGIQSAGDGVVDGMLGRRENPGEHEAMRKMKNEFMVNWDDLRTREKECVLVLAATNRPFDLDDVVVRRLRRRLMVNLPDASNRRKILSVILAKEDMADDVDLETIANLTEGYSGSDLKV

SEQ ID NO: 15140 - protein, 171 aa, Zea mays
  VARIANT 113..171: note = Derived polymorphism lacks residues 113 to 171
  VARIANT 1: note = Ancestral polymorphism is R, Derived polymorphism is M
MLGDREEGDEELFETASSVSSADADSDDEGDRFPSAGAAGGEGPCDQQDRRRRAPVPQPQPQPLRRMNSDSIYDMASMVSQLPAKKGLSRHYEGKAQSFACMSEVRCLDDLRKKDSPYKQKVKSSCKGYVALGGMMMANKPPSSGSCAGLGLAAANGFRTSPIQDGYQYHQ

SEQ ID NO: 15141 - protein, 131 aa, Zea mays
  VARIANT 45: note = Ancestral polymorphism is E, Derived polymorphism is Q
  VARIANT 69: note = Ancestral polymorphism is A, Derived polymorphism is G
MSWQTYVDEHLMCEIEGHHLTSAAIVGHDGATWAQSTAFPEFKAEEMAAIMKDFDEPGHLAPTGLILGGTKYMVIQGEPGAVIRGKKGSGGITVKKTGQSLIIGIYDEPMTPGQCNLVVERLGDYLLEQGM

SEQ ID NO: 15142 - protein, 353 aa, Zea mays
  VARIANT 266: note = Ancestral polymorphism is G, Derived polymorphism is A
MEDSSGERGPPSTPQLLNLIRDEREWTVTREVVEDGGAGSTSATATAASPDHPEEDDYSKLELRLCLPGAQDDERTPPPPGEKGTCTALSLGSGCFPSHPKLAASAGASATAATWAKRGFLATVGAKAQGYCRQEEDSEGCGNELTLGGENMAGETKKGCCCPPSSSHDSDAGPAVHRGDVLPVVGWPPVRSFRRNLANASSSKQSLEQQQQNDDEASCDKAKQTCKRSPLIKINMDGIPIGRKINLSAYDSYQKLSSAVQDLFCGFLDDFFSSKDCGFGCLAAQKDESRGRGAEEKMFSGLLDGTGEYTLVCEDSEGGRTLVGHLPWNVFVSTAKRLRVMESSELPHGLMWC

SEQ ID NO: 15143 - protein, 721 aa, Zea mays
  VARIANT 506..721: note = Derived polymorphism lacks residues 506 to 721
  VARIANT 470..721: note = Derived polymorphism lacks residues 470 to 721
  VARIANT 437..721: note = Derived polymorphism lacks residues 437 to 721
  VARIANT 430: note = Ancestral polymorphism is R, Derived polymorphism is W
  VARIANT 407..721: note = Derived polymorphism lacks residues 407 to 721
  VARIANT 341: note = Ancestral polymorphism is F, Derived polymorphism is L
  VARIANT 222..721: note = Derived polymorphism lacks residues 222 to 721
  VARIANT 193..721: note = Derived polymorphism lacks residues 193 to 721
  VARIANT 106..721: note = Derived polymorphism lacks residues 106 to 721
MSSTRRHTSGSEKRKKRKHIEEFNASQRGAIHKFLQTRVPSRNIEEQELAIVVWKQPGERISQENIDTNNNVSGHENPIGVEPESASACVDEQPFFSIDIYDPRNWDKLDNKARDVLVEKGPIREHNLEFPLDDNSRHFSYAHYSKVLKNGEVHDRKWSIYSKHIDKVFCFCCKIFKSNNMKSLLASDGLRDWRHLSVRLKEHEGTVEHKMSMTSWNELRIRLSKQETIDKELQGQLKKEQDHMKQVLFRLVAIVKFLSKRSLAFRGSSEKIYNESNGNFLACVEMIAEFDPVLQEHLRRIRNKEIHYHYLSHKIQNELISLLATSITNSIIEVVKRVKYFSIILDCTLDVSHQEQMAMIVRCVNMSENKIKIEEYFLGFLEVDDTSGLGLFNVLVDSMKSFGLNIEDIRGQGYDNGSNMKGKHQGVQKRLLDINPRALYMPCACHSLNLTLCDMANSSRKAISFFGIVQRIYVLFSGSTKRWKVLLHHIPNLTVKSLCNTRWESRIKSVRAIRYQAPQLRSALSQLREASDSGASTKSDAKNLFDLLGNFEFIFGIVIWHDILFAVDTVSKKLQSPSMSIDSALQQIEGIMQYFEKYRNEGFQVSLEIAKGLATEMAVHPSFPVKRQGTRKKQFDESDCSEEILQAEKDFEVNYFLVMVDMAISSLKNRFEELQTGISVGYSVFSLCLGLIATVDMFVFIDVNTYCTHYRRTMRRIYIKL

SEQ ID NO: 15144 - protein, 93 aa, Zea mays
  VARIANT 73: note = Ancestral polymorphism is P, Derived polymorphism is L
  VARIANT 56: note = Ancestral polymorphism is R, Derived polymorphism is C
  VARIANT 46: note = Ancestral polymorphism is A, Derived polymorphism is T
  VARIANT 37: note = Ancestral polymorphism is P, Derived polymorphism is L
  VARIANT 36: note = Ancestral polymorphism is G, Derived polymorphism is E
  VARIANT 34: note = Ancestral polymorphism is G, Derived polymorphism is R
  VARIANT 27: note = Ancestral polymorphism is A, Derived polymorphism is G
  VARIANT 15: note = Ancestral polymorphism is R, Derived polymorphism is Q
  VARIANT 13: note = Ancestral polymorphism is P, Derived polymorphism is R
MEAWGPDANEFRPDRLANGAAAACKPAHMYMSFGYGPRLCTRQNLAMAELKVVLVRLLSKFSFSVSPGYQHSPVFRLTIEPESGMPLVVTRLA

SEQ ID NO: 15145 - protein, 150 aa, Zea mays
  VARIANT 126..150: note = Derived polymorphism lacks residues 126 to 150
  VARIANT 124..150: note = Derived polymorphism lacks residues 124 to 150
  VARIANT 70: note = Ancestral polymorphism is P, Derived polymorphism is S
  VARIANT 63: note = Ancestral polymorphism is E, Derived polymorphism is K
  VARIANT 62: note = Ancestral polymorphism is V, Derived polymorphism is I
  VARIANT 61: note = Ancestral polymorphism is T, Derived polymorphism is I
  VARIANT 59: note = Ancestral polymorphism is A, Derived polymorphism is V
  VARIANT 58: note = Ancestral polymorphism is A, Derived polymorphism is S
  VARIANT 52: note = Ancestral polymorphism is S, Derived polymorphism is L
  VARIANT 51: note = Ancestral polymorphism is A, Derived polymorphism is T
  VARIANT 44: note = Ancestral polymorphism is T, Derived polymorphism is I
  VARIANT 43: note = Ancestral polymorphism is G, Derived polymorphism is D
  VARIANT 42: note = Ancestral polymorphism is D, Derived polymorphism is G
MLSTVVVGTDEAYEPQRRSCDVRGRSNLWALIHQDNRQWVRGGTAFEAFSASSFVIAAALTVEVLLLAQPSPPPACVPKMFILDEFTALNSMVAGDTAAVEEDLCHRSSSHNEGVSSSTVKARKDWRFRHKRCHHKRERRWSASDDDSYR

SEQ ID NO: 15146 - protein, 175 aa, Zea mays
  VARIANT 34: note = Ancestral polymorphism is E, Derived polymorphism is V
  VARIANT 41: note = Ancestral polymorphism is G, Derived polymorphism is D
  VARIANT 45: note = Ancestral polymorphism is R, Derived polymorphism is Q
  VARIANT 67: note = Ancestral polymorphism is V, Derived polymorphism is I
  VARIANT 70: note = Ancestral polymorphism is L, Derived polymorphism is M
  VARIANT 73: note = Ancestral polymorphism is L, Derived polymorphism is R
  VARIANT 75: note = Ancestral polymorphism is R, Derived polymorphism is C
  VARIANT 77: note = Ancestral polymorphism is A, Derived polymorphism is V
  VARIANT 84: note = Ancestral polymorphism is G, Derived polymorphism is D
  VARIANT 86: note = Ancestral polymorphism is R, Derived polymorphism is W
  VARIANT 90: note = Ancestral polymorphism is P, Derived polymorphism is L
  VARIANT 102: note = Ancestral polymorphism is L, Derived polymorphism is H
  VARIANT 104: note = Ancestral polymorphism is A, Derived polymorphism is V
  VARIANT 106: note = Ancestral polymorphism is R, Derived polymorphism is S
  VARIANT 118: note = Ancestral polymorphism is R, Derived polymorphism is C
  VARIANT 123: note = Ancestral polymorphism is P, Derived polymorphism is L
  VARIANT 135: note = Ancestral polymorphism is T, Derived polymorphism is I
  VARIANT 150..175: note = Derived polymorphism lacks residues 150 to 175
MPWPAMCMTPQSAAAARTASTHSSRCCWLAAAVEEGGDVDDGDPRRVVVIGMGARQVEGVPEAGSLVEKLDALNRVAAAASRLGRRCVAPALVGFGHVYADLLAGRADAGALAVVASRSDAAPLVRRRDRVAAATVALYAELDALAELEQSARRPPTDQARRALEQRAWGSTCWP

SEQ ID NO: 15147 - protein, 410 aa, Zea mays
  VARIANT 25: note = Ancestral polymorphism is P, Derived polymorphism is L
  VARIANT 8: note = Ancestral polymorphism is R, Derived polymorphism is G
MALPSRARLLLLLCFVAAAALLVAPGEVSATAAAADAGGHGKRRGHSTHTRRLRPGKGAAAAKPYPANAARVEAIERQFARWVRSMGGHGHNSSSTAYSRALSRASLPARTLVVDKNPGAGNFTSIQAAVDSLPLINLARVVIRVNAGTYTEKVSISPMRAFVTVEGAGADKTVVQWGDTADTAGAWGRPMGTFGSATFAVNSMFFVAKNITFKNTAPVPRPGALGKQGVALRISADSAAFVGCNFLGAQDTLYDHLGRHYYRDCYIEGSVDFIFGNALSLYEGCHVHAIARNYGALTAQSRQSLLEDTGFSFVSCRVTGSGALYLGRAWGTFSRVVFAYTYMDNIIIPRGWYNWGDPTREMTVFYGQYKCTGPGANYAGRVQWSRELTDDEAKPFISLDFIDGFEWLRL

SEQ ID NO: 15148 - protein, 297 aa, Zea mays
  VARIANT 141..297: note = Derived polymorphism lacks residues 141 to 297
MTMSSGQSSPMESSSRACPHSDAPAVCSNKLCRGMKAVYLVLVKKHQPKLAALGVHLHHLLSRSKRRSSLAAREQNPALMSLSSSLSCRSMDPAAAVVHPYPRSQGHRRRGSLSRHAAPSLSCRSMDPAAAVCKYQYRPREVEFSCKSTPMHRRRREDKRRLRLQSRAAEQGRDRPSSEPEYYGSAAAVTRLFALMDVEEVAEAADGGYDGSGDLDLDLDDAAVAAWSAPRQVRITDSPYLPREEDNEERSAVDRRADEFIMWFHEQLRTQQQQQLSTVRNWGSDKVVVQKQQTDWP

SEQ ID NO: 15149 - protein, 322 aa, Zea mays
  VARIANT 216: note = Ancestral polymorphism is R, Derived polymorphism is G
MASSSHSRRGRSARQAPFFRDLATPIPSHRGVSRFASGASPSAAPSATPPPPPIFTLDDLYASADFSPDPTASDLLPVASSPSPRAAASCSPPWDLSRGKVSLSAPGSPMDGVVEPARKEVLALPPPASPGTPPPATTAEVQSPVSPAQAPARTEPVANGGEAEREEWITVFGFSIGVTNLVLREFEKCGVILRHYSGPRDGNWIHILYERSYDARKALQKNGMQLSNSLIVGVKPIDAVHRQQLDKGFAQSNQGGFMVSLPSKSLGLKSVGASNQLGALPRPYDPKANTNASRDAGRRATGSVAAPAKSIVTNVMDLIFGI

SEQ ID NO: 15150 - protein, 912 aa, Zea mays
  VARIANT 130..912: note = Derived polymorphism lacks residues 130 to 912
MNPDNFTHKTNEAIVGAHEIAVEAGHAQLTPLHLAAVLAADKGGILRQAITGASGGDGAAGDSFERVLNNSLKKLPSQSPPPDSVPASTALIKVIRRAQSAQKKRGDSHLAVDQLLLGLLEDSQISDCLKEAGVSAARVRAELEKLRGGEGRRVESASGDTNFQALKTYGRDLVEQAGKLDPVIGRDEEIRRVVRILSRRTKNNPVLIGEPGVGKTAVVEGLAQRIVRGDVPSNLLDVRLIALDMGALVAGAKYRGEFEERLKAVLKEVEEAEGKVILFIDEIHLVLGAGRTEGSMDAANLFKPMLARGQLRCIGATTLEEYRKYVEKDAAFERRFQQVFVAEPSVPDTVSILRGLKEKYEGHHGVRIQDRALVVAAQLSARYIMGRHLPDKAIDLVDEACANVRVQLDSQPEEIDNLERKRIQLEVELHALEKEKDKASKARLIEVRKELDDLRDKLQPLTMKYRKEKERIDEIRKLKQRREELQFTLQEAERRMDLARVADLKYGALQEIDAAISKLESETGENLMLTETVGPEQIAEVVSRWTGIPVTRLGQNDKERLVGLADRLHQRVVGQTEAVSAVAEAVLRSRAGLGRPQQPTGSFLFLGPTGVGKTELAKALAEQLFDDENLLVRIDMSEYMEQHSVARLIGAPPGYVGHEEGGQLTEQVRRRPYSVILFDEVEKAHVAVFNTLLQVLDDGRLTDGQGRTVDFRNTVIIMTSNLGAEHLLAGMVGKNSMKVARDLVMQEVRRHFRPELLNRLDEIVIFDPLSHEQLRKVARLQMKDVAVRLAERGIALAVTDAALDIILSLSYDPVYGARPIRRWIEKRVVTQLSKMLIQEEIDENCTVYIDAAPGKDELVYRVDRSGGLVNAETGMKSDILIQVPTSSTRSDAAQAVKKMRIMEEDEDGMDEE

SEQ ID NO: 15151 - protein, 741 aa, Zea mays
  VARIANT 514..741: note = Derived polymorphism lacks residues 514 to 741
  VARIANT 579..741: note = Derived polymorphism lacks residues 579 to 741
MAGRYYQGQGGGGGTSMEVVSTPNQELALTNCAYVCPADLRRFPNALAVVADSWVFTLREHNAVASGRIALNAIQRRQAKVSAGDSVTVSSFVPPDDFKLALLTLELEYAKARANRNDELDAVVLAQQLRKRFLDQVMTLGQRVPFEFHGTNYVFTVNQALLEGQESSTPLDRGFLSSDTYIIFEAAPNSGIKVINQKEAASSKLFKHKEFNLEKLGIGGLSAEFTDIFRRAFASRVFPPQVVSKLGIKHVKGILLYGPPGTGKTLMARQIGKLLNGKDPKIVNGPEVLSKFVGETEKNVRDLFADAENEQRTRGDQSDLHVIIFDEIDAICKSRGSTRDGTGVHDSIVNQLLTKIDGVEALNNVLLIGMTNRKDLLDEALLRPGRLEVHIEINLPDENGRFQILQIHTNKMKENSFLSPDINLLELAARTKNYSGAELEGVVKSAVSYALNRQITMDDLTKPLDEESIKVTMDDFVNALHEITPAFGASTDDLERCRLRGIVDCGKAHKHIYQRAMLLVEQVKVSKGSPLVTCLLEGPAGSGKTAMAASVGIDSDFAYVKIISAETMIGFSESSKCAQICKVFEDAYKSQFSIIVLDDIERLLEYVAIGPRFSNLISQTLLVLLKRVPPKGKNLLVIGTTSEVGFLESVGMCDVFSVTYHVPKLKKEDAKKVLHHLDVFDDGDLDAAAEALDDMPIKKLYTLVEMAAQGPTGGSAEAIYAGEDKIDINHFFSILSDIIRY

SEQ ID NO: 15152 - protein, 217 aa, Zea mays
  VARIANT 15: note = Ancestral polymorphism is R, Derived polymorphism is Q
MEVAPAVKQLLPMAQGPNSPSSSTTSPSPAAPSPPPRQQQSQAPVPRIIDTTPFPTTFVQADTANFKQVVQRLTGSDTPPPAQKPAKTHGHHHHHGGGVGPKKPAFKLYERRIGKNNLKMIAPLAGPSPRKAAPEVLSPSVLDFPSLALGSPVTPLLADPFNRSASASPGEQDEAEAAAIAQRGFFLHPSPRGVEPPRLLPLFPVTSPKMAPWPSQQ

SEQ ID NO: 15153 - protein, 150 aa, Zea mays
  VARIANT 37: note = Ancestral polymorphism is R, Derived polymorphism is L
MCLAPPAAAMATEELQEGDELCPDYYHSSDDGRGQRRLQPHRWSGRKPCCLRTDDENAACKVRRPGSLSAPVAIVVPVTAVATTTEDDDDEAAFVPPHVALEARRRRSEGRVASSMCEGLGRTLKGRDLQFVRTAVLRMTGFIESCPDED

SEQ ID NO: 15154 - protein, 289 aa, Zea mays
  VARIANT 131..289: note = Derived polymorphism lacks residues 131 to 289
MLVLFETPAGFALFKVLDEGKLDKVEDLWKEFTTSDSARKVVELKAFNKFENTSDALSAATLIIDSKPSKGLRKFLQKHCEGETLAVADSKLGNAIKEKLKIDCLHNSAVMELMRGLRNQLTELITGLGAQDLGPMSLGLSHSLSRYKLKFSPEKHFPELTKIVIDNIQYAKVVKMMGNRVNAVNLDFSEILSDEELETQLKEAAVISMGTEVSDLDLSNIRELCDQVLALSEYRAQLYDYLRSRMNTIAPNLTALVGELVGARLIAHGGSLLNLAKQPGSTIQILGAE

SEQ ID NO: 15155 - protein, 277 aa, Zea mays
  VARIANT 203..277: note = Derived polymorphism lacks residues 203 to 277
  VARIANT 193: note = Ancestral polymorphism is H, Derived polymorphism is Y
MTYGLSQLSYLVSLNNVRRYKSLAINFCESDLSWPPIFASSWDESVSLRWGDLGLSVSHIFRPVPGCCTMLGPMNIEVKQRKVVAVGRKRTARPTENTCPEELAESSEEVKTDTDRNVLVMFDILRRKKSAKLENLVLNRLSFAQTVENVFALSFLVKDGRVEITVDDSGHIVRPRNAPAASAIASGEVSYSHFVFRFDLKDWKLMKEVVTEGEELLPHRTSQSNLCNEENDQPNLEVRAQIMPISSLELWQRKFQAPLQLGVVLYSLMTSSLRCFH

SEQ ID NO: 15156 - protein, 284 aa, Zea mays
  VARIANT 212: note = Ancestral polymorphism is R, Derived polymorphism is C
MGCDERSRVHPYLIESLPLAPEFRPTVAEFADPIAYLLKIEPTAAPFGICKIVPPLPPPPKRTTLAPAAGHLPAPPPPRAQAHVALSPPLHAPKFEAKAGASRKALLARLNVPASKQLSSLDVEALFWRSSADYPVVVEYASDMPGSGFAPCAARLTHLPPTNVGETTWNMRGVARSLASLLRFVNARARVLGGGSCLNAGFCTRASSGYVRTAGWTTVKFESIDESLPVRRQQGGWLSSLLRAATPSLRAAMLSHGAVVSSPPPPPALQIGFGVHQTRINAGQ

SEQ ID NO: 15157 - protein, 297 aa, Zea mays
  VARIANT 180: note = Ancestral polymorphism is R, Derived polymorphism is W
  VARIANT 165: note = Ancestral polymorphism is Y, Derived polymorphism is H
MRERAQFGRRSRPTLANSSAHPLTLLPSSRVQFGACLTPHVFPPFPSPDRRPSVRHRIQERPSFVLVVDDRSAAGRPGRMSSLEEPLGLGDLPKLSINKLGRFVSLGARRPPAAADDHSTGKEFFDLLLSPASKILNTWFESEVLKATLATDAVIGAMVLDMFSYTMSWGRLVVSVVFGRLGLNEEVRPNMDSKTKFSDVKGVDEAKAELEEIVHYLRDPKSALEEILYQFEEKLQAEREEAARKQEELQAQLQAQHAALEENQSLLRQAQEEVKGMHTKFEETNALLRAVLKLQKD

SEQ ID NO: 15158 - protein, 518 aa, Zea mays
  VARIANT 42: note = Ancestral polymorphism is A, Derived polymorphism is T
  VARIANT 254: note = Ancestral polymorphism is P, Derived polymorphism is S
MANSEYEYVKREFEFDRCLPPSNWIVVRIDGCHFHRFSKVHAFEKPNDENALRLMNACATAVLEKFPDIAFAYGVSDEYSFIFREETEFYHRRESKILSLCVSYFTSVYVMKWKDFFPNKELKEPPYFDARAVCYPNLKTIRDYLAWRQVDCHINNQYNTCFWMLVKSGKSEQEAQLALKGTFAKDKNELLAKQFQINYDDELAMFRKGSSVYREKVETTVKIDDYGEPIKRPRLKVTVAHVDTIGTAFWENHPHILREGKFMHGFVKKFGINHIFSPCNWIIVRIIACQFDQFSTIHSFDKPNDETALRLMNESASLMMEQYPDIVFGYGFSNEYSFVFHEKSELYQRRESLILSSCSSYFTSLYMTKWKEFFPYTELMQTPHFEADALCYPKLKIICEYLSWRQAECHAGNQYNTCFWMLVKSGKSEKEAHEILKGTLSKDKNELLFQQFQMNYNNEPAMFRKGSCVYRRKVEELAGAEDGGNGTSRERWHVKVDHVDLGPGFWRKHPWLMTNCTQ

SEQ ID NO: 15159 - protein, 412 aa, Zea mays
  VARIANT 281..412: note = Derived polymorphism lacks residues 281 to 412
MFRYGKSQMQQAAHVPCRLRRQKSEILRAQYVDVRELRVCAGTWNVGGICPPNDLDIEEWLDIDDEPADIYVLGFQEIIPLEVGYMIGTEDTRPVAVWEHIIHETLNKKCPDKSKSKRHSDSPPPARFNPLDYVLAVENELHNESNSDSDGELHRLHNAESSDSARRRLRPLDLACGVHNYNGDKRKRLQYVRGSVSVSMTMHETHFCFVCCHLASGEKNGDELKRNANVEEINRRTVFNPVHTIGVPQRIHDHERITLLGDLNYRLNLSYETTHELISKQDWDGLFKMDQLKKELGKGCTFDGWVEGPITFPPTYKYEFNSEKYVSDATKSGRRTPAWCDRILSYGEGTRLLSYNRAELILSDHRPVTAVYMADVEIVCPRRLQRALTFSNAEAEDHLLSRKEAHLEPKTN

SEQ ID NO: 15160 - protein, 300 aa, Zea mays
  VARIANT 75..300: note = Derived polymorphism lacks residues 75 to 300
MEFWGLEVKPGSTVKCEPGYGFVLHLSQAALGESKKSDNALMYVKIDDQKLAIGTLSVDKNPHIQFDLIFDKEFELSHTSKTTSVFFTGYKVEQPFEEDEMDLDSEDEDEELNVPVVKENGKADEKKQKSQEKAVAAPSKSSPDSKKSKDDDDSDEDETDDSDEDETDDSDEGLSPEEGDDDSSDEDDTSDDEEEDTPTPKKPEVGKKRAAESSVLKTPLSDKKAKVATPSSQKTGGKKGAAVHVATPHPAKGKTIVNNDKSVKSPKSAPKSGVPCKSCSKSFISETALQAHSKAKHGGK

SEQ ID NO: 15161 - protein, 482 aa, Zea mays
  VARIANT 116: note = Ancestral polymorphism is G, Derived polymorphism is A
  VARIANT 111: note = Ancestral polymorphism is Y, Derived polymorphism is N
  VARIANT 99: note = Ancestral polymorphism is F, Derived polymorphism is L
MAAAAAAKHVVLFPFPGQGHLSAFMSLAGLLHSALPDAAITFVSTPRNVASLQTSAWSNAPFLGFHALPFTPADHGLPPDCESSDAVQPGAIAFLLVAFESLEAAFDDYLNTAISAAAGGGHDVCVVSDPFTAWTVTAARRRGCAHAFFASCGAYGSAVVHSLWSHLPVRPDPATGRVHLPEYPEVVIHRSQLSKNASAPPAVSNCAAGFYGRQIPLGYETGAVLVNTVEEFEPTGLDMLRRTLKIPVWPIGPLVRAANLPVSPEAEAAVASFLDCHPPSSVLYISFGSQNSIRAEHMAELALALESTGRPFVWAVRPPDGHDVKGEFRADQWLPDGFEERARTSNRGLLVRGWAPQVRILAHASTGAFLSHCGWNSVLESVTHGVPIIGWPLAGEQFYNAKMLKEEWGVCVEVARGNMEDTMVNRAAVADVVETVMGQTAKAAEMRRRVWEIKEVVEGSWNDGGGSSRKAMEDFLRAMNLR

SEQ ID NO: 15162 - protein, 113 aa, Zea mays
  VARIANT 6: note = Ancestral polymorphism is A, Derived polymorphism is V
  VARIANT 20: note = Ancestral polymorphism is P, Derived polymorphism is L
  VARIANT 44: note = Ancestral polymorphism is R, Derived polymorphism is G
  VARIANT 48: note = Ancestral polymorphism is V, Derived polymorphism is L
  VARIANT 102..113: note = Derived polymorphism lacks residues 102 to 113
  VARIANT 104: note = Ancestral polymorphism is A, Derived polymorphism is T
  VARIANT 109: note = Ancestral polymorphism is S, Derived polymorphism is R
MYGEDACTIAELSIDDYLYPDADLYNVSGLPPLALPPLTCALSRSKWVFDNVFVPAYREKDCTFLTKQVSCLANGCPDDMRQYWRWQPNECSLPTYVFLLLQIASSMPSWPVV

SEQ ID NO: 15163 - protein, 165 aa, Zea mays
  VARIANT 39..165: note = Derived polymorphism lacks residues 39 to 165
  VARIANT 121: note = Ancestral polymorphism is R, Derived polymorphism is C
  VARIANT 135: note = Ancestral polymorphism is L, Derived polymorphism is R
MLHHQSFILYPFPAPINRSSALLMIHSHFSSHKSAVLIQCSWQFCHRILIRPHPAVWHLVHGLAVVYLVALTFLLFQVSQMWGFNWMDTVLLSLLAMILLVLATQSEGHTGSYLFLISQNCDDARQFMKLLHPDLGVELPERSYGADCRLYVPENPKNKFINIYV

SEQ ID NO: 15164 - protein, 566 aa, Zea mays
  VARIANT 449..566: note = Derived polymorphism lacks residues 449 to 566
  VARIANT 15..566: note = Derived polymorphism lacks residues 15 to 566
MSRLLSRQHLAAVRRSAPFACVSRWLHTPSFATVSPQEVSGSSPAEVQNFDAQQCANADLALSCLCLNHSCSVQGSWTASANWNWIVDPLNGDKFIKVAEVQGTEIKPFVESLSKCPKHGLHNPLKAPERYLMYGDISAKAAHMLGQPAVLDFFAKLIQRVSPKSYQQALAEVQVSQKFLENFCGDQVRFLARSFAVPGNHLGQRSNGYRWPYGPVAIITPFNFPLEIPLLQLMGALYMGNKPVLKVDSKVSIVMEQMIRLLHDCGLPAEDMDFINSDGAVMNKLLLEANPKMTLFTGSSRVAEKLAADLKGRVKLEDAGFDWKILGPDVQEVDYVAWVCDQDAYACSGQKCSAQSVLFMHKVTTEAMIEHMNNLLKIRGSKVLFGGEPLANHSIPKIYGAMKPTAVFVPLEEILKSGNFELVTKEIFGPFQICLILMIKLSYSDSTTQVVTEYSEDQLELVLEACERMNAHLTAAVVSNDPLFLQASRFNSLQDVLGRSVNGTTYAGIRARTTGAPQNHWFGPAGDPRGAGIGTPEAIKLVWSCHREVIYDVGPVPESWALPSAT

SEQ ID NO: 15165 - protein, 181 aa, Zea mays
  VARIANT 1: note = Ancestral polymorphism is M, Derived polymorphism is V
  VARIANT 112: note = Ancestral polymorphism is M, Derived polymorphism is T
  VARIANT 149: note = Ancestral polymorphism is A, Derived polymorphism is T
MTRYVSKKFSQQYKATIGADFLTKEVLIGDRLVTLQIWDTAGQERFQSLGVAFYRGADCCVLVYDVNVKRSFNTLDTWHDEFLNQAGPSDPQRFPFILVGNKIDLDGGSKRMVPEKKAREWCASKGDIPYFETSAKEDHNVDTAFLCIARLALEHEHDQDIYFKTVAEQVPDTEQTSGCAC

SEQ ID NO: 15166 - protein, 630 aa, Zea mays
  VARIANT 466..630: note = Derived polymorphism lacks residues 466 to 630
MSPNTRTPAHPAATLKIVVGSHIWLEDKDLVWIDGEVFRTEGQNVHVHTTNGKTVTVSISDIHPKDTEVPSDGIDDMTRLSYLHEPGVLNNLAVRYAKNIIYTYTGNILIAINPFQSLPHLSEPRTMEKYKGANFGELDPHVFAIADVSYRQMMNEGKSNSILVSGESGAGKTETTKMLMRYLAFLGGRSKTGGRTVEQQVLESNPVLEAFGNAKTVRNNNSSRFGKFVEIQFDKSGKISGAAIRTYLLERSRVCQINSPERNYHCFYFLCAAPLEDIKSYKLGDPSSFHYLNQSTCIKLDEISDAKEYLATRSAMNTVGITEQEQEAIFRVVAAVLHLGNISFVKGREADSSVIKDEKARFHLNATAELLMCDCGNLENALIKRKINTPEGVITTTVDPNSATVSRDGLAKQIYSQLFDWLVNRLNASIGHDTSSDRLIGVLDIYGFESFKTNSFEQLCINFTNEKLQQHFNQNVFKMEQEEYNREQIDWSYIEFVDNQDVLDLIEKKPGGIIALLDEAWNNKRFCKPKLSRTAFTIQHYAGEVTYQSDQFLDKNRDYVVVEHQELLNASKCSFVSGLFPSVLENTKASKSSIATRFKVSFSYPIITPAILYQVDWRKKILTKVPFFST

SEQ ID NO: 15167 - protein, 370 aa, Zea mays
  VARIANT 165: note = Ancestral polymorphism is S, Derived polymorphism is R
MAAAMCVDDEAASAAAESAGVDKLDLGAAAGGKRSVYLMDCAPVWGCASTRGRSAEMEDACAAAPRFADVPVRLLASRRDLDGLGLDAGALRLPAHLFGVFDGHGGAEVANYCRERLQVLLRQELRLLGEDLGQISCDVDMKEHWDELFTGCFQRLDDEVSGQASRLVGAVQESRPVAAENVGSTAVVAVVCSSHVVVANCGDSRAVLCRGKEPVELSIDHKPDRKDERARIEALGGKVIQWNGYRVSGILAMSRSIGDRYLKPFVIPKPEVTVVPRAKDDDCLILASDGLWDVVSNEEACKAARRQIQLWHKNNGVTSSLCDEGDESNDPAAQAAADYLMRLALKKGTEDNITVIVVDLKPRKKAKSNS

SEQ ID NO: 15168 - protein, 315 aa, Zea mays
  VARIANT 226..315: note = Derived polymorphism lacks residues 226 to 315
  VARIANT 130: note = Ancestral polymorphism is T, Derived polymorphism is I
  VARIANT 101: note = Ancestral polymorphism is G, Derived polymorphism is D
  VARIANT 79: note = Ancestral polymorphism is P, Derived polymorphism is S
  VARIANT 46: note = Ancestral polymorphism is P, Derived polymorphism is S
  VARIANT 35: note = Ancestral polymorphism is S, Derived polymorphism is Y
MAHGGTNFGFYNGANTGQDESDYKADLTSYDYVVSLFDIIDNINDPLKVSVSEHPLYMEQIGQMFGFLLYMSEYQGKLPSSILSIPKVHDRAQVFVSCSAGVRTLRYCGVIERWSNKTLEIPNLRCSSKTSLYILVENMGRVNYGPYIFDRKGILSPIQIDGITLRHWKMYPLALNSLDILPKLQLITQIPYAGASKMSIHGDSEKILQDSSCCSNESTSAEPAFYEGHFRIDNETEIKDTFISFRGWNKGVAFVNNFNIGRFWPACGPQCTLYVPAPILRPGDNIVVIFELHAPNHELTIDFTTDPDFTCGPEQ

SEQ ID NO: 15169 - protein, 189 aa, Zea mays
  VARIANT 186..189: note = Derived polymorphism lacks residues 186 to 189
  VARIANT 176..189: note = Derived polymorphism lacks residues 176 to 189
  VARIANT 167: note = Ancestral polymorphism is V, Derived polymorphism is I
  VARIANT 157..189: note = Derived polymorphism lacks residues 157 to 189
  VARIANT 100: note = Ancestral polymorphism is A, Derived polymorphism is T
  VARIANT 8: note = Ancestral polymorphism is R, Derived polymorphism is W
  VARIANT 5: note = Ancestral polymorphism is G, Derived polymorphism is A
MASGGTFRNLLLVLPLYLALASLVGGEASRRFWIENDTFRKDGVPFQIVGGDVHYFRIVPEYWKDRLLRAKALGLNTIQTYVPWNLHEPEPQSWKFKGFTDIESYLRLAQELEMLVMLRVGPYICGGKLTFVLKLHMFGMAKAKDISVYLYRIEQIELVLLQRIDSVKLSLENQKSLLGFQLKNRSLNQ

SEQ ID NO: 15170 - protein, 278 aa, Zea mays
  VARIANT 28: note = Ancestral polymorphism is G, Derived polymorphism is E
  VARIANT 61: note = Ancestral polymorphism is D, Derived polymorphism is A
  VARIANT 162: note = Ancestral polymorphism is M, Derived polymorphism is R
MGHVHSDQKAKKLAIICEQRVIIPNGHGEKLVGLLHRTSSKNLVILCHGFQATKDDSILVDLADAITKEGISAFRFDFSGNGESDGEFQYGSYRKEAADLRSVVLHFSEQKYDIIALIGHSKGGNAVLLYASKYHDVPAIVNISGRFALERGMEGRLGKNFMRRINEDGYIDVKNKKGELQYRVSKASLDDRLSTDTLFSSRAISEGCRVLTIHGAKDEIVPAEDARQFAANIRNHELRIVADANHRYTGHREELASLVLGFLSSHPYQITSRLRPRL

SEQ ID NO: 15171 - protein, 97 aa, Zea mays
  VARIANT 2: note = Ancestral polymorphism is R, Derived polymorphism is Q
  VARIANT 19: note = Ancestral polymorphism is V, Derived polymorphism is M
  VARIANT 46: note = Ancestral polymorphism is A, Derived polymorphism is E
MRMYLGWAYVGNRLLSATVEYEETGWYDGQVKPVVNRVKFTLVGLAGSLILCILLYLGCVPVEGLSRKCTVTLPQGHLGLMRSVEKLICRSIAKRGA

SEQ ID NO: 15172 - protein, 394 aa, Zea mays
  VARIANT 297: note = Ancestral polymorphism is R, Derived polymorphism is C
MGIKGLTKLLADNAPKAMKEQKFESYFGRKIAVDASMSIYQFLIVVGRTGMETLTNEAGEVTSHLQGMFNRTIRLLEAGIKPVYVFDGKPPDMKKQELAKRHDIFEYFFHPLIIPTYSKRDDATKDLTEAVEVGDKDAIEKLSKRTVKVTRQHNEDCKRLLRLMGVPVVEAPSEAEAECAALCINDKVFAVASEDMDSLTFGAPRFLRHLMDPSSKKIPVMEFDVAKVLEELELTMDQFIDLCILCGCDYCDSIKGIGGQTALKLIRQHGSIESILENLNKDRYQIPEDWPYQEARRLFKEPNVTLDIPELKWTAPDEEGLISFLVKDNGFNEDRVTKAIEKIKSAKNKSSQGRLESFFKPTATTSAPLKRKETSDKTSKAAANKKTKAGGKKK

SEQ ID NO: 15173 - protein, 102 aa, Zea mays
  VARIANT 16: note = Ancestral polymorphism is R, Derived polymorphism is W
  VARIANT 17: note = Ancestral polymorphism is W, Derived polymorphism is C
  VARIANT 66..102: note = Derived polymorphism lacks residues 66 to 102
MSSRFWRWYADRQFHRCEKTVLWGMVEPHRPARSVAPLVGTYVAAFYTGVLGAAVTEQLYKVGQPQRLGFPFPACPRSSPAGHTHCSAHRCSSECLADLRPA

SEQ ID NO: 15174 - protein, 580 aa, Zea mays
  VARIANT 305: note = Ancestral polymorphism is A, Derived polymorphism is V
  VARIANT 209..580: note = Derived polymorphism lacks residues 209 to 580
MYRAAAVISRSSSALRRQLARGVAGELPRLLARGYAATAKEVSFGVGARAAMLQGVNDLADAVKVTMGPKGRTVIIEGSHKGPKVTKDGVTVAKSVEFEDSAKNVGANLVKQVADATNKAAGDGTTCATVLTQAILTEGCKAVAAGVNVMDLRNGINKAINAITAHLKSKAWKINSPEEINQVATISANGEKEIGDLISKAMEKVGKDGVITIVDGKTLDNELEAVQGMKLSRGYISPYFVTDQKTQKCEMENPLILIHDKKISNMDSLLPALEISIKNRKPLLIVAEDVEGDALSMLVLNKHRAGLKVCAVKAPGFGENRRHNLDDMAVMTGGEVISEERGLDLGKVQLQMLGTAKKVTVSLDDTIILDGGGDKQQIDERCQQLRESIDTSTAVFDKEKAQERLSKLSGGVAVLKIGGASEAEVGEKKDRVTDALNAARAAVEEGIVPGGGVALLYATKELDKISTANEDEKIGVQIIKNSLKAPLMTIAANAGIDGAIVIGKLIEQEDLSLGYDAAKGEYVDMIKAGIIDPVKVIRTALQDAASVSLLMATTEAAVSELPATKSRIASRMPQMSGMDF

SEQ ID NO: 15175 - protein, 585 aa, Zea mays
  VARIANT 445..585: note = Derived polymorphism lacks residues 445 to 585
  VARIANT 443..585: note = Derived polymorphism lacks residues 443 to 585
MSILSTLHEAAWQLRRGQMGGTWIPTFSTHQVSTRASAPPRRAACSPQPQPPFNAGSPDANPIPLHQTPIPITAAQPHLPSVPRATSVTLFGASHSGCQMDSADAATALGAWIRGYFTPATFFLVVNLVIGTIALTSRATKQRRRRENYYHDDGNGHQETLHPQMEQPGYGHYYHPDPTLYAAPPPPAPLARTSSVLDRLRSLGLYRFRSGDFPPEYGATPPNHAQDVPAPVEEEETIASAHYARSRSEPAPAAREGERRPAPPRVKKSGSEVRKSQVSRAAPRIVQAVTEDDVSVEEAEGGGFRRRPSPPQQEYHYRQEYVTPPPPAPAPLQRTSSVLDRLRSLGLYGFLAPDEPAAAASVPASDGFATPADEKRHAHTHYDIGRSEPAREQQDKKEKTQGGNSTRAKSSSGARKTPAQRQAEAGAECVDARAEAFIDSFRQQQQVHHYQEEEYVPPPAPAPPLSRTSSVLDRLRSFGLYRFRSGDLGPDLPSATAATETDKEKQQAAHYGRSRSEPAREQGKKQDTRMNKSSSSGVVAEADAHQCVNARADDFINKFRQQLQLQRLNSLLNYKEMLNRGGDKQ

SEQ ID NO: 15176 - protein, 236 aa, Zea mays
  VARIANT 31: note = Ancestral polymorphism is D, Derived polymorphism is N
MGDGEAAVPSRFRTVCVFCGSNAGRRKVYADAALELGHELVRRGINLVYGGGSIGLMGVIARTVRHGGCHVLGVIPKALMPIEISGESVGEVRVVDDMHQRKAEMARQSQAFIALPGGYGTMEELLEMITWCQLGIHDKPVGLLNVDGYYDPLLALFEKGAAEGFISTDCSQIFVSAPTASELLTKMEQYTRVHQEVAPATSWEISELGYGRGGDAGAATPPAAAAGGAEEGKGGS

SEQ ID NO: 15177 - protein, 246 aa, Zea mays
  VARIANT 4: note = Ancestral polymorphism is E, Derived polymorphism is D
MEKEARNHYRTRGSSRGSGGGGTAAERDLLLQWGNRKRLRCVKVQRRDVEAAATAAAEKAAISQRRAAAAAAAAQHHPTGHTHHRVLRSSFFILSVTTACISGWKSEEFAIMKLPARQRQNDRIHTVASPDRECPGRGNNNNGVPQTYPDDKKGSSSGSEGSIWPKFEITLSNREKEEDFLVFKGSKLPQRPKKRAKVIQRTVNFVCPGTWLCDLTLERYEVREKKVSKKRPRGLKAMHDMDSDSE

SEQ ID NO: 15178 - protein, 189 aa, Zea mays
  VARIANT 134: note = Ancestral polymorphism is S, Derived polymorphism is Y
  VARIANT 121: note = Ancestral polymorphism is T, Derived polymorphism is I
  VARIANT 38: note = Ancestral polymorphism is S, Derived polymorphism is I
  VARIANT 6..189: note = Derived polymorphism lacks residues 6 to 189
  VARIANT 1: note = Ancestral polymorphism is T, Derived polymorphism is M
MQDLPQPPPQPRNRARRRRGTSSPVDLNLIIRSVRFGILIVCRRREMATVPGDLIWQVVRKNNSFLVKQFGNGNAKVQFTKEPNNLYNIHSFKHSGLANKKTVTIQPAAKDSAVVLSTTKTKKQNAPAKLSHKSVMRKEFRKMAKAVKNQVSDNYYRPDLTKPALARLSSVYRSLQVAKSGVKKKNRQS

SEQ ID NO: 15179 - protein, 434 aa, Zea mays
  VARIANT 181..434: note = Derived polymorphism lacks residues 181 to 434
  VARIANT 152: note = Ancestral polymorphism is G, Derived polymorphism is C
  VARIANT 148: note = Ancestral polymorphism is G, Derived polymorphism is S
MPYCEVGRYADGDKWEGVRLFYRRYGSGATKVLLVIDGKRFGVWFGSEIIKGLAGTHDSWGPQIKGLTGSLEPSDDEALRPDEEAGVGAAEAAPAEADDGIEVCCFDNRGVGRSSVLPNKSYYSTAIMATDALALIDHLGWKKAHVFGHSMGAMIACKLAAMAPHRLCSLALLNVTGGGFQCFPKVDAQMLSLAFRFLRAKTPEERALVDLETHYTKEYLEETVGSCTRRMVLYQEYVKGISSTGMQSNCGFEGQVNACWTHKMTTKELDTIRSAGFLVSVIHGRYDIIAQLCHAKRLAERLLPVARMVVPHGAHLVSHERPDEVNNALMDLIKATKSEIKPEEWSAQPENTSETGALISARPITVMVRTDAGVDATAAVYNLLGKLQLSFLYLIGMILMGFELMRNIVRVMKPVRVAAIESTKYMYTVLETLW

SEQ ID NO: 15180 - protein, 303 aa, Zea mays
  VARIANT 105..303: note = Derived polymorphism lacks residues 105 to 303
  VARIANT 189..303: note = Derived polymorphism lacks residues 189 to 303
  VARIANT 196: note = Ancestral polymorphism is I, Derived polymorphism is T
  VARIANT 251..303: note = Derived polymorphism lacks residues 251 to 303
MGLSDQDIVALSGGHTLGRCHKERSGFEGAWTTNPLVFDNSYFKELLSGDKEGLLQLPSDKALLSDPVFRPLVEKYAADEKAFFDDYKEAHLKLSELGAMLDISQSIRFDDDVEDGKSHELKVYSLDRIRAVTINFSDSNKLGEGGFGPVYMGTLPGGEVAVKRLCRNSGQGLEEFKNEVILIAKLKKQFDIIEGIARGLLYLHRDSRLRVVHRDLKASNILLDADMKPKISDFGMARMFGGDQNQFNTNQVVGIFGYMSTEYAMEGIFSVKSDVYGFGVLILSFHCHEDSLNIAGYVNTGGY

SEQ ID NO: 15181 - protein, 103 aa, Zea mays
  VARIANT 33: note = Ancestral polymorphism is P, Derived polymorphism is L
  VARIANT 47: note = Ancestral polymorphism is E, Derived polymorphism is A
  VARIANT 52: note = Ancestral polymorphism is T, Derived polymorphism is I
MAGLQRSSETFRRSGSSGLVWDDNKSFSGEIKPAEEDGGAGAARAVERSRSTGHAHAGYRATGRVPPALDPPSPRVAVCGFCRLFGGGKGKDGGNAKAKGRRH

SEQ ID NO: 15182 - protein, 471 aa, Zea mays
  VARIANT 21: note = Ancestral polymorphism is P, Derived polymorphism is L
MMARGAVLLLLAAAFAAALLPDAAESRILLTLHDFGAVGDGVADDTKALAGAWTAACAAADDVILNVPAGGTFRIWPLTLAGPCRSEIKLLISGDIVAPESPQDWGQGQSDQWLHFHKVRDLTVTGGGIIDGRGQQWWAQSLARAQPAPKAVHFEDCQGISVKGITLQNSQSYHLTFTRSSDVEANYLRVTSPEHSVDTKGIHLVDSYNVHVMDNLISTGDDCVSIVGNCTDVRLRAISCGPGHGISIGTLGVNSSVDYVEKIKVDTLFISNAENGVRVRTTENGGGGGFARKVKFESIVMRNVTNPIIVDQGISSDDPPPSSPEAVALVHHTLIRLPSLSAFTPRDAAAYISVRQAVSLNSRAGKFCAAQAATASAAVQVEKINYIDITGTSASERAVTFSCSDARPCRRLSLDNVNLTQVDGSEASSYCRQAFGRSVGTVVPESCLSKEDFVHHVPPQRSEEDGEDSES

SEQ ID NO: 15183 - protein, 322 aa, Zea mays
  VARIANT 24: note = Ancestral polymorphism is S, Derived polymorphism is L
  VARIANT 36: note = Ancestral polymorphism is I, Derived polymorphism is T
MGRLSCGGGGGGGVQPKLRKGLWSPEEDEKLYNHIIRHGVGCWSTVPKLAGKQSCNSHCWLQRCGKSCRLRWINYLRPDLKRGSFSQQEEDLIVALHEILGNRWSQIASHLPGRTDNEIKNFWNSCLKKKLRQRGIDPATHKPVAAAEASAALPDARDHDREPGGAGAGADADGLAQQSKQPAAAVFDPFPVVDFGFDLSGGGGVAALYGGPYDAAAGKASADDGGFVADYSSVLDVSENLGYGESSSNSSNWGNGAEMGNAAAAVLDGEVLHWAKPEPYTELEQRSAGQAAADDDALHHRFLLPCGQEQSLAHLDFGLEYF

SEQ ID NO: 15184 - protein, 348 aa, Zea mays
  VARIANT 180..348: note = Derived polymorphism lacks residues 180 to 348
  VARIANT 167..348: note = Derived polymorphism lacks residues 167 to 348
MVKDSAYYDVLGLSVDASPAEIKKAYYIKAKLVHPDKNPGNPDAALKFQELGEAYQVLSDPGKKEAYDNYGKEGIPQDNMVDPAAVFGMLFGSDYFEDYVGQLALASIASVEVEENSNSQEARAKVQEKIKELQREREQKLTQSLKDRLQSYVDGRNDEFVSYASAEARRLSEAGTSCYYLFVRSFGEAMLHTIGYIYVRQAARELGKSRIYMGVPFIAEWVRDKGHHIKSQVNAASGAISLIQLQEGMKKMEGSEDSEEQLMKSFEEKKDAMLSSLWKINVVDIESTLSRVCQAVLRDSMVSKDVLKLRAKALKKLGTIFQGAESMYRRENSLRVETSTDQQAASSH

SEQ ID NO: 15185 - protein, 618 aa, Zea mays
  VARIANT 259..618: note = Derived polymorphism lacks residues 259 to 618
  VARIANT 268..618: note = Derived polymorphism lacks residues 268 to 618
  VARIANT 473..618: note = Derived polymorphism lacks residues 473 to 618
MSGPLDRFARPCFEGFVHNDERKESRSDADNSEGDKKTKIGSFKKKAINAGNKFRHSLRRRSKKKTERGDSIKDIRDVKELQDVETFRQCLIDEDLLPPQHDDYHMMLRFLKARKFEVEKAKSMWSDMINWRKEFGVDKIEEFDYTELDEVTEYYPQFYHGVDKEGRPVYIELVGKVDANKLIQVTTLDRYVKYHVKEFEKCFQMKFPACTIAAKKHIDSSTTILDVQGVGFKNFSKSARELITRLQKIDSDNYPETLCRMYIINAGQGFKMLWSTIKSFLDPKTASKIHVLGNKYQHKLLEIIDECELPEFLGGKCNCIEGCQRSDKGPWKDPNIIKRVLNDEANYGRQIVTISSIDGKIIRYARPDHPTRKGSDASAESGSEVEDVTSPTASRNLITHPILTPVHEESKLSPHGSTFVAHASIEENIPVVDKVVDDGWGTPRGSLQASSGSLPSRNTHGTFEGLRVQAVAWLTFLITALFATLCSVPSKMARRISSQSSKHDDYRGEYPQEEEEHKEEFRPPSPAPSYTEKDVLSSMLRRLGELEGRVQVLETKPSEMPFEKEELLNAAVRRVDALEAELISTKKALYDALMRQDELLAYIDRQELIKFRKKKFCF

SEQ ID NO: 15186 - protein, 198 aa, Zea mays
  VARIANT 161: note = Ancestral polymorphism is G, Derived polymorphism is R
  VARIANT 137: note = Ancestral polymorphism is G, Derived polymorphism is R
  VARIANT 129: note = Ancestral polymorphism is G, Derived polymorphism is V
  VARIANT 128: note = Ancestral polymorphism is V, Derived polymorphism is A
  VARIANT 103: note = Ancestral polymorphism is S, Derived polymorphism is R
  VARIANT 97: note = Ancestral polymorphism is D, Derived polymorphism is E
  VARIANT 66: note = Ancestral polymorphism is Q, Derived polymorphism is P
  VARIANT 37: note = Ancestral polymorphism is A, Derived polymorphism is S
MESDAEEAAAAAAVDPGAGRLKGSPELTVDADMREVAKRAAWSVSSFKDGNGVAALRDDNLDAYWQSDGAEPHLVNIRFQKKVQLQLVALYVDFKLDESYTPSKISIRAGDGFHNLKEIKTVELAKPVGWVHISLSGADPRETFIHTFMLQIAVLSNHLNGRDTHVRQIKIYGPRPSPVPHQPFHFISREFITYSTIR

SEQ ID NO: 15187 - protein, 469 aa, Zea mays
  VARIANT 87: note = Ancestral polymorphism is A, Derived polymorphism is T
  VARIANT 85: note = Ancestral polymorphism is E, Derived polymorphism is K
  VARIANT 81..469: note = Derived polymorphism lacks residues 81 to 469
  VARIANT 63: note = Ancestral polymorphism is S, Derived polymorphism is F
MADAGISGRHLTRLRTLGRGASGAVVSLFAAGEGELVAVKSAGGAAAAAQLRREGGIMASLSSPHVLPCLGFRAAAGGEFQLLLEFAPGGSLVDAVGRNGGRLEEPAVRAYAADVARGIAYLHGEEGVVHGDVKARNVVIGADGRAMLADFGCARRAGSGGPIGGTPAFMAPEVARGEDQGPAADVWALGCTVIEMATGRAPWTHVDDVPAAVRLIGYTDAVPEAPEWLSAETKDFLDKCLRREASERWTAAQLLEHPFLASAGEAEDDAKPRWVSPKSTLDAAFWELDEEEEEEEMSESATDRIRALAGPCSALPDWESDDDGWIEVSSGYSELPNAAAAAVAGQEVRFPSTQCEIPSTAVATSSEQAPVAAPASETTSYGIFGGGDESESELFDADSDVGDDPVHNVGAADAYYAHRQQLDVYANFTGDPIVLHLDIYAEEIVKKYFFTAKWPPVSFLAPPPPLPVF

SEQ ID NO: 15188 - protein, 483 aa, Zea mays
  VARIANT 187: note = Ancestral polymorphism is D, Derived polymorphism is H
  VARIANT 40: note = Ancestral polymorphism is S, Derived polymorphism is C
MAMAVSGRWTRVRTLGRGASGAEVFLAADQASGDLFAVKCAPAAAGAELLRRERALMAGLRSPHVVPCIGGRAGRDGSYQLFLEYAPGGSLADVAAARSGGRLEERAVAAYAADVAAGLAYVHAAGLVHGDVKPRNVVVGADGRAKLADFGCARRAADDDAALPIGGTPAFMAPEVARAEAQGPPADVWALGCTVLAMATGRAPWAAAAGDVLAAVRLIGYTDAVPEVPQWLSAEAKDFLGRCLARRPGDRSTAAQLLEHPFVASKSTLDLDGAKGTWVSPKSTLDAAFWESESDSDSDDDHRHHHDVDVDAVSAQSTADRIGALACPASALPDWWDSDEGWIDVLSAPAEASSDATVDEGPCVGDGGAGTEEEERADQAAEPLDTDADGAHNAGEADASPPDREWHLRVSSPCDGEMQCTRLLCDTNNNAMDFLLSTTPNLPCLSVGFMDFKNLCSFLSSHSVSGIGSPSRTFSLAATNSHT

SEQ ID NO: 15189 - protein, 309 aa, Zea mays
  VARIANT 164: note = Ancestral polymorphism is A, Derived polymorphism is P
  VARIANT 132: note = Ancestral polymorphism is R, Derived polymorphism is Q
  VARIANT 131: note = Ancestral polymorphism is R, Derived polymorphism is C
  VARIANT 124..309: note = Derived polymorphism lacks residues 124 to 309
  VARIANT 94..309: note = Derived polymorphism lacks residues 94 to 309
MAAVTAAPAAAAATRAGDTTPSSLGVPALAETESRPSSSSFPPLPSAVAEPFRVSISSSRAAFSWYAVCSWSPSLAPLRISSSWLAFSAARRPWRRSTSARSVAASLSLVAATCSAAATSSRAWDTRTSRRRDSEDRNRFSCPTASSFSSRSRFAARRASISSAKLWSLGVLSPPLMEISKSAAAAAVGEANVSSPFSIGNPPPPLAAARWRWMRCEGGNGNRKKIVKRRSKVEVSHRRKSDQDVPIGRRGEEFSDRTAEMGRWGGKARAKTGRGLAFHSTHAEKKEKGSIRCCLIACHSSPRTPSPLK

SEQ ID NO: 15190 - protein, 208 aa, Zea mays
  VARIANT 36: note = Ancestral polymorphism is A, Derived polymorphism is G
  VARIANT 68: note = Ancestral polymorphism is R, Derived polymorphism is W
  VARIANT 69: note = Ancestral polymorphism is R, Derived polymorphism is H
  VARIANT 76..208: note = Derived polymorphism lacks residues 76 to 208
  VARIANT 106..208: note = Derived polymorphism lacks residues 106 to 208
MENGEETFASPTAAAAADFEISINGGDSTPKLHNLADEMEALRAAKRDLEEKLDAVGHENRFLSSESRRLEVLVSQAREEVAAAEQVAATKESEAATLRAEVERLQGLLAAEKASHEEEMRRGARLGDQLQTAYQEKAALEEEIETLKGSATAEGKGGKEEEEGRDSVSARAGTPKDEGVVSPALVAAAAAGAAVTAAIAVVLLNLKR

SEQ ID NO: 15191 - protein, 308 aa, Zea mays
  VARIANT 219: note = Ancestral polymorphism is A, Derived polymorphism is V
MDCSSAPIDTHNSAAEEAALPRRIPSAPEASSSGLGLQWMRGSVTLSLRTPDQEPAAVALSLNTRHPQGHLQEELATAAAAAVVHEGAQAQAQQPLGERDMPEEHRAIADMAARLGIAAGARDRAVEVFMRMEERKGKSKSHHYYTKGAGRSGDALYAACLYVACRSAGAPRTFKELAAATRDGPAARKDIGKLIALIRKRLGDEAGGEAMDMGVVRAADYVERFGSLLGIGEGEVRAVQEAARRMQDHLDVRRNPDSTAAAIVFMAMERRAGAGSSIRDVSAATGVAENTIKQAYRELYPHADLLFP

SEQ ID NO: 15192 - protein, 228 aa, Zea mays
  VARIANT 192: note = Ancestral polymorphism is G, Derived polymorphism is S
MRGSEMLTASGGTGTAPSTASSSSAAAADLVAGAGGLGAIGVGGGGGNFPLAVALLAFACANFINLLSIWLKEKRWDARKFLTSAGVMSSLSATVGSLAVAVGQREGADSSAFALALVFAAVVMYDASGIRWHTGRQAALLNQIVCEFPAEHPIISTFRPLREPLGHSPLQVALLLVSSRESFLFSIAKRHGFCRSTCWLCSRLFHGKVCMRNELGFALYTNPIDLNI

SEQ ID NO: 15193 - protein, 544 aa, Zea mays
  VARIANT 340..544: note = Derived polymorphism lacks residues 340 to 544
MDTVGVPVVAVANGIGEVERKVQKSYWEEHSKCLTVESMMLDSRAADLDKEERPEILSLLPSYKGKSVLELGAGIGRFTGDLAKEAGHVLALDFIESVIKKNQSINGHHKNITFRCADVTSNDLKIEDNSVDLIFSNWLLMYLSDEEVQKLVGKMVKWLKVGGHIFFRESCFHQSGDSKRKVNPTHYREPRFYTKVFKEGHSFDQDGGSFELSLVTCKCIGAYVKNKKNQNQICWLWEKVKSTEDRDFQRFLDNVQYKTSGILRYERVFGEGFVSTGGIETTKEFVGMLDLKPGQKVLDVGCGIGGGDFYMAANYDVHVLGIDLSVNMVSFAIERAIGRKCSVEFEVADCTTKDYPENSFDVIYSRDTILHIQDKPALFRSFFKWLKPGGKVLISDYCKNPGKPSEEFAAYIKQRGYDLHDVKAYGQMLKDAGFHNVIAEDRTEQVITLSGNHPLVVERFLFLYIIMLAEGINYAMDILPISICFFPQFLNVLQREIGEVEKNKDAFLADFTQEDYDDIVNGWNAKLKRSSAGEQRWGLFIATK

SEQ ID NO: 15194 - protein, 563 aa, Zea mays
  VARIANT 324..563: note = Derived polymorphism lacks residues 324 to 563
MASMQSWRKAYGAIKDTTTVSLANLNSDFKDLDVAIVKATNHVECPPKERHLRKVVAATSIARPRADVAYCIHALARRLAKTRNWIVALKALVVIHRLLREGDPTFREELLNFTQRGRILQLSNFKDDSSPIAWDCSAWVRTYGLFLEERLECFRVLKYDVEAERLSKQGQGPEKGHSRTRELDSQDLLEQLPALQQLLYRLVGCRPEGAANNNYLVQYALALVLKESFKIYCAINDGIINLVDKFFEMPRHEAHKALEIYRRAGQQAGNLSDFYENCRGLELARNFQFPTLREPPQTFLATMEEYVKEAPRMVPVREPLELPERLLLTYKPEESEDIPEPASVEEENAPVEEPVLVPPVTEVVSPPKTEVADTGDLLGLDDPNPAVSAIEESNALALAIVPTDGASTTGNTAFQDKGFDPTGWELALVTAPSNTTSSASVGQLGGGFDKLILDSLYDDGAYRQRQQQQVYGSAVPNPFMTNDPFVMSNQVAPPPSVQMAAMSQQHQQIPTMMQPNPFGPPMQPQVGMGPATNNPFLDAGFGAFPVANNSHQQHNPFGSAQLL

SEQ ID NO: 15195 - protein, 266 aa, Zea mays
  VARIANT 153: note = Ancestral polymorphism is L, Derived polymorphism is I
  VARIANT 144: note = Ancestral polymorphism is S, Derived polymorphism is F
  VARIANT 72: note = Ancestral polymorphism is G, Derived polymorphism is E
MDLQEKTTPTHKGKGKKKESAKKKERSRKRTSSVLDSTNDTVISEEMSEYNLDEPTMEEKLATLNLINRENEIHGTEKQSLSVAPPSADSVHILLKQALRADDSVALLTCLYNRDEKVITKSISLLTPADVVKLLKFFVLQIQSRGAVLVCLLPWLQTLLNRHMSSIVSQESSLSLLNSLYQLIDARTSTFKSALQLSTTLDYLFSEIADDEADEEVPPPIIYEDKDTDDDESEVDAMETDREEAEELGAVTDASENSDGSEIMSD

SEQ ID NO: 15196 - protein, 279 aa, Zea mays
  VARIANT 197: note = Ancestral polymorphism is A, Derived polymorphism is T
  VARIANT 37: note = Ancestral polymorphism is V, Derived polymorphism is A
MDVKCRRLEGKVAVVTASTQGIGLAIAERLGLEGAAAVVSSRKQKNVDEAVEGLKAKGITVVGAVCHVSDAQQRKNIIETAVKVATVEGGSSLSGLVLLSSNQLIIWLQNFGHIDILVSNAAANPTVNVILEMKEVVLDKLWDINVKASILLIQDAAPHLRAGSSVILISSIAGYNPEQGLTMYGVTKTALFGLTKALAGEMGPDIRVNCIAPGFVPTRFASFFIDNETIRKKLNERTMLKRLGSVEDMAAAAAFLASDDASFITAETIVVAGGVPSRL

SEQ ID NO: 15197 - protein, 269 aa, Zea mays
  VARIANT 69: note = Ancestral polymorphism is R, Derived polymorphism is L
  VARIANT 73: note = Ancestral polymorphism is A, Derived polymorphism is V
  VARIANT 78..269: note = Derived polymorphism lacks residues 78 to 269
  VARIANT 95: note = Ancestral polymorphism is P, Derived polymorphism is S
  VARIANT 98: note = Ancestral polymorphism is P, Derived polymorphism is A
  VARIANT 194: note = Ancestral polymorphism is K, Derived polymorphism is E
MADKPGDWLTLGNGGRSSSGLTRPRTADAQEGGEDFLELSLGSIYNNPSSSSLASDDSASSPLDAPHLRLLVALRHSYWALLPRSDDADSDGTPPLFPWAAKTAAGVQLTLAELFERGIATVEGEVRCNRCFVGKTVSYDIRAKFEELSSFIVGNLETMIDRAPSEWISPTLPDCDKCGQKNGLRPVIADDKRKINWIFLLLGQTLGLCTLDQLKHFCAVTSQHHTGAKDRVLYSTYMELCNQLCPGGPFDVFFDNGIPPISLRNRNQT

SEQ ID NO: 15198 - protein, 258 aa, Zea mays
  VARIANT 188: note = Ancestral polymorphism is A, Derived polymorphism is G
  VARIANT 236: note = Ancestral polymorphism is V, Derived polymorphism is L
MRLFSGVLDSSSALASAVLGSVSDRLGFSRIVFGRASPSNMPALACSAASSSSAATGAQKPWLFVGLGNPGRMYKGTRHNVGFEMIDAIAEAEGISVSSKQFKAIVGKGLIGDVPVMLAKPQTFMNASGESVGQLVSYFKIPLNQLVVIYDDLDLPFAKLRLLPKGGHGGHNGMRSIVDHLNQSRDFGRLRIGIGIGRPPEELGAINFVLRSFTKQEKEELEVTFQRSLQAVRIMVREGFNKSAQFVNTPQPPEMLNR

SEQ ID NO: 15199 - protein, 525 aa, Zea mays
  VARIANT 38..525: note = Derived polymorphism lacks residues 38 to 525
  VARIANT 151..525: note = Derived polymorphism lacks residues 151 to 525
  VARIANT 313..525: note = Derived polymorphism lacks residues 313 to 525
MAATTHAASMSFLLSHPQSRSATPSRHLPLRPAARRVQCATDAAALSPAVTTKHRRAADENIREEAARHPAPKQGLSAWYEPFPPAPNGDPNERYSLDEIVYRSSSGGLLDVRHDMEALSRFSGAYWRDLFDSRIGRTTWPYGSGVWSKKEFVLPEIEPDHIVSLFEGNSNLFWAERLGRDHLGGMNDLWVKHCGISHTGSFKDLGMTVLVSQVNRLRRAPLSRPIAGVGCASTGDTSAALSAYCAAAGIPAIVFLPANRISLEQLIQPIANGATVLSLDTDFDGCMRLIREVTAELPIYLANSLNSLRLEGQKTAAIEILQQFDWEVPDWVIVPGGNLGNIYAFYKGFEMCRVLGLVDRVPRLVCAQAANANPLYGYYKSGWTEFQPQVARPTFASAIQIGDPVSVDRAVVALKATDGIVEEATEEELMNAMSLADRTGMFACPHTGVALAALFKLREQRVIGTNDRTVVVSTAHGLKFSQSKIDYHDSKIEDMACKYSNPPVSVKADFGAVMDVLKKRLKGKL

SEQ ID NO: 15200 - protein, 406 aa, Zea mays
  VARIANT 236: note = Ancestral polymorphism is L, Derived polymorphism is R
  VARIANT 265: note = Ancestral polymorphism is W, Derived polymorphism is L
MDSTSCLVDDASSGASTGKKPAPAPAAATGKPLQRVGSGTSAVMDAAEPGAEADSGGAGRAPGGVSGKLPSSKYKGVVPQPNGRWGAQIYERHQRVWLGTFTGEAEAARAYDVAAQRFRGRDAVTNFRPLAESEPEAAVELRFLASRSKAEVVDMLRKHTYGEELAHNRRAFAAASPAASPPPENNRRPPAASSSSSPAAAREHLFDKTVTPSDVGKLNRLVIPKQHAEKHFPLQLPAAAAAGVGSGGECKGVLLNFEDAAGKAWRFRYSYWNSSQSYVLTKGWSRFVKEKGLHAGDAVGFYRSAGGKQQLFIDCKLRPNKTTTTAAAFVNVNAMTTTAAPPLAAVKAVRLFGVDLLTTPRPAAVAPEQEEVTVANKRARDAMATAASTPAPVHMVFKKQCIDFAR

SEQ ID NO: 15201 - protein, 331 aa, Zea mays
  VARIANT 81..331: note = Derived polymorphism lacks residues 81 to 331
MADQPEEMPAAPAIRLGPPHPYLKTHGGKVARLHRLDWAVLLLIAAADVGLNLVEPFHRFVGEDMLADLRYPLKSNTVPVWAVPVYAVIGPIVVFVGLYLKRRNVYDMHHAILGLLFSVLITGVLTDAIKDGVGRPRPNFFWRCFPDGVPKYDNITRGVLCDGVASVIKEGHKSFPSGHSSWSFAGLGFLSWYLAGKVKAFDRRGHVAKLCVVLLPLLLAAMVAVSRVDDYWHHWQDVFAGGILGLVVASFCYLQFFPPPSGEQGFWPHAYSEHILNPEREGQAQSTASSNHHRRLSSRGHVAVEMSTATASQEASSLGPMEEMEEGRGAR

SEQ ID NO: 15202 - protein, 384 aa, Zea mays
  VARIANT 8: note = Ancestral polymorphism is G, Derived polymorphism is R
MARDGGSRGSPGAERRRVALRALLASGGAEAEAARTSSKGLLRGLRCTSAAASQAIAPEIPRPPADWRGLGCAAAAQAHAPAAAVEAARPTADWRRLGCAAGAAPAVQAQAPRRSEEWRVRRRRNERERRKARAGGVSGGGGASAGMGVGGDVWCTPGIPFAAEASSVDCVVAPHHTVAARRRAEADRPRRERPGAPPARRVTMREHMSSSPLSSPPHHVMPFVDVDRAPSGRIRHVSGRRHSHARVEEEVDTWVFMFFQMMFQTRMLLGRMGIYDQYQDWRLDVDNMTYEELLDLEDRIGYVSTGLREDEIIQSLRMVKYSAFNPRHFSTEMDRRCSICQEEFEVHEETGKLSCGHSYHVHCIKQWLSRKNACPVCKTTVSKT

SEQ ID NO: 15203 - protein, 227 aa, Zea mays
  VARIANT 65: note = Ancestral polymorphism is W, Derived polymorphism is R
  VARIANT 60: note = Ancestral polymorphism is G, Derived polymorphism is R
  VARIANT 33: note = Ancestral polymorphism is P, Derived polymorphism is L
MSKAKLPHVETDSSGDDDGPKPRLVFRRRMRTPVKLLGGRKVSDVLLWRNRNLSAGILAGATLVWFLFDVAEYNVVTLLCHVALLGMVLLFVWSNAAPLLDRPPPQIPEVIVSEHAFREAARTTHYRLAHFVSVLYDVACGKDLKKFLMVIGSLWILAILGDTCSFTTLLYGGLLCALTLPALYERYEAEVDHLVAKGREDLKKFYRKVDSNVLNKIPRGPVKTKAL

SEQ ID NO: 15204 - protein, 98 aa, Zea mays
  VARIANT 17: note = Ancestral polymorphism is V, Derived polymorphism is A
MAESKARVALFLAALAAASLLALAPAGAATTCAPTQLTPCAPAIVGNAAPTAACCARLKAHPATCFCQYKRNPSMQRYVNSPNGKKVFAACKVSLPRC

SEQ ID NO: 15205 - protein, 699 aa, Zea mays
  VARIANT 10: note = Ancestral polymorphism is L, Derived polymorphism is P
MAHSERTQYLNLALPPLLVALLLASLPQYQPQPQPDDDGAYFRYSNCAPTPYRCGPVKFDVGYPLSVTGVARPDYCSFPGYRLACTNGSRLAITMNAPAGAWAFQVTGVDYENRLLTLVDQGLAQQACLQPYRNTTIDGTRFAYTDRDQFLTVYVNCSAASPSLPLVVDVLSCLSGGPSYYSLDNGTVAPDVLGSCSSTLVVPYNSSMAAAAGSSGLGLGDAINGGFAARWTAGAAWCGDCVDSGGRCGYNSSSPTDHTCYCPDGTSFGTCSSGTKKNKKAIAIGSSIAAGVLLLLLVVMTCLYIRKRRQYKMTSSSRFLEPTASGGTPRSRGSTAMESGSVRSLQTHHFTYQELEEATDSFSGAMEIGDGGFGTVYKGHLRDGRVVAVKRLYNNSCRHVEQFLNEAAILSRLRHPNLVLFYGCTSSRSRELLLVYEYVPNGTVADHLHGHRAAERALTWPLRLGVAVEAAAALAYLQAVEPPVVHRDVKTSNILLDADFHVKVADFGLSRLFPLDVTHVSTAPQGTPGYVDPEYHQCYQLTDRSDVYSFGVVLVELISSKPAVDLTRGRSDINLAGMAINKIQQCRLEQLVDLGLGYGSDEATTKQMTLVAELAFRCLQQNGETRPPIKEVLDALTSIQGDGLGKKTDALIAPRSPDTVHAPWDSMGTVQPPVLANEHLDECTVPQYRIRSVTEICHD

SEQ ID NO: 15206 - protein, 1205 aa, Zea mays
  VARIANT 284..1205: note = Derived polymorphism lacks residues 284 to 1205
  VARIANT 926..1205: note = Derived polymorphism lacks residues 926 to 1205
MATPLAGKGPIAAAIPRSPPPLAEGGAGGSAAEAPVLIFVYFHKAIRAELERMHAAAVRLAMGRAGGDVATLEARCRFLFTVYRHHCDAEDAVIFPALDIRVKNVAGTYSLEHKGENDLFAHLFTLLQLDVQNDNAIRRELASCTGAIRTFVSQHMSKEEEQVFPLLIKKFSHEEQADLVWQFLCSIPVNMMAKFLPWISASVSTDENQDILDCLSKIVPEEKLLQEVVFTWFGGKSESSSTCESSSGQTDKHAHSLEHTKIGKRKSIESSQLVTHPIDEILYWHNAVLRELSDIAEETKRIHQSGDFSDIAGFNMRLQFIADVCIFHSIAEDQVIFPAVDGELSFVQEHAEEERRLNKFRSLIEQIQLAGAKSTVVDFHSELCSQADQIMQKIESHFNDEEIKVLPKARIKFSPEKQRELLYQSLCVMPLKLLERVLPWFIVKLNDAEAVSFLQNMRLAAPSSETALVTLLSGWACKGRLEDTSNPGKFVCMASGAVTCASDGNGFKTCQSLCPCYVSSNGAFSKPVKRASQGESSTNTDRNHSSHNAATEASQCNNRACYIPRLRVESSYLGVHSSTPTKSFRPLSFNYVAPSLYSSLFSWDTDTLVSGPDNISKPIDTIFKFHKAIRKDLEFLDLESGKLIDGNESCLSQFIGRFRLLWGLYRAHSNAEDEIVFPALESKEALHNVSHSYTLDHKQEEKLFQDISTVLSELSQLHDGLSYPLDVEAGTNDISSNEIDWARKRNELLTKLQGLCKSIRVTLSNHVHREELELWPLFDKHFSVDEQDKIIGHIIGTTGAEVLQSMLPWVTSALSLEEQNMMLDTWKQATKNTMFDEWLNEWWKGPSTSSDPSDKASTPSEESHFQENLEQNDQMFRPGWKDIFRMNQSELEAEIRKVSRDSTLDPRRKAYLIQNLMTSRWIAAQQKSPQPSVEGHNGCTRRPGCVASYRDPGKQIFGCEHYKRNCKLVAACCDKLFTCRFCHDKVSDHTMDRKSVMEMMCMQCLNVQPVGPNCQSPSCNGLSMAKYYCSICKFFDDERSVYHCPFCNLCRLGSGLGTDFFHCMKCNCCLGIKMIEHKCREKMLEMNCPICCDFLFTSSAPVKGLPCGHFMHSACFQAYTCTHYTCPICCKSLGDMTVYFGMLDGLLAAEQLPEEYQDRCQDILCNDCERKGRSRFHWLYHKCGFCGSYNTRVIKTDTAECSRPL

SEQ ID NO: 15207 - protein, 347 aa, Zea mays
  VARIANT 213: note = Ancestral polymorphism is R, Derived polymorphism is W
MSTSSLKEPNVSQSKDVENGNDNSVKSCISKPVLNGNKCANKEQNVPSCCPGAVTNGNEAGNADVEYIDSENLVDLPDVDAALCTLVKRLDSKDWVMTCEALNNVRQLAMYHKERLQELLEPLVPLIVKSVKNPRSAVCKTALMTCADIFKVYGDLLVESIDPLLVQLFLKASQDKRFVCEAAEAALTSMTSWISPLLLLPRMQPYLKNRNPRVRAKASVCLSKSVPCLDVQGIREYGMDKLVQIAATQLSDQLPESREAARNLALELQVLYEKSQASTSDENEGEPSVSQDAESWEAFCQSKLSALSAQAILRVTSTTPKEGVASTSNATKEGVTAAPKEGLDVDC

SEQ ID NO: 15208 - protein, 256 aa, Zea mays
  VARIANT 190: note = Ancestral polymorphism is R, Derived polymorphism is C
  VARIANT 51: note = Ancestral polymorphism is R, Derived polymorphism is L
MAATADPRAKPPSAAPHHLAEPWAHQASPAAHRMPSPKAAAGGGCGARDRRRSSSSHRRAQAIGAKADATPYDGGIEALRAKLMGHLRDAADRLREPHRPSSRGTAALPPAPRPPPSKATTPASPPPPPPGTDCEPELRAPPAPPAPAAPPQPDAATRPWNLRERTPRRPAAARSWAASPSPPAPPPSSRKRRRRAPFSVPLAAEEIEEDIYALTGARPRRRPRKRPRAVQRHVDSLFPGLWLTEITADAYRVPDD

SEQ ID NO: 15209 - protein, 204 aa, Zea mays
  VARIANT 150..204: note = Derived polymorphism lacks residues 150 to 204
  VARIANT 115: note = Ancestral polymorphism is Y, Derived polymorphism is H
  VARIANT 103..204: note = Derived polymorphism lacks residues 103 to 204
  VARIANT 77..204: note = Derived polymorphism lacks residues 77 to 204
  VARIANT 32: note = Ancestral polymorphism is G, Derived polymorphism is S
MESSPAAAMTPASSSRAARDPLLFARFDLPAGWGCRKPLAFCREAREDTDDAPVASEPAATAAPTPTEGVKDSDGTRSPTRAAATVQQAPAAAEIAQEAPRKQWNLRERTSWRDYSHRVDELRARQARKLGSAAAGGSRRLSLSVKLTRQEIDADFTKITGSKAPRRPTKRSKTVQRKIETLCPGSSLVQVNLDRYKVNEKGGF

SEQ ID NO: 15210 - protein, 369 aa, Zea mays
  VARIANT 306: note = Ancestral polymorphism is S, Derived polymorphism is L
  VARIANT 290..369: note = Derived polymorphism lacks residues 290 to 369
  VARIANT 285..369: note = Derived polymorphism lacks residues 285 to 369
MAAAAVAGARRPLHRTLAHPPPPEEDEHQQQRACRSRGSSSSCSASSSSTPARPRGTGMVVIVGATGTGKTKLSIDAAEAVGGEVVNADKIQLYAGLDVTTNKVAPADRRGVPHHLLGAIRPEAGELPPSTFRSLAAATAASIAARGRLPVVAGGSNSLIHALLADRLDAGAADPFSAPPQPAPPRWGRRPALRSPCCLLWVHVDAALLAEYLDRRVDDMVRGGMVEELREYFAATTAAERAAHAAGLGRAIGVPELGACFAGRASFRAAIDDIKANTRDLAAAQVRKIRRMADAWGWPIQRLDASATVRARLRGAGPDAESACWERDVRAPGLAAIRSFLLELDGGSVVDGAVVEEVEPRVRCCDVVG

SEQ ID NO: 15211 - protein, 334 aa, Zea mays
  VARIANT 285..334: note = Derived polymorphism lacks residues 285 to 334
MAGAQESLSLVGTMRGHNGEVTAIATPIDNSPFIVSSSRDKSLLVWDLTNPVHSTPESGATADYGVPFRRLTGHSHFVQDVVLSSDGQFALSGSWDGELRLWDLSTGLTTRRFVGHEKDVLSVAFSVDNRQIVSASRDKTIKLWNTLGECKYTIGGDLGGGEGHNGWVSCVRFSPNTFQPTIVSGSWDRTVKVWNLTNCKLRCTLDGHGGYVNAVAVSPDGSLCASGGKDGVTLLWDLAEGKRLYSLDAGSIIHSLCFSPNRYWLCAATQDSVKIWDLESKHVVQDLKPDIQISKNQILYCTSLSWSADGSTLYTGYTDGSIRVWKISGYGYAG

SEQ ID NO: 15212 - protein, 346 aa, Zea mays
  VARIANT 94: note = Ancestral polymorphism is G, Derived polymorphism is A
MSSSLYKQLGLSGAGSPLSGRHLALLVLGAGFLALTVFVVHPNEFRIQSFFSGSSCGGRTVTDAAAAAVASPHGDTTTEKEDDARADDVRVLIGIQTLPSKRARRHLLRDVYSLQAREHPPVAGSVDVRFVFCNVTSPDDAVLVAVEALRYGDIIVLDCAENMDNGKTYTFFSTVARAFNGSGRRPRYDYVMKADDDTYLRLPALVESLRGAAREDAYYGLQMPCDTENFYPFPPFMSGMGYALSWDLVQWVASSDLARREQNGPEDMWTGRWLNLAGKGKNRYDNAPRMYNYKGASPDSCFRHGFVPDTIAVHMLKDDARWAETLAYFNATSGLYRQPLPAASSP

SEQ ID NO: 15213 - protein, 760 aa, Zea mays
  VARIANT 485..760: note = Derived polymorphism lacks residues 485 to 760
  VARIANT 489..760: note = Derived polymorphism lacks residues 489 to 760
MSDFVRSRYDKQEDFQVLLSKKDPGEQPQHKDYLWMAHWTKASSAAEPRNNDSNPLEDTNNGTTTKDSETLPYEFMKSTVAERLMVGVRHGSASMQHVRQFKSSMRGMPRLSNELGPKNSEQVDESFEKSLKNDAMNLRTRQVVSETYSIHKLSELPLDFQNLGSSDDPSPDWSHFPMFEINQKIDSIVNRKRRSPPLDLNVSASHVMALSSQEYMMHSHQTADENMDTCKPAEGFASRVEDHAGFNSDPPGPKLKGQLLDTMSCSCSKDDNNSADCPIDEQHTSHYFANSKHELPSVSNKKKFKFAGNNHNRIVASASHDLKTKRSAVHKQQSAAEAVFCAPVLDSEFQNEPITISNIDKKDGENFHDMYKCLGKAVSCPLLPYEHRHLNTQRTESAENLKVCTLPDHQTANKLTEKSHGELLTYGPKSKEMYTGSCNQRRSYFFEKLTIPSKSQSTYPKNSASSGKSSDFGVCMYGTNIGSQLFRAQNQSSAKTETLHSDTLIGSKSPAGIASLSAQKDYGCTDEAKSEQLVAPSRRGDSGYGKEDGFHNVNEGHDVWSKATIGSKQSCMPGTGITNLDLILSQMSRMRNQISIGRIQPPIGAEPSDRWLKRLQPDIPDPDIPGSRRPNVGGSPPLRQRNRSFDMALPCNRTDTGTTDCVMEDQSLDKVEKTQEKQESTPIPAKSVNSWIGRWCQGGTPVFHEGPGQGRQATKPGRPSEELEGRFPSIAAMAMMGRAMNKLRPCEHQKMGPLVVWKTD

SEQ ID NO: 15214 - protein, 243 aa, Zea mays
  VARIANT 79..243: note = Derived polymorphism lacks residues 79 to 243
MAGRSLAEPSLRSATDDDVSAVPSTTTSAARGVSAQDEGPASGVLVECRICQEDGDEACMEAPCSCKGSLKYAHRRCIQRWCDEKGDTVCEICLQQFVPNYTASSKLFQRGRNTFFFSAPGYIQARPMQNADHSATSTGYGHDQTPDPTGVLCCRIIAIALMVLLVFRDAVSVFLGDQDAYTVAVVTLLMLRTAAIVIPVYIILVAVTELLHRRRHRQVVHGQASDHAAEERTQPQQHVISIQ

SEQ ID NO: 15215 - protein, 529 aa, Zea mays
  VARIANT 390: note = Ancestral polymorphism is T, Derived polymorphism is A
MAASTAAARRLLLALAVLAACLGSAPHGAVALRSLGVGGAKAADGDAAVDLDASNFTAFLQTSPESFAVVEFFAHWCPACRNYKPHYERVAKLFNGPDAAHPGTVVMARVDCASKFSFSVMSEDDEAAQVNVDLCNKFSVDHYPYLVWGPPTKFNLAQWKPKQENSELELIDDGRTADRLLKWINKKMGSSFNLDDKKYENESMHPKNTSDPEQIVRAIYDVEEATSHALQIILEHKMIKPDTRDSLISFLQILVAHHPSKRCRRGSAELLIDFDDHWHTNLSLSLEDSTTLLKGAGEKVCGNGVPRGYWIFCRGSKKETRGFSCGLWVLLHSLTVRIGDGESQTTFTSICDFIHNFFICEECRTHFYEMCSSVSVPFKSARDLALWLWTAHNKVNERLMKEEKELDNADPSFPKIIWPPKQLCPLCYRSSSRTADGAMQVEWNEDEVFNFLVNYYGKMLVSSYRETSMQSFQVASISDDSSASSAATVPIGAALGIALASCTFGALACFWRTQQKNRKYYHLRSLKKI

SEQ ID NO: 15216 - protein, 196 aa, Zea mays
  VARIANT 150: note = Ancestral polymorphism is S, Derived polymorphism is L
MASSLLRSGHRLFLRRHRLPAAFSTATAEELIDVRKLPTNYDPSTFDPSSPSRPLPSDRVWRLVEDVSSLTLAETAALSSLLLRRLDIPSAPPIAILNSAAGLGGAATAGAAGEKAGAAAAAAAEKTVFELRLEGYDAASKIKVIKEIRSFTDLGLKEAKELVEKAPAVIKGGLSKDEAKAIIERMKAVGAKVVMD

SEQ ID NO: 15217 - protein, 185 aa, Zea mays
  VARIANT 82..185: note = Derived polymorphism lacks residues 82 to 185
  VARIANT 109..185: note = Derived polymorphism lacks residues 109 to 185
  VARIANT 118..185: note = Derived polymorphism lacks residues 118 to 185
MVDKLGNYLKNQIYIRGSIRKARPPPVHYSKPSRTDRNRNYRGNYSRIMHKVVRMVEVLEGRNDYTDRSGYNGPPDFRSQSQYQGHVNPAGQGQGYNNPQERSNFSQGQAGEHLLLLQHLGLMANHQHLDLMVNLIHLVTMGRVPGVNPSYGGDGRQGAGPAYGGDNWQRGSGQYPSPGEGQGNW

SEQ ID NO: 15218 - protein, 67 aa, Zea mays
  VARIANT 29..67: note = Derived polymorphism lacks residues 29 to 67
  VARIANT 35: note = Ancestral polymorphism is D, Derived polymorphism is N
  VARIANT 49: note = Ancestral polymorphism is R, Derived polymorphism is C
  VARIANT 51: note = Ancestral polymorphism is A, Derived polymorphism is T
MRSYSPAALLDKLQTSMAKLDKESEELHQKFLEKDIDLPTFVQKYKKLRTAYHKQALLHLAGQTSLR

SEQ ID NO: 15219 - protein, 420 aa, Zea mays
  VARIANT 271..420: note = Derived polymorphism lacks residues 271 to 420
MEAKQRPRHGGERRPPPATDGGEEYDPWTAWLYKPRTISVLLVGACLLIWASGALDPEGTAAHSSVTSIKRGVWAMIAVFLAYCTLQAPSTILIRPHPAVWRLVHGLAVVYLVALTFLLFQNRDDARQFMKHLHPDLGVELPERSYGADCRLYVPENPKNKFINIYETLFDEFVVAHILGWWGKAVMIRNQLLLWVLSIGFELMELTFRHMLPNFNECWWDSIILDILICNWFGIWAGMHTVRHFDGKTYEWVGLSRQRSIMGKVKRSLSQFTPAQWDKDQWHPFMGPLRFIQVLFLCVVFMTVELNTFFLKFCLWIPPRNPLVVYRLILWWLIAIPTIREYNSYLQDRKPVKKVGAFCWLSLAICIVELLICMKFGHGLFHDPMPTWLIIFWSSVGTALVIFLLSWSWRSHQRFRRKQL

SEQ ID NO: 15220 - protein, 376 aa, Zea mays
  VARIANT 2: note = Ancestral polymorphism is S, Derived polymorphism is L
  VARIANT 23..376: note = Derived polymorphism lacks residues 23 to 376
  VARIANT 76: note = Ancestral polymorphism is V, Derived polymorphism is E
  VARIANT 87: note = Ancestral polymorphism is F, Derived polymorphism is S
  VARIANT 93: note = Ancestral polymorphism is F, Derived polymorphism is L
  VARIANT 147..376: note = Derived polymorphism lacks residues 147 to 376
MSKKVGRAKKAAGGGELSRFLESHLQTISDTFQMMAESAPGALERTEWSEVVKLGDQVSRQATVAGMLWSGDLPDVETLKENIVAYFNILQGFLLVCHGSMVGAGPTLHKSIFGSAKDVVDSSFSLFKHAVSAYESRSSDRNTTIPQVTGTVWEACAALKKVPASNCIAIGRAMTRIGVCLKDVLREMNELPIGGSGDSTAEKSSNGVVDTTSCSDRDERSDLDLDDDDDDEFTEEEVAVAKLVINVVSDSLVVVKEAIRFITGLLRSSGNKDKDGANEDRVEPMEKLLSHCKEIADQVNDLGASVYPPQDSSEMELAIKRLYNGINGMRKEIGNLGGAPESTFAALEGFENCLGSLRARLADDVVNEMEGLNISH

SEQ ID NO: 15221 - protein, 78 aa, Zea mays
  VARIANT 53: note = Ancestral polymorphism is A, Derived polymorphism is T
  VARIANT 62..78: note = Derived polymorphism lacks residues 62 to 78
MAASHRTAGPGPSDGSSAGARKKLQLTNEQSTLLEDTFRAHNILSNAQKQELARQVDLSARQVEVWFQNTHVQITCFA

SEQ ID NO: 15222 - protein, 237 aa, Zea mays
  VARIANT 170: note = Ancestral polymorphism is L, Derived polymorphism is I
  VARIANT 112: note = Ancestral polymorphism is T, Derived polymorphism is M
  VARIANT 19..237: note = Derived polymorphism lacks residues 19 to 237
  VARIANT 10: note = Ancestral polymorphism is A, Derived polymorphism is G
MAATEHVLQAPPPSRRALQAAPGRCHSLAVYQQPLSLPSQQTGHRPRELGRLGVRFRPPAFRDLHEEVEQKPFRHAVQASRDRAREQRDEVVVLVWHAKNASDAAVTVTVTTACPCRRGHRRASRTALDRLLVGGAVGVRVLRRGQERLEIQGRQLVVAAAPEPSDLVCLSSCCTAEESVLVVLTRRCPQIRPAPRPGGGEIQATNFDRGKIPLSLGTHAEVGWMAPMNGTNEGEPT

SEQ ID NO: 15223 - protein, 501 aa, Zea mays
  VARIANT 119: note = Ancestral polymorphism is S, Derived polymorphism is T
MWKQLLSKLPRKSPACGDSGQCSNGTGIQRTSSCGSIPPGRPASAIRRMSSAVFPSSVVAGIEPLVSFKDVPNSEKQNLFVSKLSLCCVVFDFSDPNKSSVEKDIKRQALLDLIEFVESTNARFSEAAIAACSRMCAINLFRAFPPSCRSGSSGGGEGDEEEPMFDPAWCHLQLVYELLLKFIGSSSLDAKVGKKHFDHSFIVKLLNLLDSEDPRERDCLKTILHRVYGKFMVHRPFIRKAVSNIFYQFVFETDRHNGIAELLEVFGSVISGFALPLKEEHKIFLWRVLIPLHKPKSVGVYLQQLTYCVTQFLEKDPKLASSVIIGLLRYWPITNCQKEVMFLSEIEEILESTSQAEFQKCMVPLFRRIAHCITSSHFQVAERALFVWNNDHIISLIAQNRQVIMPLVIPALEQNIQNHWNQAVLNLTVNVKKMLSEMDDDLFSSCLAKYKDEEEKRVSLEAKRRLTWEKLESAAAFQPVTGHTAVLVGHRPSANLIATMI

SEQ ID NO: 15224 - protein, 86 aa, Zea mays
  VARIANT 9..86: note = Derived polymorphism lacks residues 9 to 86
  VARIANT 24..86: note = Derived polymorphism lacks residues 24 to 86
MGALTLAPQLSSAPKGKIAGKKVQVDEREKELAVVKINPVDVEIIASELELDKKIAERALCEHKGDVVAAKIKNENTILDGTDITL

SEQ ID NO: 15225 - protein, 159 aa, Zea mays
  VARIANT 82: note = Ancestral polymorphism is C, Derived polymorphism is W
  VARIANT 101: note = Ancestral polymorphism is R, Derived polymorphism is T
MGNSLLLPCVCHCCDGVVNEVGAGAKIRKRIRKQRRPADSSSGRSVVVRAARPRHVVPVVDAPEDGDGDSGWEREREAWPECRVEAPAAAGHGEDGGVLVRIVMKRKDIAQLVARLERQRGAGVEAEVGSSIELDGGGVTMSPCRGAWSPRLSIIPENY

SEQ ID NO: 15226 - protein, 271 aa, Zea mays
  VARIANT 1: note = Ancestral polymorphism is V, Derived polymorphism is M
  VARIANT 52..271: note = Derived polymorphism lacks residues 52 to 271
  VARIANT 53: note = Ancestral polymorphism is E, Derived polymorphism is K
  VARIANT 71: note = Ancestral polymorphism is S, Derived polymorphism is F
MLADAKAKANATIISEESAVEVEVEDVVLTKQAEEGTDDLISEFRDLPSRLQETLIPDLARLSQHSKAYLSAANAGITDGVRPVLGGLWATMATSAASVAVLLLLPLFMLTALVRCMGPYLPLLHHALLLVQAYLTIYFAMLALTVAATGLAPLRFDHVASLLPTPGRRLRNHSASWPTSRSRWWTSSPSSRAPPPPRTMATGHRQGPRARADGGRGVHYYATVFHRAAAGAAPRANWLHNRVRLRACREDEKGLPLGHRPRRRGVEEELS

SEQ ID NO: 15227 - protein, 670 aa, Zea mays
  VARIANT 68: note = Ancestral polymorphism is S, Derived polymorphism is L
MDNLITLVNKLQRACTALGDHGEESALPTLWDSLPAIAVVGGQVPFFPSRARFFALVLIGSGAVAPASWVWISRVAGGTARSSGKSSVLESVVGKDFLPRGSGIVTRRPLVLQLHRIDGDREYAEFMHLPRKRFTDFAAVRKEIADETDRETGRSKQISTVPIHLSIFSPHGKMQTLEGYIVTVALSHLNCPLPIVNLTLIDLPGLTKVAVDGQPESIVHDIENMVRSYIEKPNCIILAVSPANQDLATSDAIKISREVDPKGERTFGVLTKIDLMDKGTDAVDILEGRSYRLQTPWVGVVNRSQQDINKNVDMIAARRREREYFASTPEYKHMASRMGSEYLGKMLSKHLEQVIKSRIPGIQSLITKTIAELETELNRLGKPIANDAGGKLYTIMEICRMFDGIYKEHLDGVRPGGEKVYHVFDNQFPVAIKRLQFDKQLSMENVRKLITEADGYQPHLIAPEQGYRRLIESCLISIRGPAEAAVDAVHAILKDLVRKAINETHELKQFPTLRVEVGNAAFESLDRMRDESKKNTLKLVDMECSYLTVDFFRKLPQDVEKGGNPSHSIFDRYNDSYLRRIGQTVLSYVNMVCSTLRNSIPKSIVYCQVREAKRSLLDHFFTELGAREMKQLSKLLDEDPAVMERRTNLAKRLELYRSAQSEIDAVAWSK

SEQ ID NO: 15228 - protein, 556 aa, Zea mays
  VARIANT 404: note = Ancestral polymorphism is A, Derived polymorphism is P
MNPAATADPSSSSTSAATLRKRMISIDTARRGADGASPETAPRPDRAGSDKAPQEREEEGSMAASAPAAAAARESDLEAVGEPMSPAGRLFRETHFNCYIVAVIGLGAAVDVAAARAGLEVTLVRHPRFSSVQVNDGDARKNAKPRWVRTTVNLDDHIIVPCLEPAATSTKPDQAVEDYLSWLSTAPMDHSRPLWEFHVLDFPTSEATATVAIRMHHSLGDGVSLLSLLIACTRSAADPARLPELPPAPRRASPVYARQRPPLSAGLVAFALWLWSYVLLAWHTLVDVACFVATAWFLRDQRTPFMAASEGVEFRRKRFVHRTLSLDDVKFVKNAMKCTVNDVLIGVTNAGLSRYYFRKTSDTNNERKKSQNIRVRSALLVNIRRTPGLHALAEMMDSIKNNRAKWGNLIGYMILPFHIAMHDDPLEYIRQGKRTAQRKKASLEAVFTYWSGNLIVKLFGMKAAAALCYGMFTNTTMSFSSMVGPAEKVEFYGHPIVYIAPSVYGHPHALTIHYQSYTNSIKLVLAVDDAQFPDSHQLLDDFAESLRLIRQAASTR

SEQ ID NO: 15229 - protein, 263 aa, Zea mays
  VARIANT 170: note = Ancestral polymorphism is E, Derived polymorphism is V
MMGSGMGAYGGALRPVESAAGETMLLWGLGQPESHRNNALVRQAAHAFELDACGRRLSLLQSPSSMATPGVTGAVVWDSGVVLAKFLEHSVDSQRLLLRGARAVDLGSGCGLVGCVAALLGAHVVLTDLADRLKLLRKNVALNVDDPHVPGSARVTELVWGDNPHHELLEEPLPDFVLGSDVIYNEEAVDDLLITLNQLSGKHTTILLAGELRNDAVLECFLEAAMEDFLIACIEQDQWHPEFRSNRVALFILVKKPEKPSAE

SEQ ID NO: 15230 - protein, 101 aa, Zea mays
  VARIANT 68: note = Ancestral polymorphism is V, Derived polymorphism is I
  VARIANT 67: note = Ancestral polymorphism is T, Derived polymorphism is S
  VARIANT 66: note = Ancestral polymorphism is V, Derived polymorphism is A
  VARIANT 57: note = Ancestral polymorphism is C, Derived polymorphism is R
  VARIANT 40: note = Ancestral polymorphism is K, Derived polymorphism is N
  VARIANT 35: note = Ancestral polymorphism is R, Derived polymorphism is Q
  VARIANT 29: note = Ancestral polymorphism is P, Derived polymorphism is Q
  VARIANT 27: note = Ancestral polymorphism is G, Derived polymorphism is D
  VARIANT 22..101: note = Derived polymorphism lacks residues 22 to 101
  VARIANT 20: note = Ancestral polymorphism is R, Derived polymorphism is G
  VARIANT 18: note = Ancestral polymorphism is S, Derived polymorphism is Y
  VARIANT 8..101: note = Derived polymorphism lacks residues 8 to 101
MDTGLDSEFLVSTSIDGYARIWKIDEGAPLVNLTQSSDEKIECCRFSRDGMKPFLFCTVAKGYKVVTVVWNISDWERIGYKRLLGKPISTLSVSLDGKYMA

SEQ ID NO: 15231 - protein, 152 aa, Zea mays
  VARIANT 100: note = Ancestral polymorphism is L, Derived polymorphism is I
  VARIANT 89: note = Ancestral polymorphism is P, Derived polymorphism is H
  VARIANT 71: note = Ancestral polymorphism is D, Derived polymorphism is Y
  VARIANT 40: note = Ancestral polymorphism is A, Derived polymorphism is V
  VARIANT 17: note = Ancestral polymorphism is H, Derived polymorphism is N
  VARIANT 13: note = Ancestral polymorphism is L, Derived polymorphism is M
MVRSSQMLVAQALIFHHLGRSWRKPPEKTLIRTNREQADAVDGKENFPMELYVVSGDEDGERGGAPVVYIDVAAQLCSDFNKGPSTWSPILLLVPLVLGLDKINPRYIPLLKETFMFPQSLGILGVKPGTSTYIAGVQDDRALYLDPHEVQM

SEQ ID NO: 15232 - protein, 352 aa, Zea mays
  VARIANT 125..352: note = Derived polymorphism lacks residues 125 to 352
MMRYPRPSSDGLPLPNGIGSGGGGASKKPATPPPRSSKDDVAPAVATDSSRLAAFLASTSLESKARARAPPAQPAPTSAATAAVAATKSPVRDHDHGHGHSHGASSDHSDPASPSSTGTGELLLQWGQNKRMRCRRDSASPSPQHRQAGGKIQRRSSSPAVDKLMPPPSAAPYTRGSNLRSVSSLPPRSGSGSGSGSSAGALPHPLRSAEDRAAGKFSAARAEKQRAVSPGSVMGMGVPVPDPRRQQQQQHAGAAAAATSKPASKVEMPRIYTTLSRKEKEEDFMAMKGTKLPQRPKRRPKIVEKTVSAICPGMWLTDVTRGRYEVREKKCPKKQQKNRGLKGMEGMDSDSD

SEQ ID NO: 15233 - protein, 204 aa, Zea mays
  VARIANT 37..204: note = Derived polymorphism lacks residues 37 to 204
  VARIANT 46..204: note = Derived polymorphism lacks residues 46 to 204
  VARIANT 57: note = Ancestral polymorphism is E, Derived polymorphism is Q
MESPHLRPTPSCAVSATSSLLPDLVYGSPPTRRAAVLKSVGSIYAQDHIIAERKRRQKINQRFIELSTVIPGLKKELQEKLKALEDGGSGSNDRSIESWVLVKKPCSVVPGDDAGSPSWDSSGASPATNQLPEIEARFLNKNVMVRIHCEDGKGVVVRVLAELEELPLSIVHANVMSFQACTLIITIMAKASFFSFSVTIPAVI

SEQ ID NO: 15234 - protein, 124 aa, Zea mays; identical to SEQ ID NO: 3626
  VARIANT 7: note = Ancestral polymorphism is S, Derived polymorphism is R
  VARIANT 10: note = Ancestral polymorphism is E, Derived polymorphism is K
  VARIANT 18: note = Ancestral polymorphism is D, Derived polymorphism is G
  VARIANT 25: note = Ancestral polymorphism is L, Derived polymorphism is F
  VARIANT 51: note = Ancestral polymorphism is G, Derived polymorphism is D

SEQ ID NO: 15235 - protein, 441 aa, Zea mays
  VARIANT 61: note = Ancestral polymorphism is G, Derived polymorphism is R
MALRGNLPVLLLLFAAAATASGKSARLDLFPAAPGASVTARARGDRRRHAYISAQLPSRRGGRQRVAAEVASSSAVSLPMSSGAYAGTGQYFVKVLVGTPAQEFTLVADTGSELTWVKCAGGASPPGLVFRPEASKSWAPVPCSSDTCKLDVPFSLANCSSSASPCSYDYRYKEGSAGALGVVGTDSATIALPGGKVAQLQDVVLGCSSTHDGQSFKSVDGVLSLGNAKISFASRAAARFGGSFSYCLVDHLAPRNATGYLAFGPGQVPRTPATQTKLFLDPAMPFYGVKVDAVHVAGQALDIPAEVWDPKSGGVILDSGTTLTVLATPAYKAVVAALTKLLAGVPKVDFPPFEHCYNWTAPRPGAPEIPKLAVQFTGCARLEPPAKSYVIDVKPGVKCIGLQEGEWPGVSVIGNIMQQEHLWEFDLKNMEVRFMPSTCTR

SEQ ID NO: 15236 - protein, 561 aa, Zea mays
  VARIANT 36..561: note = Derived polymorphism lacks residues 36 to 561
  VARIANT 137: note = Ancestral polymorphism is A, Derived polymorphism is S
  VARIANT 145: note = Ancestral polymorphism is L, Derived polymorphism is V
  VARIANT 169: note = Ancestral polymorphism is N, Derived polymorphism is K
  VARIANT 193: note = Ancestral polymorphism is P, Derived polymorphism is L
  VARIANT 222: note = Ancestral polymorphism is R, Derived polymorphism is W
  VARIANT 224: note = Ancestral polymorphism is R, Derived polymorphism is H
  VARIANT 242: note = Ancestral polymorphism is A, Derived polymorphism is V
  VARIANT 244: note = Ancestral polymorphism is R, Derived polymorphism is H
  VARIANT 250: note = Ancestral polymorphism is S, Derived polymorphism is N
  VARIANT 279: note = Ancestral polymorphism is P, Derived polymorphism is T
  VARIANT 303: note = Ancestral polymorphism is A, Derived polymorphism is G
MEPSPAAGELGAMLRAAADFASYPGNAPFPTSRRIWADEVNCSPQVVFAGAGLCLSPIVRTGLHSDDTVRQFLERCPLPKLLGALQSEEDVPGMVETVTECLDKIFSSRYGASLLPNYGAFIQAGLLTDSKQIRKLACKAVLHLLDKAEDGGAAVETVVQHNLYPLLIKCLIEGDEEISAIILDTVKRLAQIPKGAEVIFPPDGQGSVQLGKVAAQSSSLARIRILSLIAKLFTVSSYTATAIRDSNLLSIFEEEIKDRRDMLKTLSALEVLYELVEHPHSNIFLLKTNLLQLIIDIINDSSADSVIRSRAALVSGRLLSSADAFTAIDKSCVTNLLIAIGRILKMEESKNTDEIESALETLGLIGTTSQGAHFLLTSSNVARHVVESSFDRQGRGRQLAALHAFGNICGVGRQEDQMKLDSEAEENLKRLVYTTAANSPKLTPSALLLSVLQQDPDVRIAGYRVITGLVIREWCLREVCLNSEIIRFVTDPTMETTKLGMETRYGCCVAINKALSSSHLLHEASLSELVGKLNDAVKRGPYLSDRKRVEARPVVDTAERF

SEQ ID NO: 15237 - protein, 1440 aa, Zea mays
  VARIANT 798..1440: note = Derived polymorphism lacks residues 798 to 1440
MAAGWDCDRNTWPAGILTFWTSICILFLVLEITTLPKQPHLTKKVGFEIMDLFTIDSDSESYTGTSDSEDQECEFTYSDHAQNILSSLDESIGKIDNFLTFERGFLHGDIVCPVSDPSGQLGRVVGVAMFVDLETSSGDIIKDVNSKKLSRVRSFVSGDCVVMGPWIGRVIRAFDLVTLLFSDGAKCEILLRDSDVLKPIPPVLFEDAPYFYYPGQRVRIVDPSVSKSATWLCGSWRPSRDDGIVSHVDVGLVHVNWITSVTNVWGDKSSSPPNIQDPKKLTLLSCFPYANWQLGDWCALMTDNNGCLWMDSGKSCILSEDQKCDSHAHMYFESYGSDCSQTFVVAKTKSTVDVLWQNGTVSLGLEPQALLPVSTLGDHDFWPGQFVLEKLTVEDAARCPRTAIVSDVDALERTVNVKWIGPAHSDIVSYGSDPAVETVSVYELVEHPDFSFCTGEVVIRSAMNIDKSEADPTNGSLASKESLVTSSGFLSCTGNVLGYKDNGIEVQWANGVISKVQHFEIIGLDKLLDNSSVESMNEEHTIGDSLDEAEQEELNHEIALESTEDCTGSLCKATAFLFPKTAFDFLTNVAASLFGIHGSPSPSSVLVDPRYEIVKMAEMQPCAEETPKEEQIVKFVAQIDKPILSSEDAISKRFDVVTDCLDHHFVKENGHESVMQLLKLSLSLFSSNNHWCERGIMCNDDYFLFLGYKRLVEEDGIHVRVYEERMDLLRACIVGAPGTPYHDNLFFFDIFFPPDYPHEPPSVHYHSGGLRLNPNLYESGKVCLSLLKTWTGTGNEVWNAESSTVLQLLLSLQALVLNEKPYFNEAGYDKFVGKADGEKNSITYNENAFLLSCKSMMYVLRKPPKHFETLVKEHFTCRAPHILDACEAYLGGDLVGHAHDKAYVAEDGNKNCSTGFKIMLGKLLPKLVTAFCEAGITSDRNCLCAGSSSFDDPDVVEVSPATAAAAGWASGHHKRKRSQVVPQEVIEIDDDDPDGVILIGDKAQVEKNKQTAVCPMDCSKHAKSGWVQDIPGPSTYASKYTSSWVDLKVFQDEAVYNYSDGYPFDGFEEDYAYDEDEFEDDGYDTPLIESEFQFSLSAKFDNFNVLHGLEASLPWKHKTAIEIANKTKPSKAVDDKIEEKYKAFKRFDTVDDHSDHYYSKPESRKVQAVKKPSKDWVKRIQHEWKVLEKDLPETIFVRAYEDRMDLLRAVIMGPAGTPYHDGLFFFDIYFPPQYPNIPPMVNYRAGGLRLNPNLYACGKVCLSLLNTWTGSGCEKWNPANSTMLQVLVSIQALVLNAKPYFNEPGYAMHANTAHGEKKSLTYNEDTFLHSCRTMLYSLRNPPKNFEDFVAGHFRKYGRNILVACRAYLEGAQVGCLSGDGVQDVDEGDKSCSVRFKQSLKRLHEELLAEFTAKGADCGKFLSEKARSGASTSAADTTLRL

SEQ ID NO: 15238 - protein, 250 aa, Zea mays
  VARIANT 157: note = Ancestral polymorphism is T, Derived polymorphism is M
MASRRCLLRFLSIRLVPQRSQPLAPISTATRTLTSLSEALGSPAPRALASPRLYYPSRCHFATRSSGDEDDGEDEEEHYDDEGSDGEWGDDEEVVAAKKPSGKTEEEKVAEAAEIGYKVLGPLGADDKPFKPYEPVFAVVQIGSHQFKVSNGDSIFTERLKFCDVNDKLVLNRVLMLGSQAQTVIGRPILPDAAVHAVVEEHALDAKVIIFKKKRRKNYRRTKGHRQELTKLRITNIEGIDKPEAAAVAT

SEQ ID NO: 15239 - protein, 482 aa, Zea mays
  VARIANT 133..482: note = Derived polymorphism lacks residues 133 to 482
  VARIANT 123: note = Ancestral polymorphism is A, Derived polymorphism is T
  VARIANT 111..482: note = Derived polymorphism lacks residues 111 to 482
  VARIANT 96: note = Ancestral polymorphism is L, Derived polymorphism is P
  VARIANT 21: note = Ancestral polymorphism is R, Derived polymorphism is W
MRAPSRVVGLGRVTGDENLVRTINRIPQRLGVQFSASHGGSLTGTTVYFHERASTLSVNTITTTEKQTANGTSEGAIFRKGLSSIYERSCVRSSYLLHGFMLVRRLAFSVRDLWNLFSSEVHAKLTRILHRFWTTLQGSCEDIGWLQRTRASLRSVDGTGRFKEILHEIRNGVHCLPDTLIYLFIPGLFSNHSPLYFTNTKRFFSKMGLACHIAKIHSEASVEKNAWELKQYIEELYWGSGKQVLLLGHSKGGVDAAAALSLYWSELKGKVAGLALVQSPYGGTPVASDILREGQIADKETRRIMELIVCKLIKGDIRALEDLTYAKRKDFISQHKLPIDELPIISFHTEASTAPTALASLTRVAQAELLPWLPLPRFFLSASEFVESMLASLKVPVVAPVSAAMAVTALHLRLRYGERSDGLVTRRDAEVPGSVVVRPERRLDHAWMVYSTLKMGSAEADASEMCEALLAMLVEIGRKKFC

SEQ ID NO: 15240 - protein, 244 aa, Zea mays
  VARIANT 58: note = Ancestral polymorphism is E, Derived polymorphism is K
  VARIANT 36: note = Ancestral polymorphism is G, Derived polymorphism is S
  VARIANT 33: note = Ancestral polymorphism is R, Derived polymorphism is C
  VARIANT 22: note = Ancestral polymorphism is A, Derived polymorphism is V
  VARIANT 15: note = Ancestral polymorphism is G, Derived polymorphism is D
  VARIANT 5: note = Ancestral polymorphism is A, Derived polymorphism is V
MSGGVRRVLEAWRLGVVKYGEALQLQERLVADRKAGRVGDLVLSLQHPPTYTLGKRREKAERNLLAPEADLRALGAEIHRTERGGDATFHGPRQAVLYPLLSLRTLGLGARRYVEGLESAMIQVAALHGVSARPGDPGETGVWVGDRKIGAIGVRISSGFTWHGLAFNIDPDLEYFEHIVPCGIAGKGVTSLRREVGDGAELPADGVIHDQLVGCLATTLGFTDVEFKDDSERGDLIGVTASQY

SEQ ID NO: 15241 - protein, 346 aa, Zea mays
  VARIANT 273: note = Ancestral polymorphism is R, Derived polymorphism is L
  VARIANT 172: note = Ancestral polymorphism is A, Derived polymorphism is P
  VARIANT 163: note = Ancestral polymorphism is M, Derived polymorphism is L
MSRAAQTGGGGAGGAARLKASPRALFSCGIFSTCTHPALSPTATPNNNVVPGSGGGGGSGAPCAEASSASPAVLEAAAAAAAATAPPPQRQHQHQRAAQRNAGPSSSSSSSSSSASQSFTQWRLPVHHPPQASGTGGDALLSAEEKFATGEVVAALRAVEREMEAAARPVPAGVVAGVVAAVREPATARLAAKVLLVVLLEEGNRETAVEAGAASAAVEAVAASGPAGATAERALAALELLCTAPGGAPAVRREALAAPVLARAVEAMAGRGRECAIGVLAAVYGGAAGGEDGASSSPPPPAVVKAVVAAMQGECSARGRRKGAQLLRALQEGGRLGLAWDGIGDQ

SEQ ID NO: 15242 - protein, 289 aa, Zea mays
  VARIANT 195: note = Ancestral polymorphism is T, Derived polymorphism is A
MPPPLLQARDYMGAGATPLSCSSSGEGTGPHLALRLGLPGSDSPGRDAGPEPDHAHVDAALTLGPAPAPAPAPPRVGAKRGFADSRDRCAKRDATAADDAAGGVTGEEKRVGAAAAGAPPAAKAQVVGWPPVRSYRKNTLAMSATKTNGEDEGRSEAGCCYVKVSMDGAPYLRKVDLKTFSSYEDLSLALEKMFTCFITGQSGSCKTSRRERLTDGSRADALQDQEYVLTYEDKDADWMLVGDLPWDLFTTICGKLRIMRGSDAAGMAPRSPEQIVGTRIRNVARHAES

SEQ ID NO: 15243 - protein, 441 aa, Zea mays
  VARIANT 209: note = Ancestral polymorphism is I, Derived polymorphism is T
MLSSRRNSGIILREGSVRDWSEFNDPSPSPKPLYSQSYVAVRGFLLSSKLKSVYAAMTSQRHSRSQERSKSKGLSCRRVAVRLLFFFMLGIFIGFMPLFSVDVYKKIVSENKMLPFHEGVIETEMVGTKVKESETIVVEKEIELIDEPHIQESPPVPALLDDDVDFSESSPVLPAIRESDIPVKKLLIIVTITSVRPQQAYYLNRLAHTLKAVQAPLLWLVVEWPEQSYETAEILRSSGVMYRHLMCRKNTTSVRKIAVCQRNNAIYHVKRHHLDGIMHFADEERSYSADVFEEMQKIRRFGSWPVTIHIGTKYRAVLEGPICKANRVMRWHTVQTVQKKSSTRRFPIGFSAFAFNSTLLWDPQRWNRPPMDSVIIHTGGRGGLQESRFIEKLVKSERQIEGLPDNCNRVMVWNFNLEPPQLNYPAGWALYKNLEADMPVI

SEQ ID NO: 15244 - protein, 142 aa, Zea mays
  VARIANT 38: note = Ancestral polymorphism is R, Derived polymorphism is H
MASLAAVSVKPVAIKGLAGSSISGRKLAVARPSARSIRRPRAAAVVAKYGDKSVYFDLDDIGNTTGQWDLYGSDAPSPYNPLQSKFFETFAAPFTKRGLLLKFLLLGGGSLLAYVSASASPDLLPIKKGPQEPPQPGPRGKI

SEQ ID NO: 15245 - protein, 232 aa, Zea mays
  VARIANT 196: note = Ancestral polymorphism is A, Derived polymorphism is V
  VARIANT 180: note = Ancestral polymorphism is A, Derived polymorphism is T
  VARIANT 127: note = Ancestral polymorphism is A, Derived polymorphism is E
  VARIANT 123: note = Ancestral polymorphism is P, Derived polymorphism is L
  VARIANT 110: note = Ancestral polymorphism is L, Derived polymorphism is H
  VARIANT 107: note = Ancestral polymorphism is P, Derived polymorphism is Q
  VARIANT 91: note = Ancestral polymorphism is V, Derived polymorphism is A
  VARIANT 87: note = Ancestral polymorphism is P, Derived polymorphism is L
  VARIANT 48: note = Ancestral polymorphism is A, Derived polymorphism is T
MELELEAAARRFHLWFRGLRSLRRDLASARWSDDPTAQLPAQVGRFVAHLESYCAARAGLDPVWTLSAPWATPAERGAAYWLAGWRPTTLVHLLYTESGRRLEAQLPDLLLGVRSGNLGDLTPAQLAQVDDLQRRTVAEEDALAREMALVQEGHGVVVLPAAPDGSGGLDVAGLVRRARAVLDRADALRLRTVKRAVEILEPAQAAELLVAAADLEIGFREFGLKHGSGRMT

SEQ ID NO: 15246 - protein, 473 aa, Zea mays
  VARIANT 418..473: note = Derived polymorphism lacks residues 418 to 473
MDASSSLSLLALVTMLSLLHSATTDAAAGLPAARTSHRRLLLLHQQDTNLAALPPPARVHVVPVDVHVPSHGTGSFPAASPGPHGGKNGPSEAAPATPATAAAYLSRSMRWLYMVAVPAVALLALAGLACWLLCRKSAVATIGPWKTGLSGQLQKAFVTGVPKLQRSELERACEDFSNIVVSYPHYTVYKGTLSTGVEIAVVSTMITSSKEWTEHSESCFRRKVDALSRINHKNFVNLLGFCEEEEPFTRMMVLEYAPNGTLHESLHAEDFERIAWRGRMRIVMGLAYCVQHMHELSPPVAHPDMQSSSVLLSEDGAAKIADMSVWHEVISQGKTTTNGDEQASSAGLLAGNVYSFGALLLEIISGKLPTPYPAHERSLQMTSALVERVTNDDRSVASLLDPTLGGDHREDELAVIGEVIRACMQSDPRRRPSMREVAARLREAVGISPVAATPRLSPLWWAELEVLSAAEAS

SEQ ID NO: 15247 - protein, 433 aa, Zea mays
  VARIANT 268: note = Ancestral polymorphism is T, Derived polymorphism is R
  VARIANT 281: note = Ancestral polymorphism is V, Derived polymorphism is A
  VARIANT 282: note = Ancestral polymorphism is C, Derived polymorphism is Y
MASITVTRKSQSFVVPSSTPTPTTETLELSPIDRVPGLRHTVRSLHVFRRKDAAASAAHYDAAAAGRPAEVIRAALSRALVDYRPFAGRFVGSLYAGEASVECTDDGAWFVDAVTDCSLEDVNGLDYPLMVSEEELLPAPEEGVDPTSIPIMMQVTEFACGGFVVGLVAVHTLADGLGAAQFINAISEFARGVVKPTIAPIWARELIPNPPKMPPGPPPSFECFGFKHFVMDVAVNNIAHVKSEYFQTNGHYCSTFDVAIAKVWQARTRAIKYEPNFKVHVCFFANTRHLLTHVLPKVGGFYGNCFYPVTVTATAEVVASSRLLDVIRMIRDGKARLPLEFSRWSTGNVKVDPYQLTFKHNVLFVSDWTRLGFFEVDYGWGVPNHILPFTYADYMAVAVLGAPPSMKKGTRIMTQCVEEEHLVDFKAEMKAFF

SEQ ID NO: 15248 - protein, 163 aa, Zea mays
  VARIANT 65: note = Ancestral polymorphism is P, Derived polymorphism is T
  VARIANT 95: note = Ancestral polymorphism is D, Derived polymorphism is E
  VARIANT 103: note = Ancestral polymorphism is I, Derived polymorphism is T
MANSNLPRRIIKETQRLLSEPAPGISASPSEENMRYFNVMILGPAQSPYEGGVFKLELFLPEEYPMAAPKVRFLTKIYHPNIDKLGRICLDILKDKWSPALQIRTVLLSIQALLSAPNPDDPLSDNIAKHWKSNEAEAFETDVLTWQSLAAKEWTRLYASGAL

SEQ ID NO: 15249 - protein, 373 aa, Zea mays
  VARIANT 144: note = Ancestral polymorphism is R, Derived polymorphism is S
MVAITAPSSIEQIPLMRCPRANAVQQAGAAVPCVDLSAPGAGAAVADACRSVGFFRATNHGVPARVADALEARAMAFFALPAQEKLDMSGAARPLGYGSKSIGANGDVGWLEYLLLSVSANTVKISSLPPSLRAALEEYTAALREVCGRVLELIAEGLGVERSLLRAMVVGREGSDEVVRVNHYPPCPLLPPVDCGVTGFGEHTDPQIISVLWSNRTAGLQIKLRDGRWVPVPPTPESLFVNVGDSLQVLTNGRLRSVKHRVVAPAPAPDGARSRLSVIYFGGPAPSQRIAPLPQVMRDGEQSLYREFTWAEYKRAMYKTRLADHRLGPFELRASTNGGNRPGEPAAGSADPAHCSGGSACGMPQPQQVARVH

SEQ ID NO: 15250 - protein, 93 aa, Zea mays
  VARIANT 8: note = Ancestral polymorphism is A, Derived polymorphism is D
MAKASTTAGVVVTLLCVVLLLSSAVTTTEAGRHLGTGRRDDGAAVMAGAGRPLGNKVIREEEMEASTTDGATGAAGVGESKRRSPGGPDPQHH

SEQ ID NO: 15251 - protein, 524 aa, Zea mays
  VARIANT 119..524: note = Derived polymorphism lacks residues 119 to 524
MASPARPAAASVSAAFGLSPDPKRCSFDQALRHKDFQENRLLMSFVNYHDQEKVSKEIVTDAIESCMKKQADNLLNSLEVISGRLSQLELYCYKLERSIGELRSDVMDYHNEANLNFQCLDKQLKEVQKSVQVVQERQELAETQKEMTKLQIVHEDSAQKSERSAPSVFINRENEIALVPLHQVNSVQSPAVQFQSCSGLILQQLVPVQDQQRSNQTAMYCMRGQSHLEHRQAQMFQAAAQPVQTHTTRKTQAHTVLEVPQVTTRQTPEFYAQPQHQWQHQTGQQLQSQVRQPQPQVVQQQQQYNNIQQGPAQMVQPQTSSPHAHSTPQITLVYPPYGAHQSACGNAEARTGSIVVPPSHSTISSSQRKHHEAAPIYVQSNTVSVPLTEQHQQLHSLGNGSFVPQPSKVSPCGVASYTVQGNAQAYSPAYGSPSSNPATIVAVLNQQAHCSAPMVLHHLGPSQSVQNHPIGIADKVARMGYPKDQVVDGLALRMVDAGQPAECNTLHDRLSSVTHAVAPQAWSG

SEQ ID NO: 15252 - protein, 229 aa, Zea mays
  VARIANT 133: note = Ancestral polymorphism is G, Derived polymorphism is R
  VARIANT 96: note = Ancestral polymorphism is F, Derived polymorphism is Y
MDSEHWISRLAAAKRFYAAQLGHSDRAGMDELEMDEEVRPEFPCPYCYEDHDVGSLCAHLEEEHPFEPQAAACPVCSEMVTKDMVNHITTQHGYLFKNRRRLRRFIIPGSQALSLLSRDLREAHLQVLLGGGGQRSSDNSSSSSATNISADPLLSSFGLGFPTSDAEQASKSTVSIPDDATTVKEAPAQARKLSIDSSLTSEERELKRKQARVRATFVQDLLLSTLFGD

SEQ ID NO: 15253 - protein, 96 aa, Zea mays
  VARIANT 52: note = Ancestral polymorphism is E, Derived polymorphism is K
  VARIANT 3..96: note = Derived polymorphism lacks residues 3 to 96
MASSDGQTEAAAPSVPKNPAMASCRKKKTDDATFLEDLKDHIDEFIHASMDEHKTCFKKTIQKMFGMSKAVAERSAAEAKEAGVESALPLQTSVSQ

SEQ ID NO: 15254 - protein, 1832 aa, Zea mays
  VARIANT 745..1832: note = Derived polymorphism lacks residues 745 to 1832
  VARIANT 719..1832: note = Derived polymorphism lacks residues 719 to 1832
  VARIANT 632..1832: note = Derived polymorphism lacks residues 632 to 1832
MESSDDGGSGPLLLAAGMGSPGHSLVPAAVGGASSAPGASGSGGKPPVKRVMKTPYQLEVLERTYAEDSYPNETKRAELSVQLNLTDRQLQMWFCHRRLKDRKPLAKRQLRDDEVSAPVIAPSPVLPPPSPPSEMIAGTVGTYREQLPPYSRRGPDRPSVPRLSVPEIGRRYYEPPQVMLPHMAPVHLTQAEHRVINSVEALIGEPLRDDGPVLGIEFDPLPPGAFGTPIVPEPPRQPFRSYDTKMFFGHDSKPMKALAFLPATDPLLPNRGKQKSLVGSSHLGSQAVHEYQFLPEQPSDTYERASQSHFYNAPAEASNLRVAPLSTGSRFLHGLEQAPSYTFHSQSSGSSHSAHRGRSPIALALTDHEGALSNINVSPTPIHGKFSIPQVAGFESSLASSERMGYHDDDTYRVDRKRKHNEEAKTVREVEAHEKRIRKELEKQDLLNRKREEQMQRETERLGRERRKEEERLMRERQREEEKFQREQRRAHKRMEKFMQKQSIRAEKLRQKEELRREKEAAKQKAANERATARRIARESMELMEDERLELLELASRSKGLLSMVSLDSDTLQQLDSFRGMLGKFPPETVRLKVPFSIKPWADSEDIIGNLLMVWKFFVTFGDVLGLPSFTLDEFVQALHDYDSRLLGELHIALLKSIIKDIEDVARTPSVALGVNQSSSANPGGGHPQIVEGAYAWGINILNWQHHLNFLTWPEILRQFGLCAGFGPQLKKSNAEIVHHRDNNEVHNGVDVISILRNGSAAVKAAALMKERGYTNRRSRHRLTPGTVKFAAFYVLSLEGSRGLTILEVAEKIQKSGLRDLTTSKTPEASVSAALSRDTKLFERTAPSTYCVKTPYRKDPDDSEAVLSAAREKIRVFQNTLSECEEVEKDVDEAERDEDSECDDATDDADGDDVNIEGKDAKSPLVGAQYDTQITVVGDVKKESNSVMNISVPPSIQIKSSASVPLHTLDSKASSSTDPQVGDDDKDTEIDESNQGESWVQGLAEGDYCDLSVDERLNAFVALIGVATEGNSIRAILETLQERLEAASALKKQMWAEAQLDKRRSRDDFTSKVQYDSCVGIKVDTDQKNNAAESTLVPVDNPIRNNNGNSSLTNNDLLVDKQNQLITGDVFQQWNGVSQELSTNPESLSVQQYASSEKTRSQLKSFIGHKAEQLYVYRSLPLGQDRRRNRYWQFSASSSSYDPGSGRVFFESRDGYWRVIDSSEAFEALVSSLDTRGIRESHLHSMLQSIEPTFREAVERKKCVSLEHTTGWTDNGSNESPNCNNEFGSPCSTLSGVASDNLMAYSDTFKIEIGHNEAEKSSISKRASVFLKWMWRECYCHQSTYTMKYGKKRCPELIQSCDHCYQIYLAEEQHCSSCHKSFKPIHNFLEHLSQCEDNQRTNPSWKTQIVGLSVPVGLRLLRLLLATIEASVPAEALLPFWTDLYRKSWGVKLYSASSAEEVLQMLSVLESAIKRDYLSSNFETTTELLNSNTQDATQNSVGGSGSATILPWVPDTTAAVALRLLDLDTSISYKLHSKLVSNKEQEAGDFMKLPLRYPSINKNKQEIEQFIPIGFDQQDGTLLTNSNGRRGRGRGGRGGRGSRGGSRGGSSRGGGGRVPRGIGSSSRIQFRDDNSVPYGRAPRKNVRGGRTRGRGRGRGLRTVRPRQPSEFSATSIPKLNLLGSFSMLSKANHTGNMHSPESLGAEEWVLERREYVKDDDDNLVSRYDESEEENGEPMNEEYDEQISGYPRDNSEFSPIQMMGDVSHDEDAEGDEGEEDGEDYETEDPAGDEDDDVEMDWDDDIRDNDDGNGAANADEDEGGTSSYSSEYSE

SEQ ID NO: 15255 - protein, 319 aa, Zea mays
  VARIANT 131: note = Ancestral polymorphism is P, Derived polymorphism is S
  VARIANT 150: note = Ancestral polymorphism is G, Derived polymorphism is D
  VARIANT 164: note = Ancestral polymorphism is P, Derived polymorphism is S
  VARIANT 169: note = Ancestral polymorphism is G, Derived polymorphism is S
  VARIANT 199..319: note = Derived polymorphism lacks residues 199 to 319
MTWCNGFNDVRAAVESSLSPAAAAVGKTAAASLAVLVKMCPSCGHRAQYEQKSTTIQDLPGLPAGVKFDPTDQELLEHLEGKARPDTRKLHPLVDEFIPTIDGENGICYTHPERLPGVSKDGLVRHFFHRPSRAYTTGTRKRRKVHSGDDGGETRWHKTGKTRPVLSNGRPRGYKKILVLYTNYGKQRKPEKTNWVMHQYHLGSDEEERDGELVVSKVFFQTHPRQCGYTMARESAVVVPAAAAVTGSSNAFIAGHHQSGGGGSVLREANGGADQLYSPGAMMGYDQEGPGNRAPPAPAVAPHFMPNFVVHAARASFGP

SEQ ID NO: 15256 - protein, 1070 aa, Zea mays
  VARIANT 535..1070: note = Derived polymorphism lacks residues 535 to 1070
  VARIANT 71..1070: note = Derived polymorphism lacks residues 71 to 1070
MLQMLGFRGGSPSTGDASPAISGDGGAAARPLRLVYCDDKGKFVMDPEAVAALQLVKGPVGVVSVCGRARQGKSFILNQLLGRSGGFQVASTHRPCTKGLWMWSAPLKRTGLDGTEYSLVLLDTEGIDAYDQTGTYSIQIFSLAVLLSSMFIYNQMGGIDESALDRLSLVTEMTKHIRVRASGGRSTASELGQFSPVFVWLLRDFYLDLAEDNRKITPRDYLELALRPVQGGGRDISAKNAIRDSIRALFPDRECFTLVRPVNNEKDLQRLDQLPIALETYLHFKQFDGIYKLCLSLHDLSNFRPEFRSGLDAFTKFVLDRTRPKQLGATTMTGPILAGLTQSFLDAINNGAVPTISSSWQSVEEAECQRAFDSAVGTYNSSFDHKKHIEEDSLREAHEDAMRKAISAFNVSAVGAGSARSKFEKLLHSSLKKAFEDYKRNAFLEADLQCSNKVQNMESKVRAACNRSNAKLDDIVRLLDDLLTEYESMAYGPGKWKRLATFLQQCLAGPVLDLFRRQLEHIDAERNALRLKCNSSDDKLALLRKQLEASESHRAEYVRRYEEVLNDKQKISKDYSIRITELQAKSSKLEQRCLSLSSSLETAKRESNDWKSKYDHGILQQKADESKLKSQIASLESRVSISEGRLSATREQADSAQEEASEWKRKYEVAVSEAKTALQRAAVAQERTNKKVQEREDALRVELANQLSEKEEEIARLHAKRSQMEIHATSLISRLEATEAKSKSHESDSLALREEIRLLTDNLESIRSEALSREKEVGILEQEKNHLEEKYLSQCKKFDETDIRCKEAEREAKRATELADVARVEASAAQKDKGEAQRLAMERFALIERMERQVEALERDKAKLVEEIERLHQSEKDAVSKVALLERNVGEREKEIDEMLKQNNQQRSSTVQVLESLLATEREARAEANKRAEELSLMLQATQGKLDMLQQETTLDSKLKTSARRLRGDATESVHDMDIDGDNGRRRKRSKSTTSPFKNNHTEDGGSVFIGEDTYNGSQQGTESEDYTKFTVLKLKQELTKHGFGAQLLQLKNPNKKDIVALYEKHVIGK

SEQ ID NO: 15257 - protein, 768 aa, Zea mays
  VARIANT 236..768: note = Derived polymorphism lacks residues 236 to 768
  VARIANT 279: note = Ancestral polymorphism is G, Derived polymorphism is R
  VARIANT 283: note = Ancestral polymorphism is L, Derived polymorphism is Q
MAGIDLNDTVEEDEEEAEPGNACSQQSRTSSAATFPPPPPNQPRPSAAVCLELWHACAGPVAPLPRKGSVVVYLPQGHIEHLGDAAAAGGGAPPPVALPPHVFCRVVDVTLHVRAPVPTQCVRVWIARAGVRLPLTLSLLRSLQADASTDEVYAQLALVAENEDVARRLRGRSEDGSAEDGDEGETVKQRFSRMPHMFCKTLTASDTSTHGGFSVPRRAAEDCFPPLDYSQQRPSQELVAKDLHGTEWRFRHIYRGQPRRHLLTTGWSAFVNKKKLVSGDAVLFLRGDNGELRLGVRRAAQLKNGSAFPALYNQCLNLGSLPNVAHAVATKSVFHIYYNPRLSQSEFIIPFSKFIKSFSQPFSAGSRFKVKYESDDASERRCTGIIAGIGDADPMWRGSKWKCLMVRWDDDVDFRQPNRISPWEIELTSSVSGSHMSAPNAKRLKPCLPHVNPDYLVPNGSGRPDFAESAQFHKVLQGQELLGYRTHDNAAVATSQPCEATNMQYIDERSCSNDASNIIPGVPRIGVRTPLGSPRFSYRCSGFGESPRFQKVLQGQEVFHPYRGTLVDASLSNSGFHQQDGSHVPTQASKWHAQLHGCAFRGQQAPAVPSQSSSPPSVLMFQRGDPKMSPFEFGHFHVNKKEDRRAMFVHAGGIGGTEQTTMLQAHHVSGGTGNRDVTVEKSHPAVAAASDNREVSKNSCKIFGISLTEKVPAMKEKGCGDINTNYPSPFLSLKQQVPKSLGNSCATVHEQRPVVARVIDVSTVDMMI

SEQ ID NO: 15258 - protein, 81 aa, Zea mays
  VARIANT 3..81: note = Derived polymorphism lacks residues 3 to 81
MVQKFGGGGYSDCPRLIFEATAIFTSSATDVYNLQTIQPLRLVRSRKIDTYIYYQDPANKNGGKWVIRFKKAVFRSILCGF

SEQ ID NO: 15259 - protein, 273 aa, Zea mays
  VARIANT 164: note = Ancestral polymorphism is G, Derived polymorphism is V
MAGSASRLAILLVLLAASPLLGATQKAAPGPASSSGSGAGAADAAPPTDVNKALKDEQFSEFRQLLHDTRVDTQINAQLTDSYNGLTIMAPTNAAFDKMKAGVLNGLSPQEQIQMVLYCVLPRFYSLSMLGTLSGKVNTQGSGHDGPYRYDIKRSGNNVNVSTGVNWMLLGSPVSKDFPLAIYPVDKVPLPYELFGPKPPTPAPAPAPAPGPAKAKTKKKKKSAAIAEPPTADDDDTGSTSDDQKAAAAPPRASRAAAALSVLGAAVLVGGLF

SEQ ID NO: 15260 - protein, 144 aa, Zea mays
  VARIANT 27: note = Ancestral polymorphism is E, Derived polymorphism is K
  VARIANT 55: note = Ancestral polymorphism is R, Derived polymorphism is H
  VARIANT 60: note = Ancestral polymorphism is C, Derived polymorphism is S
MYQAIPYSAGQPWPRPAPTIGPDVAEEEGLLAASQQQASTPAEAAARVEEEEVRRAVAECPVLVVGVRGCCLSHVVKRLLQGLGVNPAVHEVAGAEADLAAAGVAALPAVFVGGRLLGGLDRLMAAHISGDLVPILKDAGALWL

SEQ ID NO: 15261 - protein, 224 aa, Zea mays
  VARIANT 97: note = Ancestral polymorphism is L, Derived polymorphism is V
  VARIANT 101: note = Ancestral polymorphism is R, Derived polymorphism is H
  VARIANT 102: note = Ancestral polymorphism is R, Derived polymorphism is C
  VARIANT 114: note = Ancestral polymorphism is A, Derived polymorphism is T
  VARIANT 124: note = Ancestral polymorphism is C, Derived polymorphism is Y
  VARIANT 130: note = Ancestral polymorphism is T, Derived polymorphism is K
  VARIANT 134: note = Ancestral polymorphism is P, Derived polymorphism is L
  VARIANT 138: note = Ancestral polymorphism is D, Derived polymorphism is N
  VARIANT 149..224: note = Derived polymorphism lacks residues 149 to 224
  VARIANT 152: note = Ancestral polymorphism is V, Derived polymorphism is M
  VARIANT 157: note = Ancestral polymorphism is A, Derived polymorphism is V
  VARIANT 168: note = Ancestral polymorphism is G, Derived polymorphism is D
MRFTASPVVELPVSGAVLTFEQDNDSFEVGTSVWPSSLVLVKFVERCIRDPALPFADVLRFPGTRAVELGSGCGPAGLGLSRLGLTDLVLTDIAAVLPALRRNLRRNRVHLARAPRLAQLHWNCPAHLATLATPRRFDLVVAADVVYVQESVPHLIAAMDALADAERGVVLLGYQIRSPEAHQVFWETVPAVFPVIEKVAREHLDPEYAYEESDVFILRRSPRQ

SEQ ID NO: 15262 - protein, 307 aa, Zea mays
  VARIANT 156..307: note = Derived polymorphism lacks residues 156 to 307
MAEHLASIFGTEKDRVNCPFYFKIGACRHGDRCSRLHNRPTISPTLVLANMYQRPDMITPGVDAQGQPIDPEKMQEHFEDFYEDIYEELGKFGEIENLNVCDNLADHMIGNVYVQFREEEQAAAAYNALQGRFYSGRPIIVEYSPVTDFREATCRQFEENSCNRGGYCNFMHVKQIGRDLRRKLYGRSASRRYHGRSRSRSPPPQRRGHRDRDDYHHRDRDDYRGGGGGGRGRGSRYDRYDDGAGRGGRHGRYDDGAGRGGRHDRYDDGGRRRHGSPSRRARSPVRESSEERRAKIEQWNREREGKQ

SEQ ID NO: 15263 - protein, 290 aa, Zea mays
  VARIANT 211: note = Ancestral polymorphism is R, Derived polymorphism is L
MAIGAPDDSRQRRPADHAANILENVWATIMTGSATPASSSTAASSSEVGEERPPDEAILERLPSLGRWISMGAEEWDELLLGGAARASDAAASGRELPAASPANQEADRLGHHRASSSKAASAAAACKSYRGVRRRPWGKFAAEIRDTRRRGARVWLGTFATADDAALAYDKAALRMRGPRACLNFPLDVVQRALADGGGRAETTPRVLRRKRRRANHDDAAGGDDTRSDGSVAAATARDPTTTMVSFACAKKDDQVMTPLMAQERSVSDPGAVIEFEDIGGEYWDYLFT

SEQ ID NO: 15264 - protein, 466 aa, Zea mays
  VARIANT 260..466: note = Derived polymorphism lacks residues 260 to 466
  VARIANT 370: note = Ancestral polymorphism is R, Derived polymorphism is L
MEGRREPEADGGKAGGLPPSEPPHLQGQPPQEYGYGTFQGPRHPPVGFPQPAPPPGLGSGGYHNQQQPYAPAETYYAQGYQAVPGYGPVAEGRPVRMRRLPCCGLGLGWCLFITGFFLAAIPWFIGAFVLICVRVHDQREKPGYVACTIAAVVAAVAILLGVTKGTHVCALGMGSTLIHAPYLLIYSPGTTLTWSSSVRPTTSECCFVYLERRLVRNLTFAFDWLDGDAEPAVATDPIVFDAFGRTASTPAEATGGKRRWTYYKLLGVYLRKQQRRPAPPLRPRELAEMVAHRFHQYQVVGRALPTPTDEHPKIYRMKLWATNEVRAKSKFWYFLRKLKKVKKSNGQMLAINEIFERNPTTIKNYGIWLRYQSRTGYHNMYKEYRDTTLNGAVEQMYNEMASRHRVRSPCIQIIKTATVHFKLCKRDNTKQFHNSAIKFPLVYRKVRPPTRKLRTTFKSSRPNLFM

SEQ ID NO: 15265 - protein, 409 aa, Zea mays
  VARIANT 48: note = Ancestral polymorphism is S, Derived polymorphism is L
  VARIANT 29: note = Ancestral polymorphism is L, Derived polymorphism is F
  VARIANT 21: note = Ancestral polymorphism is D, Derived polymorphism is N
  VARIANT 15: note = Ancestral polymorphism is L, Derived polymorphism is R
MMEAKQAAPDRLSSLPAELQDEILIRLDLRDAVRTSALSRTWRDLWKSLSVISLSFPFGTHPSVVDSVLLRYIGPRVSLFRICVDDACADRIDDWLIALSRYRVESIDMCGTLRSLGNFNLYSSIFSLGDLVSLLLKNCRIPPLPVGFPGFPALQKLVLAYVIFPSNGFKQLEAIIRRSPLLHTLHMFDVFIPGEYPDSVIEAPNLRVLSIYSPYDYRWRFGELSCLEYANIHVFHCPQHEHDFGVFLARFAHVQKFGLFSPAVDVKMPYTLPFTFYNLKKLQLCVDFNEIHSILSMFTMLRSCHNLQNLKIESRHDSYESFEADWEFLNALWTDGMCANLQIVRMIDIISLPNETSFMKLILSKATLLHTLYVGAHPYDFDDHIIDMLKCERASAQARVQFEGSEQQW

SEQ ID NO: 15266 - protein, 409 aa, Zea mays
  VARIANT 316..409: note = Derived polymorphism lacks residues 316 to 409
  VARIANT 314..409: note = Derived polymorphism lacks residues 314 to 409
  VARIANT 270: note = Ancestral polymorphism is P, Derived polymorphism is S
  VARIANT 252: note = Ancestral polymorphism is F, Derived polymorphism is C
  VARIANT 178: note = Ancestral polymorphism is R, Derived polymorphism is C
  VARIANT 156..409: note = Derived polymorphism lacks residues 156 to 409
  VARIANT 102: note = Ancestral polymorphism is R, Derived polymorphism is H
  VARIANT 100: note = Ancestral polymorphism is L, Derived polymorphism is P
  VARIANT 84: note = Ancestral polymorphism is C, Derived polymorphism is Y
  VARIANT 70: note = Ancestral polymorphism is L, Derived polymorphism is F
  VARIANT 58: note = Ancestral polymorphism is P, Derived polymorphism is L
  VARIANT 56: note = Ancestral polymorphism is S, Derived polymorphism is C
  VARIANT 43..409: note = Derived polymorphism lacks residues 43 to 409
  VARIANT 37: note = Ancestral polymorphism is S, Derived polymorphism is F
  VARIANT 19: note = Ancestral polymorphism is E, Derived polymorphism is K
MEAKQAAAAVDRLSSLPAELQDEILVRLDLRDAVRTSALSRTWRDLWKSLSVLSLSFPVGTQPSVVDSILLPYIGPRVSLFDFCVNEASVGRIDDWLVALSRCRVESIHISNRLGSCDYFNLHSSIFSLGDLVSLRLEGCNIPPLPVGFAGFPALQELDLAFVNFPSNEDKQLEAIIRRSPLLHTLFMCNVCIPDGYPDSVIEAPNLRVLSFVSEYDYGCRFGELPCLEYADIDALFCPQHEHDYGFFLARFAHVQRLTIFCPAADVNMPYTLPFTFYNLKNLELCLNFGEMDSILFMFTLLRSCRNLQGIEIESQDIDQSFEADWEFLNALWTHDMCSDLQTVHMMCISWLPNEISFMKLMLSKATVLRTLDVDRHPADFDDPIIDMLTCKRASAQARVLFGGLEQQW

SEQ ID NO: 15267 - protein, 388 aa, Zea mays
  VARIANT 266: note = Ancestral polymorphism is S, Derived polymorphism is F
  VARIANT 233..388: note = Derived polymorphism lacks residues 233 to 388
  VARIANT 224: note = Ancestral polymorphism is H, Derived polymorphism is Y
  VARIANT 221..388: note = Derived polymorphism lacks residues 221 to 388
MAAPGSLRLLQAPSFAAAKCQPVGGRASARRAPRPLFAVRASAADAANRDAVLKAFRENRALKIISGLQNFDRSSVASVVTAADKVFNQNLSESVEIKLLLVYSTLFMIMLQVHYLSATITNLLQGGATHVDIACDKDLVKLAMDLTNLPICVSSVDPSAFHSAVQAGAKMVEIGNYDSFYEMGIEFSSEQILKLTRETRKMLPDITLSVTVPHTLSLPDQVYHHPQSLTLRQHSGHIATIYILAQDNFSVTTIRNTCSSPADFVSHLQMRLAELLEEEGADIIQTEGGKCSSPTKPGVLGLIEKATPTLAAAYSISRAVSIPVMCSSGLSSVTAPMAVTAGAAGVGVGSAINKLNDVVAMIAEVRSIAQAMELAPRIVSETLRTISY

SEQ ID NO: 15268 - protein, 665 aa, Zea mays
  VARIANT 172..665: note = Derived polymorphism lacks residues 172 to 665
  VARIANT 258: note = Ancestral polymorphism is P, Derived polymorphism is L
MAPPTSASARPLSLPLTVPLSCHRSHLLPAPNARLLTRRRVALAPTRPGATLLSSLSDAREEEEDESGFYEEDEQQEFEDEEEQGYDGENEELVEVGYVSGAHGVRGDVLVTPRTDFPELRLATPGTRWLRARAAGKQQVREFELVRGRAHTGKKSWIVSFDGVNNLDEARQIVGSAVLVKARDRPEIEDDEFYSLDLVGMRVIVKDTGKLVGTVGQVFNFGGGDLLQVIMGSSEGTAVDPDSENQDSISSREHVWIPFAEDIVPDVDMASREMRITPPKGLLELNSRSDKRSKKERRAMEWKDRKRFQRRVIAGKKVLSEMDQVHVLEGLVSGDKVQKASLAEQIGSIDFQLFRHAVHCVSKQIESSSMNLLANSSLSRKKVIKIPYKTLINLGDKAEHAFSTEFKNGLDILLKSKAAIVLVRNGSDSDTEFLSLLNSFSELMKVVENKVSPPLIVIAPAGHVESVRKCLVENDYFGFDTQKNHSQVWVLEEVELPVVSICSEGNRKKVLMKSPWEIIKKPTGSGAIFSLLLSNKILETLNEMGVQYTQICSSSNKPIIGHPLLFGAVASRGADVGIQVSKTGETLDDFDVILSIDQLNKMCRDVTQIRFSARSEQNVHVEHVDGQWVAVQPEVANSHRLHAEVTSVLDSCAPDKLCVMEIVEQ

SEQ ID NO: 15269 - protein, 569 aa, Zea mays
  VARIANT 418..569: note = Derived polymorphism lacks residues 418 to 569
  VARIANT 1: note = Ancestral polymorphism is M, Derived polymorphism is L
MEFFSEYGDANRYKIQEIIGKGSYGVVCSAIDQHTGEKVAIKKIQNIFEHLSDAARILREIKLLRLLRHPDIVEIKHVMLPPSRRDYRDIYVVFELMDTDLHQVIKANDDLTKEHHQFFLYQMLRALKYIHTANVYHRDLKPKNILANANCKLKICDFGLARVAFNDSHTTVFWTDYVATRWYRAPELCGSFFSKYSPAIDMWSIGCIFAEILTGKPLFPGKNVVHQLDLMTDLLGTPSTDTISQIRNEKARRYLSSMRRKQPIPFSEKFPNADHSALKLLQRLLAFDPKDRPTAEEALADPYFKGIAKVEREPSCQPISKMEFEFEQKFTKEDVKELIFQEILQYHPQLLKDYKNGSEKTSFLYPSAVDRFRRQFASLEENGERNATLDRKHVSLPRTTTVHSTPIPAKEGPAATSQIAQRIPAARPGRVVGPVLPFESASVTDQHIARRVARNPAVPPATNTSSVYCYHLKSDSSDRQEHHLEREKDRRQYRPGQHFMDAKVAPEMGRDIRPSQYYVSRGLPKADLTDRATLHRSALHGVAPFNGIAAAAGGYSQAGVLHYGVTSLY

SEQ ID NO: 15270 - protein, 226 aa, Zea mays
  VARIANT 33: note = Ancestral polymorphism is G, Derived polymorphism is A
  VARIANT 32: note = Ancestral polymorphism is R, Derived polymorphism is H
MSISMRLAIPAPAVTAAAPTRLRVRAAAAGNRGSLSVARAAVRAETGALRGCASLPKKPLGAAQPCRSRGAAAVCHSSAHLSARTIQWISAGASAVLLVAKGTAIHKSFLVPFFALQAPCSIISWIKGDYGQWTAFLALLVRLFFFIPGELELPLSTMLLVSVAPYQFMDLRGTQGGAVLSLAIAAYLAFQHFTRVGGPGKAFEQGSIVATLAIICIMIVPLMLLF

SEQ ID NO: 15271 - protein, 266 aa, Zea mays
  VARIANT 38: note = Ancestral polymorphism is A, Derived polymorphism is G
  VARIANT 112: note = Ancestral polymorphism is G, Derived polymorphism is D
MASSTMALSSTAFAGKAVNVPSSSAFGEARVTMRKTAAKAKPAAASGSPWYGPDRVLYLGPLSGEPPSYLTGEFPGDYGWDTAGLSADPETFAKNRELEVIHSRWAMLGALGCVFPELLARNGVKFGEAVWFKAGSQIFSEGGLDYLGNPSLIHAQSILAIWACQVVLMGAVEGYRIAGGPLGEVVDPLYPGGSFDPLGLADDPEAFAELKVKELKNGRLAMFSMFGFFVQAIVTGKGPLENLADHIADPVNNNAWAYATNFVPGK

SEQ ID NO: 15272 - protein, 902 aa, Zea mays
  VARIANT 567..902: note = Derived polymorphism lacks residues 567 to 902
MSGGGAGGKGAAAPVPPGSRKLVQGLKEIVNRPEAEIYAALRECGMDPDETVSRLLSQDTFQEVKSKRDKKKEIKEVPETRYRSANSSTNRGLRSGVDRGGRNNSMHSSSTDNMTSRPPGSGTASGTSSQRQTVASPSANKHMVADGPAASLQSSSGFQHGGWSGTPGQLSMADIVKMGRPQGKTSIKPVVTADRGYAGQYPSLPSTNQNLKQSGSMVPPTELDKGLQPAQDSVQVKDHDHSTADSKLPYGTDWSPQDGPTFANQSSLPEPSGDPSLYEASFQSSTLVTDVVNSHENSHLDENDTFAMGPAPASERHLDPSDGISEYNDVILNNSSSYQPHNYSYTEQQEVEDSSADVSAAAANFQSLSLHNDELAAKKSAEDNPAVIIPDHLQVTNTECVKLSFGSFGSGAFSGLLPQNTTDSNVEFPAREESAPVDQIDARNQDYYESGAVTSPADENLEAMLGANMENVDAPSVSQANELRQDVLDPSELQYDVPSVPSHAYSNTDTLQPSTIEEPQGNNQAHTLSHLSNLMVFRLFFLYFFPHMLVIRYVVFISCFVKFSNVYINKRESSFLSSHSYHLFSQQANPLSTSSLLGSNQNHATLHGLEFDLPPYLGAKYNAGSTTNPRPPISMQQEALKAGVFSNAQSTQSLPSTSIQTGLPLPQQLAHHPYSQPTLPITHFPNMVGYPYLPQNYATYLSSGTFQQAYPSSGPFHQSAAAALLASGMKYSTPEYKNNLSATGLQQQHQPQPQPLSSVISGYGGFGSSSNIQGNFTLSQSTGSASALGFDEALSRQYKNTSQYMALQQGDNSGMWVHGSGSRAASTLPPNHFYGYQGQSQLGGFARAQQPQPSQFGGHGYPTVYQSQGQEHPQNLAEGSLNGFQVTPSQPSHPSWQHQHTY

SEQ ID NO: 15273 - protein, 510 aa, Zea mays
  VARIANT 22: note = Ancestral polymorphism is P, Derived polymorphism is L
  VARIANT 24..510: note = Derived polymorphism lacks residues 24 to 510
  VARIANT 25: note = Ancestral polymorphism is S, Derived polymorphism is L
  VARIANT 105: note = Ancestral polymorphism is G, Derived polymorphism is S
  VARIANT 110..510: note = Derived polymorphism lacks residues 110 to 510
  VARIANT 131: note = Ancestral polymorphism is G, Derived polymorphism is E
MGTRGVALLLLAAVLLLQALLLASSEGLVRVALKKLPVDQNGRVAARLSAEERQRLLLRGANALGSGGDDDSDVIALKNYMNAQYFGEIGVGSPQQKFTVIFDTGSSNLWVPSSKCYFSIACYFHSRYKSGQSSTYKKNGKPAAIRYGTGSIAGFFSEDSVTLGDLVVKDQEFIEATKEPGLTFMVAKFDGILGLGFQEISVGNATPVWYNMVKQGLISDPVFSFWFNRHADEGEGGEIVFGGMDSSHYKGDHTFVPVTRKGYWQFNMGDVLVDGKSTGFCAGGCAAIADSGTSLLAGPTAIITEINEKIGAAGVVSQECKTVVSQYGQQILDLLLAETQPAKICSQVGLCTFDGTHGVSAGIRSVVDDEAGKSNGGLKSDPMCNACEMAVVWMQNQLAQNKTQELILNYINQLCERLPSPMGESAVDCGSLASMPDIAFTIGGKKFKLKPEQYILKVGEGQAAQCISGFTAMDIPPPRGPLWILGDVFMGVYHTVFDYGKLRVGFAESA

SEQ ID NO: 15274 - protein, 347 aa, Zea mays
  VARIANT 187..347: note = Derived polymorphism lacks residues 187 to 347
  VARIANT 303..347: note = Derived polymorphism lacks residues 303 to 347
  VARIANT 334: note = Ancestral polymorphism is R, Derived polymorphism is S
MEGPWRNSSLIERRMEGHRTTLVERRRLRMDARNATPAPTPMEGPLPNPTDGRWRMEVARTFHPRGAHLHPPRPPADLQNSMARGWGGGARMERTLSYPSGPRSSLTFHRRRRIDLGNLWPPTRTTDSTTAPYIRALNRLLGLKRRPVVTTSLRRGLQDASYPSEQLLISGEKETQDQVYFIKQIESLGNACGTIALLHAVGNASSKVNLVENSCLDLFFKSTATMDDPHERAVCLEKDDTTARAHLLAANYGATKGMSPDVATAPKSKGCLMIGEYNKVAKKASVRTQSPKMEMIDSLFKPREAKDDGLIRECLIDFYTSSGKRKPDQVIIFRFAIILDATVLVLL

SEQ ID NO: 15275 - protein, 85 aa, Zea mays
  VARIANT 9: note = Ancestral polymorphism is P, Derived polymorphism is L
  VARIANT 35: note = Ancestral polymorphism is P, Derived polymorphism is S
MSASRSSSPNSISQWSQKENKMFEEALAYYGEGTSNRWDKVSRAMGGIKSAEEVRCHYEDLDYDVKMIESGHVPYPKYKTHGFWT

SEQ ID NO: 15276 - protein, 291 aa, Zea mays
  VARIANT 217: note = Ancestral polymorphism is I, Derived polymorphism is V
  VARIANT 169: note = Ancestral polymorphism is A, Derived polymorphism is V
  VARIANT 1: note = Ancestral polymorphism is M, Derived polymorphism is I
MGRPARSRSPATEPPPAVTGLRSSKISFRSRKIVKTASAKPLATTALALAPQAPPPPVLPALSSPGELAAALRHLQAADPLLTAVIANTEAPTFTATPSLPAFHSLARSILYQQLATSAADAIYARFLALLPSASAAAAAVAADAVTPAAVLALAAADLRTIGVSGRKASYLHDLAARFAAGELSDSAVAAMDEAALLAELTKVRGVGEWTVHMFMIFSLHRPDILPCGDLGVRKGVQELYKLKSLPNPEEMAALCERWRPYRSVGAWYMWRLMESKGAASKKKNKGNASS

SEQ ID NO: 15277 - protein, 509 aa, Zea mays
  VARIANT 360..509: note = Derived polymorphism lacks residues 360 to 509
  VARIANT 367..509: note = Derived polymorphism lacks residues 367 to 509
  VARIANT 397..509: note = Derived polymorphism lacks residues 397 to 509
MGGGSNRGGAGAGEESGSDHDGVLRRPLLNTGSWYRMSSRQSSFAPGTSSMAVLRESHVSAFLCTLIVALGPIQFGFTSGFSSPTQDAMVRDLNLSISEFSAFGSLSNVGGMVGAIASGQMAEYIGRKGSLMIAAIPNIIGWLAISFAKDASFLYMGRLLEGFGVGIISYTVPVYIAEISPQNMRGALGSVNQLSVTFGIFLAYLLGMFIPWRLLAVIGALPCTMLIPGLFFIPESPRWLAKMNLTEDCETSLQVLRGFETDITTEVNDIKAKHLNYSSGRAVASSSKRTTISFQELNQKKYRTPLLLGIGLLVLQNLSGINGVLFYASSIFKAAGVTNSDLATCSLGAIQVLATGVTTWLLDRAGRRILLIISTSGMTLCLLAVSVVFFLKDNISQDSNSYYILTMISLVGIVSFVITFSFGMGAIPWLMMSEILPVSIKSLGGSIATLANWLTSFAITMTTNLMLTWSVGGTFLSYMVVSAFTIVFVVLWVPETKGRTLEEIQFSFR

SEQ ID NO: 15278 - protein, 514 aa, Zea mays
  VARIANT 71: note = Ancestral polymorphism is L, Derived polymorphism is R
  VARIANT 33: note = Ancestral polymorphism is V, Derived polymorphism is D
MNGGAAPPSAAAAATPPHRRLPDFLQSVNLKYVKLGYHYLITHLLTLMLLPLMAVILLEAGRTDPEDLRQLWLHLQYNLVSVLVLSAVLVFGATVYVLTRPRPVYLVDFACYKPPAHLQVRFEEFMRHSKLCGFSDDALEFQRKILERSGLSEETYVPEAMHALPPQPTMANARAEAETVMFGALDSLFRSTGVRPKDVGVLVVNCSLFNPTPSLSAMIVNKYKLRGNVRSFNLGGMGCSAGVIAVDLARDMLQVHRGTYAVVVSTENITQNWYFGNRKSMLIPNCLFRVGGAAVLLSNRGGDRRRAKYVLRHVVRTHKGADDRAFNCVYQEQDGEGKTGVSLSKDLMAIAGGALKTNITTLGPLVLPVSEQLLFFATLVAKKLLVSAKTKPYIPDFKLAFEHFCIHAGGRAVIDELEKNLQLSPAHVEASRMTLHRFGNTSSSSIWYELAYMEAKGRVRRGHRVWQIAFGSGFKCNSAVWHALRNVKPSPDSPWEDCIDRYPVELVDGFPAHQ

SEQ ID NO: 15279 - protein, 240 aa, Zea mays
  VARIANT 166: note = Ancestral polymorphism is R, Derived polymorphism is G
MPDTEGGHHRGDAAVARQLDLVAPPAAPATTSSSRATTTATATATARHDDEEEDGFTFAAVAVPCPVYAVFGRPRWSPQKQRQQEEEEEEEGPAGTGAATARRVPLGRLLLEERWCDDGAPSVSGKQPADAAEAELDGVPAETYCLWSPASPAAGSSRRASPARCRTRGSAGLSVLRWQRQRRVAAGKDKFVFLAGAGEGHGSAARGGGKSTTTTFLPWKQDLVGLVASAITFRPSCQPF

SEQ ID NO: 15280 - protein, 221 aa, Zea mays
  VARIANT 33: note = Ancestral polymorphism is P, Derived polymorphism is L
  VARIANT 135..221: note = Derived polymorphism lacks residues 135 to 221
  VARIANT 140: note = Ancestral polymorphism is E, Derived polymorphism is K
  VARIANT 193: note = Ancestral polymorphism is R, Derived polymorphism is C
MTMDDGGDDFTFAAAQPPPSLVSAGGGGFIGQPLLYPVFGRPRSPPRAAPETATARVPLGRFLLVDRDPSPPPAPADDDDGDLDSVPAEMFCPWSPGWSAAAAAASSQSQARCKKSGSTGSVLRWRPRLAVGRSQSDGKEKFVFLSASSGGSGRRSQKGRGSAVDVEGGAHHAAHHAWRHYANNTSEGGGARRRRSFLPYKQDLVGLFANAAVFRRSYLPF

SEQ ID NO: 15281 - protein, 225 aa, Zea mays
  VARIANT 42: note = Ancestral polymorphism is R, Derived polymorphism is C
MVSYHPSLLRPSVLIAQASGIGRCPTLNAFLSTPVVSAVPLRLRPLRAAAGGAASPLPIGFIGLTLRTKELGTALEAWPAGLYGLGSVLLFTPFLSQFIMQVQFSPREFITGLAIFCCMPTTLSSGVILTQLVGGNSALALAMTVASNLLGIIIVPLSLARYIGTGAGVSLPTEKLFRSLVTRLLIPLIIGKVAREASKGIADFVDGNQQGFSVGNAVLLSLVYL

SEQ ID NO: 15282 - protein, 153 aa, Zea mays
  VARIANT 16: note = Ancestral polymorphism is I, Derived polymorphism is T
  VARIANT 22: note = Ancestral polymorphism is S, Derived polymorphism is P
  VARIANT 80: note = Ancestral polymorphism is E, Derived polymorphism is G
  VARIANT 95: note = Ancestral polymorphism is P, Derived polymorphism is R
  VARIANT 113: note = Ancestral polymorphism is V, Derived polymorphism is A
MSMALSSSLRGLVALTPLALPSARPSGAAAAAPAPRARGRTGRGAGVVALAAALPSDAQWLERLPEKKKPLYTHSLPCIEAWLRSLGFTQSREDPAVWVAEKPLWHARLSLDVTDLHIRYLKSGPGNLDKDMERRFSYALSREDIENAILGGP

SEQ ID NO: 15283 - protein, 377 aa, Zea mays
  VARIANT 10..377: note = Derived polymorphism lacks residues 10 to 377
MAQDEAVATQKTGNTTSPSKDYPTPSPYPDWSTMQAYYGPGVLPPTYFTPAIAPGHPPPYMWGPQPIMPPPFGTPYAAVYPHGGAYPHPLVPMMSTPMSVEPAKSTNSKEKNSNKKLKEIDRTAVSAGSGNSKRTVSSIEDYSAEGSSDVNDQNVNETSRKRSSDGGPGAETTTGGNTECVLAPNHTLGNATILPQHCFSAPVIKPSATNVANSRAIGTALSPPPGVMVPVHNAVPSDLSVKDERELKREKRKQSNRESARRSRLRKQAETEELATQVESLAAENTSLRSEIGQLTESSEKLRLENSALMVKLKDTAEPSPIKASASPSSPRASAENFLSMIDSANAPSVSRHTEHGGPRLRQLLDSSPATDVAAVS

SEQ ID NO: 15284 - protein, 325 aa, Zea mays
  VARIANT 37: note = Ancestral polymorphism is S, Derived polymorphism is F
  VARIANT 48: note = Ancestral polymorphism is V, Derived polymorphism is A
  VARIANT 51: note = Ancestral polymorphism is R, Derived polymorphism is W
  VARIANT 55: note = Ancestral polymorphism is G, Derived polymorphism is D
  VARIANT 63: note = Ancestral polymorphism is S, Derived polymorphism is N
  VARIANT 72: note = Ancestral polymorphism is A, Derived polymorphism is E
  VARIANT 95: note = Ancestral polymorphism is G, Derived polymorphism is R
  VARIANT 127: note = Ancestral polymorphism is S, Derived polymorphism is Y
  VARIANT 128: note = Ancestral polymorphism is V, Derived polymorphism is I
  VARIANT 129: note = Ancestral polymorphism is D, Derived polymorphism is E
  VARIANT 143: note = Ancestral polymorphism is P, Derived polymorphism is S
MSMGRFVNSMDPTSGLEVIRDWNGVAQVVLRSPKGASARVSLCGGQVVSWRNDRGEELLFTSSKSVVFDVQATFKPPNAMRGGIQMCFPQFGYSGTLERHGFARNRIWSLDDEQPPLNHNDNGSKVSVDLILKPSEDDLKCWPHCFEFRLRASLSKDGDLSLISRIRNVNGKPFSFSFAYHTYLSVSDISEVRIEGLETLDYLDNLSHKERFTEQGDAITFESEVDRVYVSSPNVVAVIDHEKKHSFVIRKEGLPDVVVWNPWEKKSKTMVDLGDEEYKQMLCVDAAAVERAISLRPGEEWTGKLELSAVLSTNCSDHLDHPVSI

SEQ ID NO: 15285 - protein, 159 aa, Zea mays
  VARIANT 141: note = Ancestral polymorphism is C, Derived polymorphism is Y
MLAQPAHLIPPTCSLKRPRAQSYPLHRRPTNGGASGRAEAERRHSAGQMEGLTSSEIAGFVVGALLLGATIAAPKVDGFIASSQRRSLGMCKRCGDLRIVACSQCKGTGSARSGGMLSLGMLDDLYESLGAEAKTENLVPCTKCRSRGRLLCPECSKVA

SEQ ID NO: 15286 - protein, 173 aa, Zea mays
  VARIANT 22: note = Ancestral polymorphism is A, Derived polymorphism is T
MERRRSRHALLLLSAVMASLVTGSTAGIYHIVGAGKGWRMPPNRTYYEDWARTRQISIGDKLMFLYRSGVHNIVEVPTRELFDACSMRNITSRYQSGPTIIELTDPGERFYFCGVGEHCEAGQKLAINVLLVPPPPPDTDDDCSSAARLPGHAGAGLAAACMCLVSALLTMAV

SEQ ID NO: 15287 - protein, 1122 aa, Zea mays
  VARIANT 714..1122: note = Derived polymorphism lacks residues 714 to 1122
  VARIANT 711..1122: note = Derived polymorphism lacks residues 711 to 1122
  VARIANT 650..1122: note = Derived polymorphism lacks residues 650 to 1122
  VARIANT 622..1122: note = Derived polymorphism lacks residues 622 to 1122
  VARIANT 619..1122: note = Derived polymorphism lacks residues 619 to 1122
  VARIANT 608..1122: note = Derived polymorphism lacks residues 608 to 1122
  VARIANT 52..1122: note = Derived polymorphism lacks residues 52 to 1122
MEGTAAEVGGAGADAAGDVQIKGAKENAQPTAAQQQQPSGSEALEMPATPLQRDIDWSEHFSFFTSLGGFGGSSDGARGLTSVGLSNSESRPDSVAQRGLDHDTEERVEELTLKNCINTGIQPEVSAGGSTSSRDRPTRIKGLWGNFTRIARRTSDLASRENTALSSGDIANLRAGDASSMEKLATSLASNIISRNNNASGNEAPMSHVGYVNNEFMMCSQQILLSPWSNQDNALKVSSFSNRILNRMRSKTVAPSSRVLRSPLQIKSKGKGVVCQGAREEIQVQANARPRDPLDKIPTIPSSIHDCMARVDHMLFSTGGNVTKSHSEGSSLRELIKPGWQTMTKFEKMHLFKQIIDLVDKCHAQGFTLQHLRPSYFMVLSSNQVKYIGSYTTQDLPTSIKQEVAREDLVNRKRTFGQRIDHQESNDHGNLTLKYQKVDEQGSVAIRQPANTFWTDKICDNQNEDVNRGVLRQENFSHTAREGFKLVEPYGSNISCAQHVSSSATQQPAFELRNLEESWYKSPEELSQFKGTFPSNIYSLGVLLFELFCCSETWEVHCAAMSNLRQRILPPNFLSESPKEAGFCLWLLHPDPCSRPKAKSPAYCFFREILGCDLINGGQDLSLLDEAPVSIGEDDTESSLLLNFLSQLKEEKAMQSAKLSAELGSLQTDITEVDKRHSARMRLSLDDTDVLPSSSALSGASVSALQGALLSGLLPASYKSSIYEERVMRNLVQLENAYYSMRSSLDTCETNVIKRPDNEALRARENFHQLHSDSDAKDEKTDRLGCFFDGLCKYARHNRFEVRGILKNADILNSPNVICSLSFDRDEEYFAAAGVSKKIKIFEFDALLNDRVDIHYPLIEMPSKSKLSCVCWNNYIKNYLASTDYDGTVQLWDASSGQGFTQFTEHRKRTWSVSFSDVDPTKLASGSDDCCVKKNCVDTIRNVANVCCVQFSPYSSRMLAFGSADYKIYCYDLRNTRIPWCTILGHGKAVSYVRFLDPYTLVSASTDNTLKIWDLNQTNCSGLSTDSCSLTLNGHTNEKNFVGLSVHDGYITCGSETNEVFSYYKTFPMPITSHRFGSIDPITGQVTNEDNQQFVSSVCWRGKSNMVVAANSSGSIKVLELV

SEQ ID NO: 15288 - protein, 175 aa, Zea mays
  VARIANT 80..175: note = Derived polymorphism lacks residues 80 to 175
  VARIANT 61..175: note = Derived polymorphism lacks residues 61 to 175
  VARIANT 37: note = Ancestral polymorphism is P, Derived polymorphism is L
MLATTCSRPPCPCPCARSRRLPAATFGGTSSAKRRAPRRAAAAVRCGLLPVDPWAPTMDSQSVASQLFAVSLFPYLGFLYFMTRSKTAPGLTLFGFYFLLVFVGATIPAGIYAKVHYGTSLSNVDWLHGGAESLLTLTNLFIVLGLRGALRKLEEEGTDEIVSEASQDSAEKSSV

SEQ ID NO: 15289 - protein, 682 aa, Zea mays
  VARIANT 546..682: note = Derived polymorphism lacks residues 546 to 682
MARPCGAALQRHAAVAVLRAAAAAGDLSKGKALHARLITAAHFDVVLHNNLISFYAKCGRVGLARTVFDAMPFRNAVSANLLMSGYASSGRHKESLQLLRVVDFGMNEYVLSAAVSATANVRSYDMGRQCHGYAVKAGFAEQRYVFNAVLYMYCQCAHMEDASKVFESVSGFDAFAFNSMINGYLDRGQLDGSLGIVRNMTGEAEKWDYVSYVAVLGHCASMKDSVLGAQVHAQALKKRLELNVYVGSALVDMYGKCDHVHDANRAFEVLPEKNVVSWTAVMTAYTQNELYEDALQLFLDMEMEGVQPNEFTYAVALNSCAGLAALRTGNALGACVMKTGHWDHLLVSNALMNMYSKSGSIEDAHRVFISMPLRDVVSWNLIITGYAHHGLAREGMEAFHSMLSAAVIPSYVTFVGVLSACAQLGLVDEAFYYLNTMMKEVGITPGKEHYTCMVGLLCRVGRLDEAERFIVNNCIGTDVVAWRSLLNSCQVYKNYGLGHRVAEQILQLEPSDVGTYVLLSNMYAKANRWDGVVKVRKHMRERAVRKSPGVSWIHVGSDVHVFTSEEKVHPQMDQIAKKLEELIDQIKAIGYVPNFAVVLHDIDDERKEEHLMYHSEKLALAFGLIHTPKGATIHIMKNLRICDDCHVAIKLISVVTSRKIVVRDAVRFHCIEGGICSCNDYW

SEQ ID NO: 15290 - protein, 605 aa, Zea mays
  VARIANT 415: note = Ancestral polymorphism is I, Derived polymorphism is S
  VARIANT 412: note = Ancestral polymorphism is A, Derived polymorphism is T
MKYVLVTGGVVSGLGKGVTASSVGVVLKSCGLRVTSIKIDPYLNIDAGTMSPLEHGEVFVLDDGGEVDLDLGNYERFLDIKLTRDNNITTGKIYQSVIDKERRGDYLGKTVQVVPHITDEIQEWIERVAMNPVDGTEEPADVCVIELGGTIGDIESMPFIEALGQFSYRVGPGNFCLVHVSLVPVLNVVGEQKTKPTQHSVRGLRGLGLMPDILACRSTQPLEEHVKVKLAQFCHVPISNIINLRDVTNIWHIPLLLRDQKAHEAILKVLDIQCVGKVAREPQLSEWTERASRCDRLKSPVRIAMVGKYTGLSDSYLSVIKALLHASVALDRKLVVDWVPSCDLEDSAAEENLDAYEKAWELLKGADGVLVPGGFGDRGVQGKILAAKYARENNIPYLGICLGMQIAVIEFARSIMKLHGANSTEFDPTTKTPCVIFMPEGSKTHMGATMRLGSRRTFFQVTNCKSAKLYGNASYVDERHRHRYEVNPDMVPEFEKAGLSFVGRDESGKRMEIIELPTHRFFVGAQFHPEFKSRPGKPSPLFLGLVAASSGQLDHLLQPGLISSTGRHTCSKGGAQKLKAGHVMKPLNGLVNAHYSATGNGAIPI

SEQ ID NO: 15291 - protein, 109 aa, Zea mays
  VARIANT 1: note = Ancestral polymorphism is M, Derived polymorphism is T
  VARIANT 4: note = Ancestral polymorphism is K, Derived polymorphism is R
  VARIANT 29: note = Ancestral polymorphism is P, Derived polymorphism is A
  VARIANT 33..109: note = Ancestral polymorphism lacks residues 33 to 109
  VARIANT 67: note = Ancestral polymorphism is V, Derived polymorphism is L
MALKAAEFRRNGAIALPFRPSQFLRSSTPYGPQRKLEEEGNPKPVTVKIIETVYVEAGTADDFKSVVQRFTGKDAAAELEESGRPTPSRPHPETNCSIYSTWSTIYAKP

SEQ ID NO: 15292 - protein, 138 aa, Zea mays
  VARIANT 76: note = Ancestral polymorphism is E, Derived polymorphism is D
  VARIANT 42..138: note = Derived polymorphism lacks residues 42 to 138
  VARIANT 41: note = Ancestral polymorphism is T, Derived polymorphism is A
  VARIANT 12: note = Ancestral polymorphism is K, Derived polymorphism is N
MAAEKEGAVVTKGHDEGMKAAAALLEEFGLPPGLLPLEDVTEVGFVRATGYFWLAQRKKVEHRFRKIGKQVSYDVEIAGYVRPRGIRRLKGVKAKELVLWPPVHEMAVDDDPPTGKIHFKSLAGVTKTFPVDAFAAGQ

SEQ ID NO: 15293 - protein, 100 aa, Zea mays
  VARIANT 78: note = Ancestral polymorphism is V, Derived polymorphism is A
  VARIANT 63: note = Ancestral polymorphism is G, Derived polymorphism is E
  VARIANT 61: note = Ancestral polymorphism is K, Derived polymorphism is M
  VARIANT 60: note = Ancestral polymorphism is R, Derived polymorphism is W
  VARIANT 49: note = Ancestral polymorphism is T, Derived polymorphism is M
  VARIANT 38: note = Ancestral polymorphism is C, Derived polymorphism is F
  VARIANT 36: note = Ancestral polymorphism is V, Derived polymorphism is A
  VARIANT 35: note = Ancestral polymorphism is V, Derived polymorphism is I
  VARIANT 26: note = Ancestral polymorphism is G, Derived polymorphism is C
  VARIANT 25: note = Ancestral polymorphism is L, Derived polymorphism is V
  VARIANT 23: note = Ancestral polymorphism is G, Derived polymorphism is S
  VARIANT 17: note = Ancestral polymorphism is R, Derived polymorphism is C
  VARIANT 8: note = Ancestral polymorphism is R, Derived polymorphism is C
MGNLNRTCMWKVGEKVCSTRPEGDVGPFYAFTAGVAHFPYDGSDNLVFTMDLIVLNGILRKNGHSFPKISNKSVIELVDSLNPFNMHAFMVNNYSIMAHL

SEQ ID NO: 15294 - protein, 375 aa, Zea mays
  VARIANT 20: note = Ancestral polymorphism is F, Derived polymorphism is S
  VARIANT 25: note = Ancestral polymorphism is E, Derived polymorphism is A
  VARIANT 56: note = Ancestral polymorphism is P, Derived polymorphism is A
  VARIANT 101: note = Ancestral polymorphism is E, Derived polymorphism is V
  VARIANT 113: note = Ancestral polymorphism is E, Derived polymorphism is A
  VARIANT 157: note = Ancestral polymorphism is C, Derived polymorphism is S
  VARIANT 179: note = Ancestral polymorphism is A, Derived polymorphism is T
MGAAADDAASVRAAVMRLSFGAAAEERRDAAGEVARLARADERTKRLLPELGVLPPLLDMLGGAGPGARLAAAGALLELARGTHRNKVRIVQAGLLKKLPVVADDRDVCRSQELALLLLSISSLANTDFPLRTTELLPFLVATLGATDVPPDAKLPCLAALRNLSAKLEHARDVASSGAVRALLPLSLEPKTSEPALAVLGELAAAAGREAMEAEGEAVPRALLEAMTRHGSARCQERATYLAMVLAHGSRALRRAMRRLGVVQALLEVSLLSSSPLAQRRAAIILRWFKEDGPQSRTTRAHSGPRVEGVAEATSCRDDDVAGEAKGCRDTTVDEIVRRSLDRNMKSILRRATASVDLTNVKLLVTSSSSKSLPC

SEQ ID NO: 15295 - protein, 674 aa, Zea mays
  VARIANT 222..674: note = Derived polymorphism lacks residues 222 to 674
MVAGRVKAAMGFQRSPATPKPGASSSSSSSRKAPPPLQLPGSAALPETPRRRSSGSPAPPGSGSKGGGGPFSRYFPRSSAQVQPARASGQPEPPPPPPPPPSCPGPAAAADLARLVEELRERESRLRTELLEHKILKETVAIVPFLETELAAKSSDLGRCRDALSRLEAENASLRAELHAARGSQQRVVQLEKELAEVKRHRRRDSGPDADRHDDDCSSSVSSHNSDSDRSNAPTNAVVPGLLIVPPPAPPPPPPPPPPPSYKSRSYFSASSRASPANSSSSSSTSSAPSTPTYSSDTAASRNRVPELSQLPPIPAPPPPPPPPPPPAMPARGRRSACSSPSTSSGSSGGGCGRGSGPPAPPPPPPPAARRSSRASSPAASGTAPAPAPCVRRVPEVVEFYHSLMRRDSRSRDAAAAAEAGASGGAAAARDMIGEIENRSSHLLAIKSDVERQGDFIRFLIKEVQGAAFVDIEDVVTFVKWLDVELSRLVDERAVLKHFDWPEGKADALREAAFGYRDLKKVESEASSFCDDPRQPCSSALKKMQAVFEKLEHGVYSLVRVRDGAMSRYRGYQIPWEWMQDTGIVSQIKLQSVKLAMKYLRRVSSEIQAIQVGPDEEELVLQGVRFAFRVHQFAGGFDVDTMRAFQELKETASAFQQWGGQNQHLHQQRLAGRS

SEQ ID NO: 15296 - protein, 400 aa, Zea mays
  VARIANT 31: note = Ancestral polymorphism is D, Derived polymorphism is V
MSQHGGLGDTARRWRELHGDGGWAGMLDPLDLDLRRTVLRYGEMAQATYDAFNRERASPHAGLSRFARAHFFDRVRLPAHAAAYRVTRFLYATSSVAVPDAFILRSVSRSRRCRESNWIGYVAVATDEGKAALGRRDVVVAWRGTMRALEWADDLEFPMVPTGGLLGDGDAMVHRGWLSMYTSSDPASSHNQDSARHQALGEVRRLVDAYRGEELSITVTGHSLGAALATLNAFDIAANGYNVAATGAAACPVTSFAFASPRVGGGGFKKRFDAVPGLRLLRVRNARDVVPKYPVVFYHDVGAELAIDTGESPYLRSPGGEQTWHNLEVYLHGVAGTRGARGGFELAVARDVALVNKAYDALRDHHGVPPGWWVPLNRGMVEGADGRWSLVDCEEDEDDE

SEQ ID NO: 15297 - protein, 403 aa, Zea mays
  VARIANT 66: note = Ancestral polymorphism is D, Derived polymorphism is N
MAPGSIASRWRELQGADSWSGLLDPLDIDLRANLIAYGELTQATYDGFNQERRSPHAGACVFGYSNLLAGSGAAAAGSYAVTRFIYATSALPGVPEAFLLLPLPDLLPESWSRESNWMGYVAVATDDGVAALGRRDILVAWRGTMRGLEWVNDFDFTPVSAAPVLGPAAAANPFALVHRGFLSVYTSSNPDSNSNKDTRDVEKVLAEVSRLVALYKDEVTSITVCGHSLGASLATLNAVDLAANGVNAPPAGSSQPPCPVTALVFASPRVGDGNFKRAIASFPDLRALHVKNAGDIVPTYPPLGYVDVAVQLPIATGRSPYLRQPGTIATLHNLECYLHGVAGEQGSAGGFRLEVDRDVALVNKGEDALKDQYPVPAQWWVAKNKCMVKGADGHYALQDFEQI

SEQ ID NO: 15298 - protein, 253 aa, Zea mays
  VARIANT 50..253: note = Derived polymorphism lacks residues 50 to 253
  VARIANT 28: note = Ancestral polymorphism is P, Derived polymorphism is T
MALPNQGTVDYPSFKLVIVGDGGTGEFPNGSVSPLVVRNGRSCRCFYEIWQIGLGRCKTTFVKRHLTGEFEKKYEPTIGVEVHPLDFTTNCGKIRFYCWDTAGQEKFGGLRDGYYIHGQCAIIMFDVTSRLTYKNVPTWHRDLCRVCENIPIVLCGNKVDVKNRQVKAKQVTFHRKKNLQYYEISAKSNYNFEKPFLYLARKLAGDPNLHFVEAVALKPPEVTIDMAMQQQHEAELAAAAAQPLPDDDDDLIE

SEQ ID NO: 15299 - protein, 236 aa, Zea mays
  VARIANT 27: note = Ancestral polymorphism is F, Derived polymorphism is Y
  VARIANT 10: note = Ancestral polymorphism is D, Derived polymorphism is A
MALPNQGTVDYPSFKLVIVGDGGTGEFPNGSVSPLVVRNGKTTFVKRHLTGEFEKKYEPTIGVEVHPLDFTTNCGKIRFYCWDTAGQEKFGGLRDGYYIHGQCAIIMFDVTSRLTYKNVPTWHRDLCRVCENIPIVLCGNKVDVKNRQVKAKQVTFHRKKNLQYYEISAKSNYNFEKPFLYLARKLAGDPNLHFVEAVALKPPEVTIDMAMQQQHEAELAAAAAQPLPDDDDDLIE

SEQ ID NO: 15300 - protein, 56 aa, Zea mays
  VARIANT 55: note = Ancestral polymorphism is H, Derived polymorphism is Y
  VARIANT 51: note = Ancestral polymorphism is Y, Derived polymorphism is H
  VARIANT 48: note = Ancestral polymorphism is E, Derived polymorphism is A
  VARIANT 38: note = Ancestral polymorphism is S, Derived polymorphism is Y
  VARIANT 1: note = Ancestral polymorphism is M, Derived polymorphism is T
MGCNTDWKLLFFYRENWKLLLFETRKRKPFGPMLNVISLFCLKIIAKEHKHFGRHL

SEQ ID NO: 15301 - protein, 863 aa, Zea mays
  VARIANT 64..863: note = Derived polymorphism lacks residues 64 to 863
  VARIANT 157..863: note = Derived polymorphism lacks residues 157 to 863
  VARIANT 182..863: note = Derived polymorphism lacks residues 182 to 863
MPLLPTKPAPALNPFLLPLASLALPRALPPIRLHAKKRLRGLSSAAVSAAASTSSSADPSTELRALCSHGQLAQALWLLESSAEPPDEDAYVALFRLCEWRRAVEPGLRACAHADDRHAWFGLRLGNAMLSMLVRFGETWHAWRVFAKMPERDVFSWNVMVGGYGKSGLLDEALDLYHRMMWAGVRPDVYTFPCVLRSCGGVPDWRMGREVHAHVLRFGFGEEVDVLNALMTMYAKCGDVMAARKVFDSMTVMDCISWNAMIAGHFENGECNAGLELFLTMLHDEVQPNLMTITSVTVASGLLSDVTFAKEMHGLAVKRGFAGDVAFCNSLIQMYASLGMMRQARTVFSRMDTRDAMTWTAMISGYEKNGFPDKALEVYALMEVNNVSPDDITIASALAACACLGSLDVGVKLHELAESKGFISYIVVTNAILEMYAKSKRIDKAIEVFKCMHEKDVVSWSSMIAGFCFNHRNFEALYYFRHMLADVKPNSVTFIAALAACAATGALRSGKEIHAHVLRCGIEYEGYLPNALIDLYVKCGQTGYAWAQFCAHGAKDVVSWNIMIAGFVAHGHGDTALSFFNQMVKIGECPDEVTFVALLCACSRGGMVSEGWELFHSMTEKYSIVPNLKHYACMVDLLSRAGQLTEAYNFINEMPITPDAAVWGALLNGCRIHRHVELGELAAKYVLALEPNDAGYHVLLCDLYADACLWDKLARVRKTMREKGLDHDSGCSWVEVKGVVHAFLTDDESHPQIREINTVLEGIYERMKASGYAPVESHCPEDEVLKDDIFCGHSERLAVAFGLINTTPGTSISVTKNQYTCQSCHRILKMISNIVRRDIIVRDSKQLHHFKDGSCSCGDEGFG

SEQ ID NO: 15302 - protein, 167 aa, Zea mays
  VARIANT 1: note = Ancestral polymorphism is M, Derived polymorphism is L
  VARIANT 132: note = Ancestral polymorphism is N, Derived polymorphism is S
MSRPPSITRRPPSTNPEALGNRAFMAVPSISCSLGPPAPVREASARLRQPSPTPWADGLRRACVAGAAACVVFGTAGGGGGGVAASAPPRDASVAAAPRWSDRRECPPWRANSLENVVPENLPRPSARRRFSTVKRAPRKAPALGPQAVAPSPFLALRSGMDDCFTL

SEQ ID NO: 15303 - protein, 160 aa, Zea mays
  VARIANT 76: note = Ancestral polymorphism is S, Derived polymorphism is F
MAAPSSTAATIISSCCRLGPPAPPEQAAAGARRTQAPAAGVSASHALRGACVAAAACAAMGMAGGGDIALARDGASVAAWTDAMGAARTKAPAPARWSERRQCPPWRANSLENVVPENLPRPPAPRRFDSVSVSAAAPDLVAPPSSVLAAVRPGTGCFSL

SEQ ID NO: 15304 - protein, 164 aa, Zea mays
  VARIANT 19: note = Ancestral polymorphism is R, Derived polymorphism is S
MASLVSQPRHSIQTYWARRSYLRLRSPSRRLRVARLGAGSGRAAAGSASAASTTTSSWKASRVARRAAALLAAPGLLLARLRDAYVDAMVALGGSGGAVRPCAALARSRSGAEAGLWDRRVPLARRGSGRASRRGGGAADFERRMMAHIYSVVVTPELPCAARA

SEQ ID NO: 15305 - protein, 318 aa, Zea mays
  VARIANT 221: note = Ancestral polymorphism is V, Derived polymorphism is A
  VARIANT 3: note = Ancestral polymorphism is G, Derived polymorphism is D
MGGEAKKLPRIDFSEVDPSAPGGQAWGTARGEVMDALATFGCFEAHYPALAPRLRAELFEGAVRPLFALSADAKRRNCYGADRPFHGYLGDVPGFPGYESLAIVDGTKDESVRGFARLMWPDGGDNSDSFCGTVVEAAQRIFQLEEAVRRMVMEGLGVAKHHDALSASMWHLFRMSEYKAPNAAEKVVRYGAHQDTNWLSVVCQHEVAGLEMQSRGGEWIVVQPSPTSLVFMVGNELRAWTNDRLYAPFHRITVAGDVPRYSAMLFSVPSFQVQVADELVDDEHPPRFKPHDNNDFVCFCVSEEGALHQDKLKAFCGV

SEQ ID NO: 15306 - protein, 164 aa, Zea mays
  VARIANT 99: note = Ancestral polymorphism is V, Derived polymorphism is L
  VARIANT 59: note = Ancestral polymorphism is G, Derived polymorphism is D
MEAEAFPIRFTRGVRAYWRRHKYHRLAGGADGKQPRSRQLGSGGGGARVRRRVRVLLAGPRRALARARDAYVGGMLALGRRASALALPGAVEALWAKRVPRHKQQQQQLPAPGKPTEFEQRLIFEIYKSIVASKELTTMLHSSAAHLPPAASAAGLPSTHLLDM

SEQ ID NO: 15307 - protein, 305 aa, Zea mays
  VARIANT 229: note = Ancestral polymorphism is A, Derived polymorphism is T
  VARIANT 226: note = Ancestral polymorphism is C, Derived polymorphism is S
  VARIANT 221: note = Ancestral polymorphism is A, Derived polymorphism is V
  VARIANT 200: note = Ancestral polymorphism is G, Derived polymorphism is D
  VARIANT 181: note = Ancestral polymorphism is R, Derived polymorphism is H
  VARIANT 153: note = Ancestral polymorphism is L, Derived polymorphism is R
  VARIANT 152: note = Ancestral polymorphism is A, Derived polymorphism is V
  VARIANT 151: note = Ancestral polymorphism is P, Derived polymorphism is L
  VARIANT 144..305: note = Derived polymorphism lacks residues 144 to 305
MRTIAARNTHDSLSFSRRHFKWPVLGKSKSHGAATFGDEEYMKSSEAEDDDETTMAFSSACPSFHSDGFVSPPLKPAPSAQQQQAAAAVAAGQRRRMKVRTAVSRLRSALANAVAGRHRQVGMGARLTGTLYGHRRGHVHLAFQVDPRACPALLLELAAPTAALVREMASGLVRIALECDRARARGSPAAALPSPSPGAGKRLVEETVWRAYCNGKSCGYAVRRECGAADWRVLRALEPVSMGAGVIPAASCGGGEGDVMYMRARFERVVGSRDSEAFYMMNPDGSGGGAHGHGGPELSVYLLRV

SEQ ID NO: 15308 - protein, 138 aa, Zea mays
  VARIANT 97: note = Ancestral polymorphism is G, Derived polymorphism is D
  VARIANT 63: note = Ancestral polymorphism is G, Derived polymorphism is E
  VARIANT 49: note = Ancestral polymorphism is G, Derived polymorphism is E
  VARIANT 35: note = Ancestral polymorphism is T, Derived polymorphism is I
  VARIANT 30: note = Ancestral polymorphism is G, Derived polymorphism is S
  VARIANT 29: note = Ancestral polymorphism is P, Derived polymorphism is R
  VARIANT 7: note = Ancestral polymorphism is W, Derived polymorphism is R
MPLCQGWLSVDMRISHLIALRVYAVLLMPGFIEGTRHGVVSLEGGLQTGFIVAWIDYRNFPRGTISDVVSDGSEAISFICNNVVSFVGDPTKIYLMGQSAGAHIVACVLLEQALKESKGESTYCNVVQIKVCFCLSGG

SEQ ID NO: 15309 - protein, 339 aa, Zea mays
  VARIANT 12: note = Ancestral polymorphism is A, Derived polymorphism is V
  VARIANT 38: note = Ancestral polymorphism is A, Derived polymorphism is V
  VARIANT 40: note = Ancestral polymorphism is L, Derived polymorphism is P
  VARIANT 55: note = Ancestral polymorphism is R, Derived polymorphism is G
  VARIANT 60: note = Ancestral polymorphism is A, Derived polymorphism is T
  VARIANT 70: note = Ancestral polymorphism is E, Derived polymorphism is K
MAMAMGMNPVTVDAVELSRLHRKLPLRPTVDEVEASTVILTSANAKEACLAKITREEKAARALAQGVLVELFDVVHSFTSTGEHRKACNLLQWVSIYGSQTFFAGLHTGQGSAEGSHGLQDTKEQDIKKGKAALVSTELLREDLVQSAVSFLKHPKVVASSDGQRRSFLVNKGLTMDEIDEAFRRLQSPSSNSASSNMCTSQGVFDHSCRITEEGVLSFIERVEPEAGPVAPVVPRHPKSYMEDINDDPPNPDQPISEPRMAPKPKPWEKQGQGSLACDLKSLPRESDVLRSEVQHDDGTNQVTESADGANQADSLLQAGVAAGSESPGVPDDAASSLE

SEQ ID NO: 15310 - protein, 335 aa, Zea mays
  VARIANT 186: note = Ancestral polymorphism is R, Derived polymorphism is H
  VARIANT 267: note = Ancestral polymorphism is R, Derived polymorphism is W
MGEQSLSQPKPQPLSPFPSPPASAALPPPASASASASASAASTSRTTSAAASRPKKKVTNPSPDRNPAKKPRLTFSIPGRPLSAVGEVGVAIRYLRAADPALAAVIDAHEPPVFQCPHRPFHSLVRSILYQQLAFKAAASVYSRFLALLGGESCVAPDAVLALTPHQLRQIGVSPRKASYLHDLARKYASGILSDAAIVNMDDRSLAAMLTMVKGIGSWSVHMFMIFSLARPDVLPSADLGVRKGVQMLYALEDVPRPSQMDKLCERWRPYRSVGAWYMWRLIESKVPQPAPAIPVGSLAFPSPDGQSMLQQQEQQQQQTVIQMIDPLQMLPGMG

SEQ ID NO: 15311 - protein, 357 aa, Zea mays
  VARIANT 89: note = Ancestral polymorphism is E, Derived polymorphism is D
  VARIANT 121: note = Ancestral polymorphism is M, Derived polymorphism is T
MLAKRVAAISFLLDRDDDSSSGTGAGWCKRRRLWTTADYETTRVLGEGSFGAVVEARHRATGQAVAVKTLRAPAGAGAETEAGAKALREAELLAACRGHPSLVGLHAIAINPATAEIALVMECVGPNLHDVLNGSRYRSGRPFTEQQVRLIMRQLLAGAKHMHARRIMHRDIKPGNILVSAGAGADDREPVSVKICDLGLAASITKPAYGQAGTVRYMAPEMLLGKPDYDAMVDMWSLGCVMAELLTGKPLFDGEDDMEVLSLIFGVLGVSERTTWPAFKSLPLAAMVPLPPVRHPSMLPKLFPKKLLSADGFGLLQRLLSCDADKRPSASVALRSPWFTKDTDSAASVSATAKMAQ

SEQ ID NO: 15312 - protein, 244 aa, Zea mays
  VARIANT 230: note = Ancestral polymorphism is D, Derived polymorphism is Y
  VARIANT 70..244: note = Derived polymorphism lacks residues 70 to 244
MCPGYVEGRGVTILPPPGYHGRGLGCAQAGPILPRSQLPRFSPLPLFPVHYCMQAIAKSRFVEQTPIQSQGWPMALKGRDLICIAQIGSGKTLSYLLPGLVHVGAQPQLGVENDIATPGRSTQTDKPCIGVPNDLEKLKPWQDSFCKILTRCVFAAVTVIIGSPEPKANHSIQQIAEGISDHEKSIQGILSKLLSDLIDGNRILIFLQTKKNYVLAEFKSDKSPMTAATYVAARGLGMMIYLKI

SEQ ID NO: 15313 - protein, 605 aa, Zea mays
  VARIANT 106: note = Ancestral polymorphism is Y, Derived polymorphism is C
  VARIANT 340: note = Ancestral polymorphism is S, Derived polymorphism is L
  VARIANT 504..605: note = Derived polymorphism lacks residues 504 to 605
MRRALGRETLLRRHRGSALLWLAVTALVTGTICLWSSFSVGLLSTYRVQLCYMHGIELYVQHLFEFSIKLYLVLISVLLLKDVVANELWRTVDSNGWRASSAPRICWPPPPAESESNGYLRVWCNGGLTQQRSAICNAVVVARIMNATLVLPELDTNSFWHDESWTNPKLRVKIPDYGFQMVRWPLHVSMLHYLQDTLFEYCSWLVFTYFFPFMYGTSGFVDIYDVPHFINTLKYDVRIVMSIPKITAQGKTKKLKAYKILPPRDAPVTWYRTTALERLRKYGAIYLTPFSHRLAEKIDDPEFQRLRCRVNYHALRFKPSIMKTSSDIANKLHSEGHFMSIHLRFELDVLAYAGCFDIFTPEEQEILLRHRNKYFPLLLRYWGKYFPGNTPDYRERRLIGKCPLTPEEVGLILRATGFDNSTWIYLAPGKLFGGKHFMKPFKAMFPRLKNHSMIRSGKLEENIRGLAGSAVDYMVCLLSDIFIYDGPSNFADNLMGHRLYYGFRTTITPNKKALARIFMDREEGHTSAFEERVRQVMLTHFGAPHKRIHPESFYTNPWPECFCQTKARNHADRCPHNSVNDVLESWFHNKEDVEVEATNQTDSTS

SEQ ID NO: 15314 - protein, 74 aa, Zea mays
  VARIANT 64: note = Ancestral polymorphism is S, Derived polymorphism is F
MAAPHITGVVALLKAAHPDWSPAAIKSAMLTTADRLDNGGQPILDEQHAEATSFAMGAGHVNVSRATDPAGAGV

SEQ ID NO: 15315 - protein, 558 aa, Zea mays
  VARIANT 138: note = Ancestral polymorphism is M, Derived polymorphism is R
  VARIANT 194..558: note = Derived polymorphism lacks residues 194 to 558
MQFSSVLPLEGKACMSPVRRGSGGYGSERMRINCCSIRRNKALRRMCFSARGAVSSTQCVLTSDAGPDTLVVRTSFRRNYADPNEVAAVILGGGTGTQLFPLTSTRATPAVPIGGCYRLIDIPMSNCFNSGINKIFVMTQFNSASLNRHIHRTYLGGGINFTDGSVEVLAATQMPGEAAGWFQGTADAVRKFIWVLEDYYKHKAIEHILILSGDQLYRMDYMELVQKHVDDNADITLSCAPVGESRASDYGLVKFDSSGRVIQFSEKPKGAALEEMKVDTSFLNFAIDSPAEYPYIASMGVYVFKRDVLLDLLKSRYAELHDFGSEILPKALHEHNVQVKQFPLVEQYRTKCTGSSCDFVCQAYVFTDYWEDIGTIRSFFDANMALCEQISIQTNTVFISYAPSQPPKFEFYDPKTPFFTSPRYLPPTKSDKCRIKDAIISHGCFLRECAIEHSIVGVRSRLNSGCELKNTMMMGADLYETEDEISRLLAEGKVPIGVGENTKISNCIIDMNARVGRNVSITNKEGVQEADRPDEGYYIRSGIVVVLKNATIKDGTVI

SEQ ID NO: 15316 - protein, 829 aa, Zea mays
  VARIANT 168..829: note = Derived polymorphism lacks residues 168 to 829
  VARIANT 174..829: note = Derived polymorphism lacks residues 174 to 829
  VARIANT 231..829: note = Derived polymorphism lacks residues 231 to 829
  VARIANT 271..829: note = Derived polymorphism lacks residues 271 to 829
  VARIANT 395..829: note = Derived polymorphism lacks residues 395 to 829
MRGGGRGGGGRQPSYAAPDGADAAAIPVASRKMVQSLKGILADRSEGEIYATLCDCGMDPDIAVERLISQDTFHEVRRKRDRKKETKVNHETRPRPFQKYTYRGYKAVSDRSGRADPTGGFKGPVKKEPEMQAPLNSSALDVKTSDTTEIFSATINVAQTDAKNTTSQPLSKVQHGWGGIPGRPSMAEIVKMGRPQAKVGSRSVASSTALPTVGDSVISNTPNLVPEEYNRTVFASEAGHVAADKLPNGAVEVHSLPKDASAFDMLPSAEGTDVEAPSMSANAQGSSTPDANEDDIEKYANLEEGNTESLISPGQVSASGKDIQSEYTEVVSHVDEGSIEKTNDFQLNGLPFEHNQTDLNGDVSTATTQFDHLTLHEGPKLSDDNPAVIIPDHLQVSNADCAHLTFGSFVSGTLDSSLTTKPLESHGDAAAVPDDDSIDQSDGRIHDDEGKVTLATDVNEYVTSAANSNEENLDITSVQQSEVTRADFLDVTSNTEYNLTSTPDYATSSAPLQDSASQSLQENRQFQNISPFSSFMQMQNGLLPPAIPPLREFDPAFSLLLTHPPMMHGTMSSSMSNTTVSTQPQENANPVGLPNPQLTQSQQSTSIASGPPLPQHLLHPYAQPTLPLGYASMIGYPSLPPSYAYLPPAAFQQPYMNSGLFHQAAAAVPTSSVKYPLPQYKSNIALASLPQPGSLLSSYVGGFGTASNMPGNFPLNQSTAAATTTLGFDGTVPSHFKDGNQFISLQQNENPAMWMHGASSRGMPPLAASTMYGYQGQSHQAGLRQGQLPSQFGSALGQSQPGLGPEHRNPSDSNLSGAAQANQMWPNTY

SEQ ID NO: 15317 - protein, 280 aa, Zea mays
  VARIANT 223: note = Ancestral polymorphism is A, Derived polymorphism is T
  VARIANT 162: note = Ancestral polymorphism is A, Derived polymorphism is T
  VARIANT 161: note = Ancestral polymorphism is A, Derived polymorphism is T
  VARIANT 135: note = Ancestral polymorphism is P, Derived polymorphism is L
  VARIANT 124: note = Ancestral polymorphism is A, Derived polymorphism is T
  VARIANT 119: note = Ancestral polymorphism is G, Derived polymorphism is A
  VARIANT 112: note = Ancestral polymorphism is R, Derived polymorphism is S
  VARIANT 102: note = Ancestral polymorphism is D, Derived polymorphism is Y
  VARIANT 98: note = Ancestral polymorphism is A, Derived polymorphism is T
  VARIANT 50: note = Ancestral polymorphism is H, Derived polymorphism is Y
  VARIANT 21: note = Ancestral polymorphism is A, Derived polymorphism is V
MDMDAEAPLLLPIDITIVPSAPSSSPSTRSIVLRIAAVLAVACASLLAQHEASKGFAVAVANDAARGSAAARRFDLHLASNGRAERALLRASRAVERALFPDASFPRRQVRRVTVRMAARNLTAGAGATVRAAAPGEYVVSLSPGLVASSSASANDAAVAAALRRAVARMWLWDGRGAAPARVTEAMVDYLAGAAGDDEAAAAAEDAHGCGTFSARLLRRLEARREGFVARLNRAMKDRWSDAAVDAALGAPARLACRHHAEETTAALTRRGQLENGGWR

SEQ ID NO: 15318 - protein, 633 aa, Zea mays
  VARIANT 390..633: note = Derived polymorphism lacks residues 390 to 633
  VARIANT 357..633: note = Derived polymorphism lacks residues 357 to 633
MSRFMFLPFHVPFRFPKLSIQVVCSGGFSKQLIDLTVVLQTSAEVDFFTEYGDANRYKIQEVIGKGSYGVVCSAIDLHTRQRVAIKKIHGIFEHVSDAARILREIKLLRLLRHPDIVEIKHIMLPPSRKDFKDIFVVFELMESDLHQVIKANDDLTKEHYQFFLYQLLRALKYIHTANVYHRDLKPKNILANSNCKLKICDFGLARVAFNDTPTTVFWTDYVATRWYRAPELCGSFFTKYTPAIDIWSIGCIFAEVLTGKPLFPGKNVVHQLDLMTDLLGTPSTDTISRVRNEKARRYLSSMRKKDPVPFSQKFPSADPLALKLLEKLLAFDPKDRLTAEEALRDPYFKGLARAEREPSCQPIRKVEFDFEHKRMSKEEIRELIFREILEYHPQLLSSYINGTERTTFLYPSAVDQFKKQFSHLEESGGNGPSVPTDRKHASLPRTTVVHSNPIPAKEQPLGASSRVRPVSDDSCKNPWEKGSGPGNVPRTSLTPQGLQAQAGSVRVNGPVTDSRYPPHQQIPQAYGYRQMPARLDSTNPSQAMGGYTLQSQKAYACANGKGSPDVAVNMRAPPFHLPAGPKKNPLDRIAPDTTDIYTRSLNGIVAAAAASVGAGAGTHRNIGVVPSGMSRMY

SEQ ID NO: 15319 - protein, 407 aa, Zea mays
  VARIANT 169: note = Ancestral polymorphism is I, Derived polymorphism is M
MLSLSCSCPGVSSMSKTALDWGHLVASCRSRWHGARAPPRRRRTPCVCLVALPTTTQPGPAAVDVPSRTVPAVTTSSAPERISVSALLEVVSDDLLNLNNNLKSLVGAENPVLVSAAEQIFSAGGKRLRPALVFLVSRATAELAALPELTTEHRRLAEIIEMIHTASLIHDDVIDDSGMRRGKETIHQLYGTRVAVLAGDFMFAQSSWFLANLENIEVIKLISQVIKDFASGEIKQASTLFDCDVTLDDYLLKSYYKTASLIAASTRSAAIFSGVGSGVCEQMYEYGRNLGLAFQVVDDILDLTQSAEQLGKPAAGSDLAKGNLTAPVILALREEPRLRGIIESEFCEPGSLAAAVELVHRGGGIRSARELAEEKGGLALRSLQCLPRSEFRSALERVVHYNLQRVR

SEQ ID NO: 15320 - protein, 141 aa, Zea mays
  VARIANT 86..141: note = Derived polymorphism lacks residues 86 to 141
MADAEDIQPLVCDNGTGMVKAGFAGDDAPRAVFPSIVGRPRHTGVMVGMGQKDAYVGDEAQSKRGILTLKFCKPIMTKPKVALKPQTLSPQPEAQAPHDPQTPKQQQSGTGFHIADTQESSLRQCSCRDGYAAEAMLGRLH

SEQ ID NO: 15321 - protein, 540 aa, Zea mays
  VARIANT 231..540: note = Derived polymorphism lacks residues 231 to 540
MEVFGPVTPGQVSFLLGLFPVLISWIYSEILEYKKSLSHGKVHSDANLDNGTIKEDEKSVLLEGGQLKSPSTKFRNLSTKANLLRFITMDESFLLENRAVLRAMAEFGVVLVYFYICDRTDIFPESKKSYNRDLFLFLYILLIIASTLTSLKKHHEKSAFSGKSILYLNRHQTEEWKGWMQVLFLMYHYFAASEIYNAIRVFIACYVWMTGFGNFSYYYIKKDFSIARFAQMMWRLNFFVAFCCIVLDNDLMLYYICPMHTLFTLMVYGSLGLFNKYNEVPSIMAIKIACCFLSVILIWEIPGVFESLWAPFTFLLGYKDPSPSKAHLPLLHEWHFRSGLDRYIWIIGMIYAYFHPNVERWMEKLEESETKVRLSIKGTIVTLSLTVGFLWYEYIYKLDKVTYNKYHPYTSWIPITVYICLRNCTQQLRNASLALFAWLGKITLETYISQIHIWLRSSMPNGQPKWLLCFIPDYPMLNFMLTTAIYLLLSYRVFEITNVLKSAFIPSRDNSRLYQNLIAGIAISVCLYLCSLILLKIPGV

SEQ ID NO: 15322 - protein, 295 aa, Zea mays
  VARIANT 151: note = Ancestral polymorphism is R, Derived polymorphism is W
  VARIANT 211: note = Ancestral polymorphism is R, Derived polymorphism is C
  VARIANT 212: note = Ancestral polymorphism is G, Derived polymorphism is W
  VARIANT 214: note = Ancestral polymorphism is P, Derived polymorphism is A
  VARIANT 217: note = Ancestral polymorphism is A, Derived polymorphism is V
  VARIANT 238: note = Ancestral polymorphism is I, Derived polymorphism is T
  VARIANT 263: note = Ancestral polymorphism is A, Derived polymorphism is T
MMGGWGVSDGYEGSKRTRMMMESNPYFAVNAGSPLDVSKRSRIVEPGPPYFGAMGSNTGGASGGFYQPFNSSNLAGAGASTGIQNFPGVRLRGLPFDCNDIDICKFFVGLDIVDCLLVNKNGRFTGEAFVVFPTAMQTEFALHRNRQNMGRRYVEVFRCKKQEYYSAIANEVSQGGYFESECRRSSPPPRPPKKTAEDKGSMEYTEVLKLRGLPYSATTEDIIKFFLEYELTEENVHIAIRSDGKATGEAFVEFPTAEVAKTAMCKDKMTIGTRYVELFPSTPEEASRARTRGRH

SEQ ID NO: 15323 - protein, 453 aa, Zea mays
  VARIANT 12: note = Ancestral polymorphism is L, Derived polymorphism is H
MAPPLARLILILLAAAVPLLAAPAAAAAAVFPKEALPTKSGYLPIPPVNASLFFAFYEATDPVTPPASTPLLLWLQGGPGCSSLLGNFFELGPYFVNPDGETLSRNPFAWNRRFGLLFIDSPLGTGFSAAPSPADIPTNQSVIAAHILAALQSFYALDPALRARPFFLTGESYAGKYIPAAGAHILDANRALPEALRVNLRGVAIGNGLTHPVAQVATHADSAYFLGLLNARQKRELEALQSEAVSLTRAQRWAAASDARGRVLSWLQNTTGLATLYDYAKQRDYATAAVGAFLNRAEAKAALGAREDVAWEECSDAVGVAMHADVMRNVLPQVESLLRSTARVLLYQGVRDLRDGVVSTEAWLGGVRWDGLRAFLDAERAVWRTAAEGGELAGYVQRSGSLTHVVVYAAGHLVPADNGRAAQEMIEGWVLGTGMFGRGCGDRVRDGVRSAAT

SEQ ID NO: 15324 - protein, 1163 aa, Zea mays
  VARIANT 811..1163: note = Derived polymorphism lacks residues 811 to 1163
METTAAGAPRAQTLRDLAEEGKKRGVLLLVFAFGLAFLMSLTSSSVWFNLPFAIALIVLFRYISLDYGLRRKSVTRTDHASHSLVKTKGTEVKKVIHQTETDGKIDWRSKVNSPPVEAAFEQFTRHLISEWVTDLWYSRVTPDKEGPEELIDVVNTVLGEISVRARNVNLINLLIRDLVDLICNNLELYHFCQAKIGREKFVGLPSERRDAELKMILLAENKLHPALFSAGAEYKVLKSLADGLISITVKPQDLQCTFFRCTARELLACAVLRPVVNLANPRFINERIESFALSHANKLEKGTAESLDVVTTVKHREPHMPSVDEFSALIDHSSSGVELVQFRQGQSKTASDIQPGKSTNPYSLKLESSHAPLVSSSHPLESTSLASSSHVTSDNGFSLHTKSSNRATANGHGRECAQPLGISSERAHQALALEHLENMWTKGKNYKPENVEHVAKVSVGSASLGSTSVQQSVPCSTSVCYNQSNSERPTASSQSKDQHLVRHSTTPTYVTYPNGTPKSLSAEMAEHAGPEDFAVESESSYATEDDEFNNVTGLDSPVTRVWESKSKGNATLSHIHHPLESPGFHRAKKNRSHVGKLKMSRTSSGRKRSRSNAQKPPIWQEVERSSFSVGDSMDILNTSANDLKTHELDEDPEVESMARMFSSSNTSSLLLPSSDSAYSSNYCGANVLQDSYLKLRCEVVGASIVKSGSGMFAVYSISVTDANGNSWSIKRRFRHFEDLHRRLKEYAQYNLHLPPKHFLSSGLEVSVVRERCKLLDIYLKKKNLHHHNSIDLLILQNLLQIPIVSSCIEVWDFLSVDSQTYIFTDTLSVIQTLSVSLDERSNGKNIKALNSSGALNGNSISGGQSLHGHIDDTVHKDSDIACDGLRFRKGNVNKNLGNGVSHTTDSVSNTTANHYQDNSGSDPEQNDHSFSIDSLNPKKLRSTETNDTSQIPESGGFSVSPNDWMAPNLSVPLFHLVDVVFQLQDGGWIRRQAFWVAKQILQLGMGDTFDDWLVDKIQLLRKGRIIAFAVKRIEQILWPDGIFMTKHPKRNSPPPPPGAQSNGMGNYLSDEQRIEAAHRANFVRELIIDKAPSPLVSLVGRKDYERCAHDIYFFLQASILAGSPVCLKQLAFELLELLVLSSFPELDGTVRKWHEDKEQFCAQ

SEQ ID NO: 15325 - protein, 243 aa, Zea mays
  VARIANT 204: note = Ancestral polymorphism is G, Derived polymorphism is D
MADAANPPTKPTKASAPFVVIDAASANKARDGGADAPTPSAGHGRRWLRRACCGVAVGGALAAAAVLSLSLTVLRVRDPTLSMESVAVRRFSVRLDAASPARPLRINVTLSGAIVVRNPNYESMRFGASATEIFVDGAADPGPVGVGRAPPGEVPARGASRVAADVDVLVDRVAPAVVAQVLFGGGEVRLATRTAVDGRLSLLGGLYGRRTVRVAMRCRVALRVSAAAVAVAGNPACVADFGR

SEQ ID NO: 15326 - protein, 602 aa, Zea mays
  VARIANT 435..602: note = Derived polymorphism lacks residues 435 to 602
  VARIANT 345..602: note = Derived polymorphism lacks residues 345 to 602
MANMGDGGASRRRPSPEPLRLPRPPAIVDGGRASGSPVAVAAEATKAPYSVAFSVPASPSGLHLAACASVHSVAPPPLPVPQPVEDQHHQAEAAPQLLNHSQQALTIRTDEPPPLQRVRTVSRSDSARDRRFDHFKTFSGRLERQLSNLRGVAVDIEPGPGGADSTSNKMISEEETDEDDDGGEVPTADRYFAALEGPELETLRPTEVSALPEDETWPFLLRFPINAFGMCLGVSSQAMLWKTLQSEPSTAFLHVSPAVNHALWWVSAALMALVSFIYLLKIVFYFEAVRREFHHPIRVNFFFAPWIACLFLVKGLPHPVWTIHHAVWYILMVPIFLLDLKIYGQWMSGGDRRLSKVATPTNHLAVVGNFVGALLGANMGLREVPIFFFAVGVVHYLVLFVTLYQRLPTNAQLPRELHPVFFLFIAAPSVASVGWARLCGDFNYAAKIFYFTSLFLSMSLVVRLNLFRGVRFSLAWWAYTFPMTSVAIAAAVYASAVTNVLTRALAVGLSGVATVTVVGVLMTTVYRAFVRKDLFPNDVSIAITQRPKAKFGKILAHIRASGDGVKDLVLAVSRHGGSSGSDTNSASESPSPMARGRRRAEP

SEQ ID NO: 15327 - protein, 101 aa, Zea mays
  VARIANT 21: note = Ancestral polymorphism is A, Derived polymorphism is S
  VARIANT 20: note = Ancestral polymorphism is A, Derived polymorphism is T
  VARIANT 19: note = Ancestral polymorphism is Y, Derived polymorphism is N
MQLVLAKYLHREVLKGEAYAAGDLGVVVHIAYFRMDEMMRGQRGWRELQALGDKINQFSGIIEGLIWSPKASDSNDRHDDWAFEEVLVELAWIHNSVIIFL

SEQ ID NO: 15328 - protein, 89 aa, Zea mays
  VARIANT 29: note = Ancestral polymorphism is I, Derived polymorphism is M
MEDVLMQEPKAGILKPAFTILLDRDKKSILLLIRGTHSIRDTLTTATGAVVPFHHTIVQEGGVSDLVLGYALRALSGTSIADVPRLQNK

SEQ ID NO: 15329 - protein, 358 aa, Zea mays
  VARIANT 68: note = Ancestral polymorphism is C, Derived polymorphism is F
  VARIANT 77: note = Ancestral polymorphism is F, Derived polymorphism is S
  VARIANT 80: note = Ancestral polymorphism is H, Derived polymorphism is Y
METTEPLQDIMCEFRAGKMSHEGTRVVPDTRKGLVRVGRGEEGLVHFQWLDRGQNIVEDVSSCTRIFCRHFLFYSGSLIHISITVVLSVLDSIFQRIKSSFLMRRSLRRYCVTESPGRVYILKFKQDSRKFFFWMQEPNADGDSQTCMQVNAYINRSLDAEADLRVPIEAEMSEDTADDDISSRLMIPLAGNLVESMTADLAGEVTSAAGPVRLEDLQRILSAIQSSDFFYIFWFMLVVAGVGLGDILKPDLVLPLIEDLPIEQLASHLPEGGSWSPGDIVELLQSPPLRQQLDAFTHVLRTGQIDLAQFGVDPDKYKFTVVSFLEALEDSVGRGASEAGDKDAEVERGSGNDAMDES

SEQ ID NO: 15330 - protein, 647 aa, Zea mays
  VARIANT 186: note = Ancestral polymorphism is R, Derived polymorphism is H
MGGLLKEEGPAVDVSVEGTLVWLRRPNGSWWPSIVISPQDVPEGCAPPPRCPATPIMLLGRRPDGPTFVDWCNLARCKRVKPFRCGELDFEQRITNALTLAASGNRSSWSYNKGRYARMEGAILQALDIEKDSALGPVTKAYLHAPSCSPSPKVGMPNGQVKDAAPKDPSPAIQPPLPPPRSKRKRKTPYDSEDDTPQGSCRMRDLRDIGSKTVPTMDLSNAAAIFAPKYNDLPNVGQARRIVRSQATTKRKHAAAHQDQPCGIPRKKDRSRPLSELCNGDIWNGSRPNGQKADEHLLGVATCSSSSSGTSTLDTPLDTNSCHRSAASTDQAKGTAISCMARLLSDDSRHGNDFVGTPPAAQNISEPDHLHRYQPCGLTNNPTWKAGKHACKSIKMRTIRSVGHEGKDRTRDSNNDHGCQKTKTGKHEAARDDEVVLLENRLEKRSLNKNKPAEHDTKMHIAIVPSGMDCVGTVQQQHCKSKCGPEESLETLSSHSNCESGSVSSVVFEKPLHLNPSLYDVELSVLGSSNTWRRVPLVSLMSRLNCKPVVGYPVSVEVSDDLFGCPSSRRDVQLPATSRFQRAVPSSALEKEEVDRLWQPHAKRGGAGAGAVTSSSRKTRGAASGATIACIPLRVVFSRINEALRMP

SEQ ID NO: 15331 - protein, 377 aa, Zea mays
  VARIANT 23..377: note = Derived polymorphism lacks residues 23 to 377
MATRYWIVSLPVQSPGAIASSLWSRLQDSISRHSFDTPLYRFNVPDLRVGTLDSLLALSDDLVKSNVFVEGVSHKIRRQIEDLERAGGVESGTLTVDGVPVDTYLTRFVWDEGKYPTMSPLKEIVGSIQSQVAKIEDDMKVRAAEYNNVRSQLSAINRKQSGSLAVRDLSNLVKPEDMITSEHLVTLLAIVPKYSQKDWLSSYETLDTFVVPRSSKKLYEDNEYALYTVTLFAKVVDNFKVRAREKGFQIRDFEYSPEAQESRMQEMEKLLRDQEAMRTTLLQWCYASYSEVFSSWMHFCAVRVFVESILRYGLPPSFLSAVLAPSTKSEKKVRSILDELSGDAHSLYWKSEDDVGVAGLGGETEAHPYVSFTINFV

SEQ ID NO: 15332 - protein, 120 aa, Zea mays
  VARIANT 104: note = Ancestral polymorphism is R, Derived polymorphism is Q
  VARIANT 102: note = Ancestral polymorphism is R, Derived polymorphism is W
  VARIANT 87: note = Ancestral polymorphism is V, Derived polymorphism is I
  VARIANT 69: note = Ancestral polymorphism is R, Derived polymorphism is W
  VARIANT 60: note = Ancestral polymorphism is G, Derived polymorphism is V
  VARIANT 55: note = Ancestral polymorphism is T, Derived polymorphism is M
  VARIANT 40: note = Ancestral polymorphism is R, Derived polymorphism is W
  VARIANT 36: note = Ancestral polymorphism is T, Derived polymorphism is M
  VARIANT 32: note = Ancestral polymorphism is A, Derived polymorphism is T
  VARIANT 31: note = Ancestral polymorphism is G, Derived polymorphism is D
MAAPGVRSGRRSVGTNSMSPSSSAKKPRRGGALWWTWKRRRKAGSEMRRRQRLQMREARVSDEGSGGRRRKISRWRSSLSGKGATSVSSAGEWRASGGAAYRRRRKHALLGWIDEDNSHE

SEQ ID NO: 15333 - protein, 119 aa, Zea mays
  VARIANT 14: note = Ancestral polymorphism is T, Derived polymorphism is I
  VARIANT 32: note = Ancestral polymorphism is R, Derived polymorphism is H
  VARIANT 41: note = Ancestral polymorphism is P, Derived polymorphism is T
  VARIANT 46: note = Ancestral polymorphism is V, Derived polymorphism is I
  VARIANT 61: note = Ancestral polymorphism is R, Derived polymorphism is H
  VARIANT 65: note = Ancestral polymorphism is V, Derived polymorphism is I
  VARIANT 69: note = Ancestral polymorphism is A, Derived polymorphism is V
  VARIANT 70: note = Ancestral polymorphism is P, Derived polymorphism is S
MSEGATATSPALETEVAPLPDNDDLHREIFLRLPPLPSSLTRASLICKRWRRLISDPAFLRRFHVHHRAPPLLGFFADEDGDIEFVPTLRRPDRTPGAAMANTLTELGKEDQTQRSQFG

SEQ ID NO: 15334 - protein, 66 aa, Zea mays
  VARIANT 19: note = Ancestral polymorphism is R, Derived polymorphism is T
MMLVVAVEEGYDVAEPPKRDDSPPVAACGGAPMEEGGGEVVDGEVLRLLLAPLGYCPLNCSFSVDA

SEQ ID NO: 15335 - protein, 474 aa, Zea mays
  VARIANT 299..474: note = Derived polymorphism lacks residues 299 to 474
  VARIANT 255: note = Ancestral polymorphism is C, Derived polymorphism is Y
  VARIANT 254: note = Ancestral polymorphism is Y, Derived polymorphism is C
  VARIANT 223..474: note = Derived polymorphism lacks residues 223 to 474
MEPRIGNRFRVGRKLGSGSFGEIYLGTNVQTNEEVAIKLENVKTKHPQLLYESKLYRILQGGTGIPNVKWFGVEGDYNVLVMDLLGPSLEDLFSFCNRKLSLKTVLMLADQMINRVEFFHSKSFLHRDIKPDNFLMGLGKRANQVYVIDFGLAKKYRDTSTHQHIPYRENKNLTGTARYASVNTHLGIEQSRRDDMESLGYVLMYFLRGSLPWQGLKAGNKKQKYEKISERKIATSTEALCRGYPTEFASYFHYCRSLRFEDAPDYQYLKRLFRDLFIREGFQFDYVFDWTILKYQQAQMTTAPPRAIAPAVGQSSGMAPVANNNRHSGTEEGRRSGWSDMDPMRRQAPPPVINAGSLAKQKSPVRPETSTSKDAVFSSSTFLGRSSGSSRRPAVSSSRELSTEAEQTRSRTTDASPGAFQRSGAPRWSPQMPDSSDGRRSSSSRRHSSNPKNYESTIRGMQGLNFDGDDRVHY

SEQ ID NO: 15336 - protein, 429 aa, Zea mays
  VARIANT 198: note = Ancestral polymorphism is D, Derived polymorphism is G
MDDLTVGGLALFAAVADFIDDSAPAMPQPAAASTAHEPEPEPGSPCSVASDCSSVATADFEGFADLGSALVLDDLVSSASTSASSASGPRAAAAAPARSVFALDCVPRWGLQSVCGRRPEMEDAARVLPTFFHVPLWMLAGDAPVDGLDRASFRLPAHFFGVYDGHGGLQVANYCRERIHEVLAEELTKAEEAASDADLGGLDPNTQKHWEKAFVGCFSRVDAEVGGDAATEAKPVAPDTVGSTAVVALVCSSHVIVANCGDSRAVLCRGKQPVALSVDHKPNREDEYARIEAQGGKVINWNGYRVLGVLAMSRSIGDRYLKPYIIPVPEVTIVARAKDDECLIIASDGLWDVMSNEEVCDAARKRILLWHKKNSDASSSAQRSGDSPDEAAQAAAEYLSKLALHKGSKDNITVIVVDLKSHRKIKSRA

SEQ ID NO: 15337 - protein, 388 aa, Zea mays
  VARIANT 194: note = Ancestral polymorphism is L, Derived polymorphism is R
  VARIANT 207: note = Ancestral polymorphism is L, Derived polymorphism is P
  VARIANT 225: note = Ancestral polymorphism is E, Derived polymorphism is K
  VARIANT 227: note = Ancestral polymorphism is D, Derived polymorphism is Y
  VARIANT 259: note = Ancestral polymorphism is S, Derived polymorphism is F
  VARIANT 292: note = Ancestral polymorphism is W, Derived polymorphism is C
  VARIANT 360..388: note = Derived polymorphism lacks residues 360 to 388
MALALRCPPAATSSRSPFLPSTSPAPAGKVPRRPPASWRCLAYYGDGGFRKNYDHIPKQFREENLKDGLMDNYKHVPQFLYGLSDAQMEMFMNDDNPYNRQSQKVTEESVSAARSYDEFGMYTLSGMHEGPASYSMGMGMGGSMSMSMGRGGRGYRRMRSSAPDLPSLLLDSRIIFLGMPIVPAVTELIAAQFLWLDYDDRTKPIYLYINSTGTMDENNELVASETDAYAIADFINRSKSKVYTINLSMAYGQAAMLLSLGVKGKRGVLPNSITKLHLPKVHKSGGAAIDMWIKAKELDTNTDYYLELLSKGVGKPKEELAEFLRGPRYFRAQEALDYGLADTILHSLDGSFKPKDLTAQLAKAQAMRQSGKRAAAGAGRWSTPTAPR

SEQ ID NO: 15338 - protein, 305 aa, Zea mays
  VARIANT 80: note = Ancestral polymorphism is S, Derived polymorphism is Y
MATAGSKQGGGSSKPPAAAGQELDPRYEWEENASSFILRIHLSEGFRKQDFRVQVDGAGRLTVRGQRSDAAAANANARHSRFNKVFQLPSTSNLDDIAGRFDLGVLTLTVPKRLPAPAKEDQQQAKKPEDADADAAAATKQVAGAKGAKSEPEQQHKEAAAKEDKPKAAAAAAAPAPAADTTAKEDKPKAAAAAPAPAADTKKQPETQANAESKATDPTESLAERRTEEERANANAAAAAEHQRKACRGFKERVAEELQGLAGSEWAEGLVETVKRNREVIAVAVAAFSLGVFVSSRLFSRSSRN

SEQ ID NO: 15339 - protein, 71 aa, Zea mays
  VARIANT 38: note = Ancestral polymorphism is L, Derived polymorphism is F
  VARIANT 37..71: note = Derived polymorphism lacks residues 37 to 71
  VARIANT 9: note = Ancestral polymorphism is D, Derived polymorphism is G
MPHKINPIDFENSDGNLGQVNSILSGISMKLPISRLQLDLTDLTVLRNLGMGLGHSLLAYKGTMRGISKVQ

SEQ ID NO: 15340 - protein, 288 aa, Zea mays
  VARIANT 34: note = Ancestral polymorphism is D, Derived polymorphism is N
  VARIANT 139: note = Ancestral polymorphism is G, Derived polymorphism is A
MRWYANAKEVGGGGGGAGTVVLAHGYGANQTLWDKLLPALSQHHRVILFDWDFTGEREEAAERYTFGRFADDLIALMDDKGVRGAVVVGHSMSAMVACIASARRPDLFAHLVLLCASPRYLDSPSEGYVGGFDRASIDAMLAAMESDLGAWVRGFVPNAAGADPSATAELEQSFLSMHPRVALEVARMIFLCDQRGALDAVAAPCTVVQVSDDFAAAPAVAEYMRGRMKRAAEVEVVVIDSVGHFPQLVAPQQLLAVLKRVLQRAAAANEERAAAAEEEADGGIDVTA

SEQ ID NO: 15341 - protein, 578 aa, Zea mays
  VARIANT 348: note = Ancestral polymorphism is L, Derived polymorphism is F
MAAIHLRPLRSVAVSSARYRSLLHLLARPLSSSQSSHAYHPFPTPAAAAPNHVHHHHPTHHSQQQSAPPRNPPPLGPSPQWSPQPPPPRGYGPPPPQHPHVPPPPPRGYGPLSPGQHLPPSPHGYGPPLPPPPPPHGHGPPPPGQHVVPPLPPSHGHRPPPSCQHVPPPPPSHGHGPPPPGQYVPSALPRDHGPPPPHQQAPPPPPPPEPVAGPGELMGLCREGRVKDAVELLDKGACADPAAFYELAAACSNPKLLEELRKVHDFFLRSPFRGDLRVNNKLLKMYAKCAAMPHARRTFDNMPDRDMDSWHIVIDGYSVNGLGDEALRLFELMKECMSPTSHTYLLVLNACANSEAIEEALLYFDAMHRDHGIEPGVEHYVGIIEVLGKSGHLNEALEFIEKLPFEPNAMVWESLLNLARMNGDIDLEDRAEELLVSLDPSKSNHKKLPTPPPKRRLGINMLDGRNKLVEYRLPPKIEKKVVNEQRYVPDTRYVLHDIDQEAKEQALLYHSERLAIAYGLISTPARTPLRIIKNLRICGDCHNAIKIMSRIVGRELIVRDNKRFHHFKDGKCSCGDYW

SEQ ID NO: 15342 - protein, 565 aa, Zea mays
  VARIANT 213: note = Ancestral polymorphism is R, Derived polymorphism is W
  VARIANT 48: note = Ancestral polymorphism is E, Derived polymorphism is K
  VARIANT 4..565: note = Derived polymorphism lacks residues 4 to 565
MLACRCCCYRLGGDYSVLCSNDARNDDGTPRQCAWLITMNGGRAISSESLAALAWHFLLRRRSRDGATALASSSGVLQIAEDKSSAANLTKHKVSAERKLLNDALDRTGVRYETESWMDEETSSWMDRDLTDSDLRYRLLMQNLEELETSLVGKDLEMDILEQLGALGSFNASVARGVSALHGRPDGSLLDDPEPETTPLDAGQEDSQVVVVRSGKSQERKLRRMRASSDEKGSRTSVKVNPPRRPKKSRKASSSQFISEWKSHPGQRRIIVREQSALLSTIKECAGLEKIREKMVKEGQEVSYHRWAEAAGVDEAELVSRLQAGYCCRDRLLVTTEWLVRCIARTYTGMGTALDDLLQAGKMGVLDGAEKFDSRKGCRFSTYVKYWIRKGMLALLAENSGVTLLPARMESIMRKVKEARRGIRYRQGRNPSDSEVAAAVGVSVANVRLARKCSRRAVSLYSEVAIGQDVKFAEVIPDESASPDEAALFRGQLRERLLLVLGRLPAREGRVLRLRHGLEDGRCRSLEEIGGIYGVSKEWIRKIEKSAMARLRDDDAVRRDLHDFV

SEQ ID NO: 15343 - protein, 347 aa, Zea mays
  VARIANT 287: note = Ancestral polymorphism is R, Derived polymorphism is C
  VARIANT 255..347: note = Derived polymorphism lacks residues 255 to 347
  VARIANT 137: note = Ancestral polymorphism is L, Derived polymorphism is H
MAGSAADAEQEQKRAAAAAYDYEGDARWAEYWSNVLVPPNLASRPDVVDHLKRKFYQRYIDHDLVVEPRSFTSSTQASRPDVRSSSSSSTENVRERNSGSTARSAPPPPPPTHTDSAVNPLRFDARTIHFSINAWILVVAGLGMLPILPKHLADRACKLSLLGTILSSGYSLYSTYGKPRAWNMPAIQAWLQSILATKDFIHLMFSSMLFTSQLHLKIAALPVFCWALDHVARFLRRNFARSSFYRRYLEEPCLWVETNNTTLSLLSSNAEIALGFLLIISLFSWRRSIVQTFMYWQVLKLMYHAPVTSSYHQSTWAKIGRIVNPYIHRYAPFLQTPISAIQRWWFR

SEQ ID NO: 15344 - protein, 468 aa, Zea mays
  VARIANT 152: note = Ancestral polymorphism is T, Derived polymorphism is I
MASYDKAFESYKKALTTAASVAASMMLVRSVVNELVPPELRDLVFSGFGYLRSRTSSDHTIIVEKKNDGFANNYVYCAVKTYLATRMNTDIQQRLRVSSMDEDDKMMVSMDEGDEMLDVYQGTEFKWCLVCKDNSNDSLNSSQNESHFFELTFNKKHKDKALRSYLPFILATAKAIKAQERTLMIHMTEYGNWSPIELHHPSTFDTLAMDKKLKQSIIDDLDRFMKRKDYYRKIGKAWKRGYLLYGPPGTGKSSLIAAMANHLRFDIYDLELTAVTSNSDLRRLLVNMDNRSILVIEDIDCTIELKQRQEAEGHDESDSTEQNKGEGKVTLSGLLNFVDGLWSTSGEERIIVFTTNYKERLDPALLRPGRMDMHIHMGYCTPESFQILANNYHSIEYHDTYPEIEKLIKEVTVTPAEVAEVLMRNDDTDVVLHDLVDFLKSKIKDANEIKTEHKEADNQLDEKKNDKK

SEQ ID NO: 15345 - protein, 654 aa, Zea mays
  VARIANT 360: note = Ancestral polymorphism is L, Derived polymorphism is F
  VARIANT 6: note = Ancestral polymorphism is P, Derived polymorphism is R
MDSRAPALLLLLLLALTLSLAATAGADPPERERSALRAFLSGTPHERPLQWNASLPTCYWTGVRCDSPANATVTELHLPGVGLVGAVPTGTLSGLQNLQVLSLRDNRLAGPVPPDVLALPRLRALYLQGNLLSGAVPPELATGALPELEHLALSRNQLSGPIPDALLVGLPRLRSLKLDANRLSGGLPAGTGSGARLEAFNVSFNDLQGPIPANLARFPPESFQGNPGLCGKPLVDRPCAVPSTGATKKRKLSGAAVVAIAVGCGAAALLVVVLLLSLCAVRRRRQHSAAAEEAKATPPTRGLTASGGDFTSSSKDISAAAGSAERGRLVFVGKHAHLRYSFDLEDLLRASAEVLGKGGLGTSYKAVLEDGATVVVKRLRDVAAARREFGACVEAAAGAAEGHRNLVPLRGYYYSKDEKLLVLDYLPGGSLSARLHGSRGTGRTAMDWDARVRAALCAARGVAHLHTAHGLAHGDVKSSNLLLRPDPDAAALSDYCLQQIFPPAPARPGGYRAPELADARRPTLWSDVYALGVLLLELLTGRSPAHHAASGSGLDDGGAMDLPRWVQSVVREEWTAEVFDAELARAGGGAAEDEMVALLQVAMACVSTAPDARPGAPDVVRMVQEVISGRTTTEENERIRGAEEEAERSRGPTP

SEQ ID NO: 15346 - protein, 499 aa, Zea mays
  VARIANT 227..499: note = Derived polymorphism lacks residues 227 to 499
MVYDGAVKDQDQETVAASTASAASVVAVSEASPAPVVVVVSARPSARPPHDKRLGVRHPLKHRWFRAGGKMMMEPGGVLPAHAHEEEEEGASEVEEEELVEAEASSAETVTWGAEVEVSSAPAAGVQEMNAEVEGGEMEVSPEPAVAVGGTELEPQQDDEDEVSSVVLARGERKQEAAPASAVLAVEAPMEMGQDEERAEKEKRGKERERQKERERVDEVGYMSGGWKSVDGTLNCGYSSFRGRRASMEDFYDIKASKIDDKQINLFGIFDGHGGSRAAEYLKEHLFENLMKHPEFMTNTKLALSETYRKTDSEFLDAERNTHRDDGSTASTAVMVADHLYVANVGDSRAVISKAGKAIALSEDHKPNRSDERNRIESAGGIVMWAGTWRVGGVLAMSRAFGNRLLKQFVIADPEIQEQEINEELEFLIIASDGLWDVVSNEDAVTLVKMEEEPEAAARKLTETAFSRGSGDNITCIVVKFQHDKPRSGGGDSPSSPRL

SEQ ID NO: 15347 - protein, 1437 aa, Zea mays
  VARIANT 295..1437: note = Derived polymorphism lacks residues 295 to 1437
  VARIANT 262..1437: note = Derived polymorphism lacks residues 262 to 1437
  VARIANT 74..1437: note = Derived polymorphism lacks residues 74 to 1437
MPEFGCSPDWLTYSAVIDTYIHTGNFEAALCRARAEKWQLDPVLCCTVNKVHSTSGNFNGALNVFEEMKATGVKPNLVMCNTMLDVMGHVLQPWVVKTIHREMVNKQVQPSRTAYYCLLHAYTRALTGEDAMAVYQLMKDEAMGVMLYNMLLSMYADIGYVDKAEEIFRDLSVPMDDHSKPDKWRYSSMVMQYSSTANVLGVEVILNEMVEAGLKPNIFVWTSLSRCYGKAGRTDDVVSQIGCILLEDAAARIVDEYQPPLQLSPDPASSSPATKATYHLNEQADFRKDTVELVQIRFEEMPSASVRGKDALLHELHTCVCDDDVGAVDIYGMARVGKTAFLKAATEGGNAFKSGLIAKTNRGILYVYEVNLLDNHLVDVLLDSAAPGWNMVDRKGIFISYHAHFILIPLEIFHVCGMIRPMPWPSFTSMINCCMNLNALFVWKPPWLLQRYIRASVTLHELLTWLGYELIEALAQQKSGEKCGPLVLKKYELEIIEGGLNVIPSSPVYFVLSRSRAGRGAASVGVVVGRLPRPSTRMTSPASIVIFCAPYRVFEAADSKSNPLAFFSISPPMTAQAISLSLPTPPTHHHHHAKPPPPPRLLLKASSLPEALRGVETFRDGRLLVSLLRQCADVPHGDEDTERLSAARHLAPQLHSLAVRAGRARDPRVACALADLLARLGRWASARRLLQEATAAEEEGKEEGDEEVDTMLWNKRVAMLAEAEEWGDAIAAFAEMRARGVAPDGYACARALHACGRAGAPREGQAVHAHAAKAGHVAAHPLVPGFLAGMYAESADVGAARRVLETEDAPPVAWNVVVACCARLGLVDDALDLAERMARSGPVEASPSLATWNAVLSGCARHGRDREAFGVVRSMLERGIPPDSSSMSSLLKSVASLGLLAHGMEAHCFFLRHRLEPDVYTGTAFVDMYAKCGRLEYAQKVFDTLELRNITTWNSLVAGYSNAGQFDHALDLVEEMKRNRLDPDITTWNGLISGYSMNGRSSQAVLLLRQMKAIGLTPNVVSWTSLISGSCHNGDYEDSFYFFNEMQKDHVQPSVVTMSVLLRACAGLALLAKGKELHCFALRRRAYDRDMVVATALIDMYSKSGNLASATRIFERIQEEKNLVSWNAMLTGLAAHGQGREAIALFDDMCSASAGAGAGLKPDSITFTALLTACRSMELITEGWDYFDAMESRYGVTPTVENYACMVDLLARCGYLDEATDFINRSPFKSAASLWGALLTGCVVHGNLALAEAAARKLFKLEPYNSANYLQMVSLYEREQMFDEAESLKYAMKARALNTRPGWSWIQIEQSIHVFQVEGKPPHPDTAEIYQQLVRLVLQIRKAGYVADTSCIAYNVPEEDKEKLLLSHTEKLAITYGLIHSDASGTPIRVIKNTRMCSDCHEVAKHISALCGRQIILRDADRFHHFTDGKCSCNDRW

SEQ ID NO: 15348 - protein, 862 aa, Zea mays
  VARIANT 822: note = Ancestral polymorphism is R, Derived polymorphism is L
  VARIANT 642..862: note = Derived polymorphism lacks residues 642 to 862
  VARIANT 591..862: note = Derived polymorphism lacks residues 591 to 862
  VARIANT 495..862: note = Derived polymorphism lacks residues 495 to 862
  VARIANT 415..862: note = Derived polymorphism lacks residues 415 to 862
  VARIANT 352: note = Ancestral polymorphism is P, Derived polymorphism is L
  VARIANT 68..862: note = Derived polymorphism lacks residues 68 to 862
MGSVDLIASCIDSIRQIGDEIADSIVYIDEGTLEAFQFIGGFPLLLELGARAVCSLENASPLDAAADWQSSFSNPPRKIIVLISRLLSDAHRYILRCLSNHGTVSHCTVLTAISEIGHSAYVDSPLGPDAFREYETLLIQDHDELLKKSENLDRHKENIHKEASDFTSDVDNYSKWGSGVHYGSNSESSPTKRDFFDDEMGQVEARGRRLFVAVRHFPMIFSPISSRVFVLPSEGIIADSSLSNHHEDSLGSGLPSISTDKPFDSDEVPPGVTLTAQFLYHLANKMDLKLDIFSLGDTSKVIGKLMMDMSSLYDVGRNKRSAGLLIVDRTVDLLTPCFHGDSFLDRMLSLLPRKENMPSNSAAKNPQTRSKHSQGTIKRSPLDIKVPFETVFSKEESKIRSSMLSEGFMSFASGWNSVDVDSEVSWLPDYADKAHDHKLSCELDTISGSFLPNCARMRYLEALLDRGSKDGLVLIKKWLIEALQHGKLTSASKGWQGATSVSEIRSMVQMLSRDQLSLLKNRGVIQLALAAEMTLREPQSSRWDAFTSAERILSVTSAETPQSLASELRDFINTSTLVESHTQTTSMESSQGLLSFQDVLLLTIIGYILAGENFPTSMAGGPFSWEDERSLKDVIVDSILERPSSVKLRFLDGLDSELEAKARSKDGERNKNSSEVAPSTDDDFDDEWGTWDDSDNTDHQKEEAYGDMQLKLEVRDRVDQLFKFFHKLSSMRLRNQALGEGIAALSRFETDGYSRKCLLYKLLLALLSRYDVPGLEYHSSTVGRLFKSGLGRFGLGQSKPAFGDQSVLIIFVLGGINTLEVREVMTAISESSRPDVELILGGTTLLTPDDMFELMLGSSSFA

SEQ ID NO: 15349 - protein, 292 aa, Zea mays
  VARIANT 68: note = Ancestral polymorphism is P, Derived polymorphism is R
  VARIANT 82: note = Ancestral polymorphism is Q, Derived polymorphism is L
  VARIANT 104: note = Ancestral polymorphism is C, Derived polymorphism is R
  VARIANT 138: note = Ancestral polymorphism is I, Derived polymorphism is T
  VARIANT 163: note = Ancestral polymorphism is G, Derived polymorphism is R
  VARIANT 164: note = Ancestral polymorphism is A, Derived polymorphism is T
  VARIANT 173: note = Ancestral polymorphism is G, Derived polymorphism is V
  VARIANT 233: note = Ancestral polymorphism is R, Derived polymorphism is W
METTSCFLASKASSASRSTAVLPPTAPGFAKPKPYLQLLGSSRRRACCGSISARGAPEDGAAPPPIGPDWRSFRAQLYFKEQLPAVQTGGDRWAHPLAEPEKGCLLIATEKLDGSHIFERTVILLLSSPSSLGPVGVILNRPSLMSIKEASGSIFADDADIARAFAGRPLFFGGPLEECFFVIGPRAAAGGGGDDAVARTGLFEEVMPGLHYGTRETVGCAAELAKRGVVGVRDFRFFDGFCGWEREQLRDEVRAGLWHVAACSAAVLELATVVKGGLWEEVQGLVGERRLW

SEQ ID NO: 15350 - protein, 100 aa, Zea mays
  VARIANT 7: note = Ancestral polymorphism is V, Derived polymorphism is M
  VARIANT 8: note = Ancestral polymorphism is G, Derived polymorphism is D
  VARIANT 19: note = Ancestral polymorphism is I, Derived polymorphism is T
  VARIANT 23: note = Ancestral polymorphism is A, Derived polymorphism is V
  VARIANT 26: note = Ancestral polymorphism is A, Derived polymorphism is T
  VARIANT 30: note = Ancestral polymorphism is R, Derived polymorphism is S
  VARIANT 38: note = Ancestral polymorphism is H, Derived polymorphism is N
  VARIANT 52: note = Ancestral polymorphism is V, Derived polymorphism is I
  VARIANT 55: note = Ancestral polymorphism is G, Derived polymorphism is E
MASEDVVGKSRGDTAVTTIVNLAEEAKLAREGVKAPGHQILTICKSLVAGGVAGGVFKIRTASSTMVLFRVSSISGEQRASVDFSRAMVPIVQGLFQILP

SEQ ID NO: 15351 - protein, 185 aa, Zea mays
  VARIANT 8: note = Ancestral polymorphism is L, Derived polymorphism is Q
  VARIANT 99: note = Ancestral polymorphism is S, Derived polymorphism is F
  VARIANT 144: note = Ancestral polymorphism is V, Derived polymorphism is A
  VARIANT 145: note = Ancestral polymorphism is T, Derived polymorphism is I
  VARIANT 179..185: note = Derived polymorphism lacks residues 179 to 185
MIYLCASLLTVPHSITKKWHYLGIVFPNSGVWNSWSKGPAHGHLQRKTQAASTRSCTKILDEMMDNGFPLTTEPNILKEMITPPNIVNKMLNVVTGKSSTLGSKLPDAAASFVPWRRTTVKDASNEVYVNIVEELDAYVNRTLATVIGQMFLEDLIKEYEVVLKGPFNYTARDEAGIPREWFMID

SEQ ID NO: 15352 - protein, 167 aa, Zea mays
  VARIANT 14: note = Ancestral polymorphism is E, Derived polymorphism is K
  VARIANT 83..167: note = Derived polymorphism lacks residues 83 to 167
  VARIANT 115..167: note = Derived polymorphism lacks residues 115 to 167
MEISTKVRPPKLREVIQVPKKVGRDPRFEPVYGSIDKEGCKLDEFLKLIDLVGMQRLQKMIKKSKDLDAIGEMKSRVTWIDKQLKSHPPKNVESEILCEHIKKERETAKAGKRPYYLKKPELRERKLMNKYNELKEAGKLDAFMEKRRRKNASKDHRFMPYRRSGDA

SEQ ID NO: 15353 - protein, 208 aa, Zea mays
  VARIANT 185: note = Ancestral polymorphism is Q, Derived polymorphism is R
MWKPQPIVPPYGTPPPPPYVMYPPRIVYAHPSTPPAMHPFGHYPMPTNGHAETHGAAPSAPEMNGVSFPSESGSESESEGSDDNSQNDSHSKDNDGKEDGDSQNDISYSASQGVVNQTMAMLPMQPGAMVGGVPSSTAANLNIRVDYWAAPGSAAVPAAHGKAPAGSTRGDQWDERELKKQKRKQSNRESARRSRLRKQVLCNPRAEC

SEQ ID NO: 15354 - protein, 209 aa, Zea mays
  VARIANT 172: note = Ancestral polymorphism is P, Derived polymorphism is L
  VARIANT 162: note = Ancestral polymorphism is D, Derived polymorphism is H
  VARIANT 155: note = Ancestral polymorphism is G, Derived polymorphism is R
  VARIANT 7: note = Ancestral polymorphism is V, Derived polymorphism is I
MLIEMSVSACAAMVTLTKSISWRTVVKSQDVNGIGVVIYQKLVSNSCYAERKTNEPPLCSERDGSRFPWYAPLDSCLFTTDITTSDERYNWPDPWPERLDVSYASVPDDSASNKEKFEADTKYWKQLISEVYFSDFPFNWSSIRNVMDMNAGFGGFAAALIDQPLWVMNAVPIGQPDTLPLIFNRGLIGALMTGANLSTPTLVPMIFST

SEQ ID NO: 15355 - protein, 99 aa, Zea mays
  VARIANT 68: note = Ancestral polymorphism is P, Derived polymorphism is L
  VARIANT 41: note = Ancestral polymorphism is D, Derived polymorphism is Y
MPTIQWGRRTRTVLDVGCGVASFGGYLLDRNAITMSFAPKDEHEAQIQFALERGIPAFIAVIGTQKLLFPDNVFDVVHCARCRVHWYANGKYSISSQYS

SEQ ID NO: 15356 - protein, 256 aa, Zea mays
  VARIANT 11: note = Ancestral polymorphism is L, Derived polymorphism is M
MAPSSSIAVLLLLVVAVVLSNVPSSGALASSSSSLLHQSSPSESETETDSSSGESTSSSSSEEAGEKEKEKEQEMEKAVAAEKAAQQELLKYAKEKGIVSPTNGTGWYKGIAREFVDAHNELRARYGVPPMKWDRKLARQARRWSNRMRKDCELVHSGHKYGESLFRSHDDWNATAKEAVFWWGKEESIYDRDTEQCTGGRAYKECGHFALMVGKRSTKVGCARAECFKGGVFITCNYYATDLKKKNKKKKKSTTN

SEQ ID NO: 15357 - protein, 188 aa, Zea mays
  VARIANT 56: note = Ancestral polymorphism is Y, Derived polymorphism is C
  VARIANT 33: note = Ancestral polymorphism is L, Derived polymorphism is P
  VARIANT 26: note = Ancestral polymorphism is T, Derived polymorphism is I
MGVPHHPTGNLNRITHMKSSIEFYCTVVMAMWLGKSFSMKHEQKLDHGGDYVKLHYICGYITKKVHTILTKDGKNHLIKKDVPCETDQLTHVYTLIICPDATYFSLIMKRCKMTTSMSTGIFSPPPKQIKDPEAKKGYDDIPKEIRDPDANKPEDWDNEGDDFKDDPYIYAFDSLKYIGIEMWQIGVG

SEQ ID NO: 15358 - protein, 293 aa, Zea mays
  VARIANT 269..293: note = Derived polymorphism lacks residues 269 to 293
  VARIANT 251: note = Ancestral polymorphism is S, Derived polymorphism is C
  VARIANT 235: note = Ancestral polymorphism is V, Derived polymorphism is E
  VARIANT 228: note = Ancestral polymorphism is Q, Derived polymorphism is H
  VARIANT 217..293: note = Derived polymorphism lacks residues 217 to 293
  VARIANT 202: note = Ancestral polymorphism is S, Derived polymorphism is F
  VARIANT 191: note = Ancestral polymorphism is G, Derived polymorphism is D
  VARIANT 175: note = Ancestral polymorphism is A, Derived polymorphism is T
  VARIANT 168: note = Ancestral polymorphism is S, Derived polymorphism is F
  VARIANT 149: note = Ancestral polymorphism is D, Derived polymorphism is G
  VARIANT 132: note = Ancestral polymorphism is D, Derived polymorphism is V
  VARIANT 119: note = Ancestral polymorphism is R, Derived polymorphism is M
  VARIANT 116: note = Ancestral polymorphism is S, Derived polymorphism is L
  VARIANT 96: note = Ancestral polymorphism is A, Derived polymorphism is V
  VARIANT 21: note = Ancestral polymorphism is R, Derived polymorphism is G
  VARIANT 1: note = Ancestral polymorphism is V, Derived polymorphism is M
MVFADASWASDGERHPRCCRRQLRHEQSDTMAVEEGGQLAACKQWWCPGSICLYAKNFKPAQNATDRSDEVNEALFIEIAMEMFTALEFVKQLGEALHSVNSKSSSHHLELIYVILAPRMQKLNNQDFGPKDLMHLADTVDGVFLMTYDFSGPQNPGPSAPLKWIHHSLAALLSAKGSSHSNSHSRMIFLGINFYGNDFLLSGEILIQPSNSVNHKWLLINGVLSFFQVLLPNCVFLVRGNHESFNMMGLCSNKEQDIGLLWGPDITQQFMRANHLKVHFVSFITLPIIFQIV

SEQ ID NO: 15359 - protein, 237 aa, Zea mays
  VARIANT 12: note = Ancestral polymorphism is A, Derived polymorphism is T
  VARIANT 39: note = Ancestral polymorphism is A, Derived polymorphism is T
  VARIANT 127: note = Ancestral polymorphism is S, Derived polymorphism is F
  VARIANT 129..237: note = Derived polymorphism lacks residues 129 to 237
  VARIANT 156: note = Ancestral polymorphism is V, Derived polymorphism is E
  VARIANT 164: note = Ancestral polymorphism is E, Derived polymorphism is D
  VARIANT 207..237: note = Derived polymorphism lacks residues 207 to 237
MSGSASRKLFQAARSIVLSASQRSSFSVLAAEGRTAALANFGRKILPSACSYHRQGSHAASGWGAIAAAVPAAVYMLQDQEAHAAEMERTFIAIKPDGVQRGLISEIVNRFERKGYKLVAIKLIVPSKGFAEKHYHDLKERPFFNGLCDFLSSGPVLAMVWEGEGVIKYGRKLIGATDPQKSEPGTIRGDLGVVVGRNIIHGSDGPETAKDEIALWFEPKELVSYTSNAEKWVYGVN

SEQ ID NO: 15360 - protein, 264 aa, Zea mays
  VARIANT 247: note = Ancestral polymorphism is G, Derived polymorphism is R
  VARIANT 116: note = Ancestral polymorphism is P, Derived polymorphism is H
  VARIANT 92..264: note = Derived polymorphism lacks residues 92 to 264
  VARIANT 88..264: note = Derived polymorphism lacks residues 88 to 264
MYADALASSQPPPPPFLSMGVMDHEAYAAVPSMVSEYDLGGEGDLFKAPQVIIQEEALLSLDPVAAACSMMNQTIKDAGIQNDALLSEVLYECEKELMEKSAIEETISELMDVKIPMLQAEQLPAMENEKRSIPECSLQKSVSSGCLNSADWMNGAVRPNFLDFQGLDFEAAFGLRRAYSEGDIQNLGANTPRPAANVCVTISDLKTEERKQKLSRYRKKKIKRNFGRKIKYACRKALADSQPRVRGRFAKIEECDLLLLNSST

SEQ ID NO: 15361 - protein, 493 aa, Zea mays
  VARIANT 40: note = Ancestral polymorphism is S, Derived polymorphism is T
MSPFANSRSLLHHHKQQAAAEEAAAAAAAAAAAARGEESSDTMRRWFAVAADLSRALHGFLVFEVSWRDVHGINYLNELLSDTSLALEARYMKKWEFYSAEQAAGCTHLWFLGRASEARALRGYLSALHTHSDPSEQLEECSSALRRTCSSSSLTAVSEDEDEDDDELDGRSADGILMSSPSPTRSRSSSSRWARAAAAAEVPFVAPAQYSDTLILFRFRDSQLPLKLRQIIMSDIRLLTLLESGLPSWVIFFQSYPVLCQLYRPWMRPLARSLYLLASLVTVLIGFYDLYKNVPLLKSAAARICGPLFGWIETWDMVTRIQYLGTILFLRNLRKCLQSLVALLRAARAVVRTVAAPVAEAAGPLVASCGEVWDLVGEGLLAPAWALAVDLAEVVWAPFDLVLDSVGGCLWPLLQVALLPVRGAAALAGCAGSLLSATYNFGKDIWETMSSIFELNHMSEAQQSAFDMSQIKTLWNDLFSQDDDAVAECDRCK

SEQ ID NO: 15362 - protein, 116 aa, Zea mays
  VARIANT 31: note = Ancestral polymorphism is T, Derived polymorphism is I
MTSSLSSGSSALASGLHGAPSSTTAQGGGQTAGEVSLLLGAADNVFKQEGETAYLASKRNIKQRLVAFYMYHPESPFEFPDKTSIASSKFCSIYEPKLKPIFLDSVLLPFHCNRVC

SEQ ID NO: 15363 - protein, 282 aa, Zea mays
  VARIANT 113: note = Ancestral polymorphism is D, Derived polymorphism is Y
  VARIANT 90..282: note = Derived polymorphism lacks residues 90 to 282
  VARIANT 82: note = Ancestral polymorphism is K, Derived polymorphism is N
  VARIANT 65: note = Ancestral polymorphism is W, Derived polymorphism is C
MHRGGKGVAGRTKGPSAPFRGGGAPFGTDVPFGPPGPDMLPTFVNWSTYGAVTPIQDQGDCGSCWAFGVTGLIEAAHFIQNKELIKLSKQHLIDGNNLRNFGCKHGSCSEALDYIMRNGGIINAESYPYKEAQGPVRSITAPGVKIVDYHLILNGSERMLKWAVAKSPVLVTIGADDSFLIEKKVVLDGPAYTLDDTEDQGIAHAVLVIGYGETDLGQKVWLVKSSHDGEMFLCVARDTGKIGGAFGITRRIIQVEVAGRVDVTVKSDEEMGVTLRTDFWSI

SEQ ID NO: 15364 - protein, 153 aa, Zea mays
  VARIANT 5: note = Ancestral polymorphism is G, Derived polymorphism is R
  VARIANT 18..153: note = Derived polymorphism lacks residues 18 to 153
  VARIANT 20: note = Ancestral polymorphism is P, Derived polymorphism is H
  VARIANT 25: note = Ancestral polymorphism is T, Derived polymorphism is A
  VARIANT 149: note = Ancestral polymorphism is D, Derived polymorphism is Y
MRNGGIINAESYPYKEAQGPVRSITAPGVKIVDYHLILNGSERMLKWAVFKSPVLVVLDRPAYTLDDTEDQGIAHAVLVIGYGETDLGQKVWLVKSSHDGKMFLCVARDTGKIGGAFGITRRIIQVEVAGRVDVTVKSDEEMGVTLRTDFWSI

SEQ ID NO: 15365 - protein, 116 aa, Zea mays; identical to SEQ ID NO: 15362
  VARIANT 53: note = Ancestral polymorphism is A, Derived polymorphism is T

SEQ ID NO: 15366 - protein, 297 aa, Zea mays
  VARIANT 19..297: note = Derived polymorphism lacks residues 19 to 297
  VARIANT 30: note = Ancestral polymorphism is K, Derived polymorphism is N
  VARIANT 32: note = Ancestral polymorphism is A, Derived polymorphism is V
  VARIANT 65: note = Ancestral polymorphism is K, Derived polymorphism is N
  VARIANT 149: note = Ancestral polymorphism is P, Derived polymorphism is R
  VARIANT 152: note = Ancestral polymorphism is S, Derived polymorphism is N
  VARIANT 178: note = Ancestral polymorphism is L, Derived polymorphism is S
  VARIANT 188: note = Ancestral polymorphism is P, Derived polymorphism is S
  VARIANT 232: note = Ancestral polymorphism is G, Derived polymorphism is E
MPLPVHGPACNSSGHLIGWHTFNSLPFSGKTATVVGEAAPVLPRDLEWAGFVLNSRMLWKEADDKPDWVKDLDAVGENGEEIENPLTLLNDPSSVEPLGNCGKNVLLWWLRVEALLIASFLKVGLAIPVCLRPSLRCCTTCSHPYVHTPDSNRYWIANSYEYRFISGLEPENVDKEFLRLWFKNNCNPYEDTVYFLHTVVRITCHPKIIHRDIKASNILLDFKFEANVADFGLAKFTTDNNTHVSTRVMGTFGYLAPEYAASGKLTENPMYFLSESCFLSLLLGGDQLSQPNWHCLL

SEQ ID NO: 15367 - protein, 366 aa, Zea mays
  VARIANT 78: note = Ancestral polymorphism is L, Derived polymorphism is S
MDAGDDEPPVLLDRAARASRGKRITKLLEDEVEQDEAFWNQEALKDEENDDNYVEEPDAGDEFDSDFGEDISSCERLLLIPLPCPSQLSNRLPIKKRLMFPGKTLRKTNVKKKKATPKPEDGTKADKSADKPSSSTQADLPDELEAEKAIRKSTRTSVIVRQAEREAIRAEKEATAKPIKRKKEGEEKRMTQEEMLLEAAETEIMNMRNLERVLAREEEVKKKAVVHKDTYEGPTIRFFSRDGESRLEFINGASFGSELCTTSSPYPEKPVCVVTGLPAKYRDPKTGLPYATMEAFKIIRESFLKEEADRKRPNMSNMGELFESITGGHLMPKKRRVEIRSPNMLGGSRHGGRTWRIPAFDMVDED

SEQ ID NO: 15368 - protein, 546 aa, Zea mays
  VARIANT 263: note = Ancestral polymorphism is M, Derived polymorphism is K
MAYVQHGHGHDHEDGVVLQAKSPPAVVALVLSALLVCPLLVLLVVRRRRFGTKEVLLSKLPSPPSRLPIIGHLHLVGPLPHVSLRDLSSKHGRDGLMLLHLGAVPTLIVSSPSAAQAVLRTQDHVFASRAYSPVTDILFYGSTDIAFSPYGEHWRQVKKIATTHLLTNRKVRCYRHARENEVRLVMSKIREAATAGAAFDLSEQLNSFANDIVCHAVSGKFFREEGRNKLFRELVEANSSLIGGFNLEDYFPVLVKLDMVKRMVCARARRVNKMWDELLDTLIDDHARKKPSSSERDADADADADGEEESDFIHVLLSLQQEYNLTRDQIKAQLVVMFEAGTDTSFIVLEYAMVQLMRNPHLMSKLQAEVRSTIINKGTEIVTEDELHSLPYLKAVVKETLRLHMPAPLLVPHLSMADCTIQGYTIPSGTRTIVNSWALARDPSCWERAEEFMPERFMEGGSAAAMDSNKGNDFQYIPFGAGRRMCPGISFATAAIHLMLANLVYHFDWELPAESASKGIDMTESFGVTVHRTEKLLLVPVLAQQD

SEQ ID NO: 15369 - protein, 454 aa, Zea mays
  VARIANT 218: note = Ancestral polymorphism is I, Derived polymorphism is S
  VARIANT 117..454: note = Derived polymorphism lacks residues 117 to 454
MSWADLPLDVLVDGVIARLPIPGDRARLAAVCRAWRAAAREVVSHIQLPWIVLPYGTVCTAGRGAACSSFRIPGFPDEATCLGAAHDGWLALDRTDDVVGRTSWFRTTWPVVVGDTWKHVMLGKSDVNHKHAYALHNPFSDVTVPLPELDAVIGRVAETFRVRKVLMRSPAPDDLVAVMTNSWNCNVILCRAGKGTFVLPYYRIVDVAFLGEDTLYGITTGEELLAFHLGEDDDGRPNVARIELVIKNTLANYYYDEFGWLWPAEVASTSSNNDEDMDMDDDDYMEEDDPAVVDDGDDDQADSFNGDEMVSDSEVFDGYGDGEDLQVKDELYLGRYLVRSLSGELLLVRHQWQSCPRSPSYTRKVEFFKADFSAGKWAAAGGLAKGEAIFLSPSHSKCVRASGGVREGFVYYTKQMDDVFDTRSGTVRAAITAGWPELCALEKSGWFFPPELVV

SEQ ID NO: 15370 - protein, 225 aa, Zea mays
  VARIANT 99: note = Ancestral polymorphism is G, Derived polymorphism is R
  VARIANT 120: note = Ancestral polymorphism is H, Derived polymorphism is P
  VARIANT 141: note = Ancestral polymorphism is S, Derived polymorphism is I
MWKTTGKRSTWGTADGDRLEQRLGADKVKVLEQAFMEEADNALPHPMEDAYLEACHTNNMEWKMCIYGADCSEISLVQVRGSGLDVKPGSTVKCEPGYRFMLHLSQKLAIGTLSVDKNPPIQFDLVFDKEFELSHTSKTTIVFFIGYKVEQPFKEDGYPFLFSIELVLFQVEVIRTFFVSLTSYLPSSTMDLDSEDEDEELNVPVVKENGKAGGKIQKSQEKAVP

SEQ ID NO: 15371 - protein, 357 aa, Zea mays
  VARIANT 305..357: note = Derived polymorphism lacks residues 305 to 357
MERFGLDGGGGGGELPPGFRFHPTDEELITYYLLRKAVDGSFCGRAIAEIDLNKCEPWELPDKAKMGEKEWYFYSLRDRKYPTGLRTNRATVAGYWKATGKDREIRSGRTGALVGMKKTLVFYRGRAPKGQKTHWVMHEYRLEGAYAYHFLPSSTRDEWVIARVFQKPGEVPPAARKHRLGALSSTTGTAAGDSCFSDSTSASIGGASSSSTPGPLFASAAAAVANAGAADGDTSSYCGGAANHGNLVTGRELVPCFSTATINGPLVAAALGIGQPYNAAPLPFEQQPPPPAFLPSLRSLQDNLQLPPFLSAGGLGGGGALHWLPAGGMEVKVEGRSAPPQMAVGPGQLDGAFGWSF

SEQ ID NO: 15372 - protein, 911 aa, Zea mays
  VARIANT 272..911: note = Derived polymorphism lacks residues 272 to 911
  VARIANT 786..911: note = Derived polymorphism lacks residues 786 to 911
  VARIANT 834..911: note = Derived polymorphism lacks residues 834 to 911
MSTAEEAAAGGGDDYDRLSELKAFDDSKAGVKGLVDAGVTTIPAIFRGHLLSSSSSSSSTSLSIIPVIDLSAADAVAREEVVAQVKAAAETVGFCPRCWRRAALTNAKVTCTEASKFNKLQQDLAKEQLRNRCSEESRCMFFLVTGHGLWVKLRRSNQLNKGQAARLVLDMSSWNVGSLTGKLREIVDVAVRRRVNILCAQETKWKGQKAKEVEGTGFKLWYTGTAANKNGVGVLIDKSLKDGVVDVKRLGDRIILVKMVIGDLVLNVISAYAPQVGLNENSKREFWEGLEDMVSSVPIGEKLFIGGDLNGHVGISSTSFEGVYGGFDFGSRNQGEEILNFAYDMFIASTFFRKRKSHLVTFSSGQHTSQIDFVLLRKEDRHECLDCKVIPRECVVTQHKLVVADFRFKIHLQRNKHNKVTRTKWWKLKGDVAQTFKERVIEEGPWAEEGDANIMWRKMATCIQKIASEEFGLSQGNRREVKDTWWWNEDVQKAIKEKKDCYKRLHHDKCAYNIEKYRIAKKSAKRAVSRAWGQAYDDLYQRLDTKQGEKDIYKMAKIRERKTRDVNQVKCIKDEANQLLVKNEEIKNRWKEYFNKLFNGGNESSTIELDEPFDDNNRGFVGRIQEYEVKEALKRMKVGKAMGPDGIPIEVWRCLVDIAIVWLTKLFNTIFRTNRMPDEWRRSTLVPIFKNKGDVQSCTNYRGIKFVSHTMKLWERVIEHRLRKMTSVTQNQFGFMPGRSTMEAIFLLRQLMERFREQKKDLHMVFIDLEKAYDKVPRSVMCAMGYEDGDVSLDGQVVPKKDTFRYLGSMLQKEGDIDEDVSHRIKVGWLKWRQATSVLCDPRVPHKLKGKFYRTAIRPAMLYEAECWPTKRRHVQQLSVTEMRMLRWICGHTRRDRVRNDDIRESRSGAN

SEQ ID NO: 15373 - protein, 260 aa, Zea mays
  VARIANT 117..260: note = Derived polymorphism lacks residues 117 to 260
MARGGGDRSREDDPFSDGGTTGTDSDESSPRGVGARGPGSTSNPILTRLAVSRNPSPLAAATAAPGVCLLRFAWESAAGSLVGAAVGYGKPTPPVVSAIPCLSVRMEPQPRARVYGSPMRGKGLVTMKGIKGSFADAASSAKIFAVLAGVQSLVACSLRKLRGKDDGINAGVAGCCTGLALSFPGAPQTLIQSCLTFGTFSYIIEKLNKQQPALALPPATGVMDPKAGQSVLPPFTLPPLDAMDEFCKFQNFLSSKFRGN

SEQ ID NO: 15374 - protein, 185 aa, Zea mays
  VARIANT 4: note = Ancestral polymorphism is V, Derived polymorphism is A
  VARIANT 21: note = Ancestral polymorphism is G, Derived polymorphism is R
  VARIANT 32..185: note = Derived polymorphism lacks residues 32 to 185
  VARIANT 38: note = Ancestral polymorphism is S, Derived polymorphism is T
  VARIANT 46..185: note = Derived polymorphism lacks residues 46 to 185
  VARIANT 50: note = Ancestral polymorphism is P, Derived polymorphism is H
  VARIANT 82: note = Ancestral polymorphism is E, Derived polymorphism is K
  VARIANT 132: note = Ancestral polymorphism is P, Derived polymorphism is H
  VARIANT 133: note = Ancestral polymorphism is G, Derived polymorphism is D
  VARIANT 134: note = Ancestral polymorphism is W, Derived polymorphism is C
  VARIANT 151: note = Ancestral polymorphism is A, Derived polymorphism is V
  VARIANT 163..185: note = Derived polymorphism lacks residues 163 to 185
MFVALGACAFVLIPVEYFLFGLAGGKLMERVRSLTFQSLMRQEISWFDKPEHSRWYAKQFLHPDIVARYDYIFIWDEDLGVEHFNAEAYIKLVRKHGLEISQPGLEPDKGLTWQMTKRRGDQEVHKVTEERPGWCSDPHLPPCAAFVEIMATVFSRDAWRCVWHMIQNDLVHGWGLDFALRKCVE

SEQ ID NO: 15375 - protein, 188 aa, Zea mays
  VARIANT 8..188: note = Derived polymorphism lacks residues 8 to 188
  VARIANT 34..188: note = Derived polymorphism lacks residues 34 to 188
  VARIANT 73: note = Ancestral polymorphism is D, Derived polymorphism is G
  VARIANT 119: note = Ancestral polymorphism is Q, Derived polymorphism is L
MASKEKKECYRRLYHDRSVDNMEKYKVAKNIAKRVVSVANDRVYEDIYQRLSTKEREKDIYRMTRVHERKTRGFNQVKCIKDVGLWLEEINLGGYKQVFQENSVNGEYLESLSMFTTEQILRFIRRCHMKWGDFITLCKELRRIKVACLKGEQEVRRPWWAPACLSVVFVRAAKQNRKSRVVSLKLEP

SEQ ID NO: 15376 - protein, 1122 aa, Zea mays
  VARIANT 311..1122: note = Derived polymorphism lacks residues 311 to 1122
  VARIANT 652..1122: note = Derived polymorphism lacks residues 652 to 1122
  VARIANT 814..1122: note = Derived polymorphism lacks residues 814 to 1122
MDCGIYTFRAHGMMYHNVRSFGREAGTEHKHLELYFYDDDSSLEHRYNKCRQDHLEKDKAAITQLVEILKGNPYSEHLRYMGHIDNVEDYHIALNLDQTLNQKLYNAPITLEVTTVWIEGSERRGQFSNSVMMHGKDRSSHDICSYHGCYDALSYLMFFPKGELGWHANIPKSNVSIDEVDAYRIFNPILHGKRLFQQFTVDTYIKIESSCLDFIRKNQDRLRADLYKGLVDSLHEGENRADKIGKRTVLSTSFIGGSHDMRRRYMDSMALDRLDLVVRIFRPKLEELKKRLTKHHILGKIRAYVFVVEFQKRGLPHAHFLLIMQRKYKLTCPDQYDLLIFVEIPNKKKYPQLYKMVIKHMMHGPCGLLNPKYPCTKGRASCKNHYPRDFSDATLQGKDSYPIYRCRDHGSNEKVRGYELDNRWVIPYNPYLLRLFNCHINVEASGSIKAIKYLFKYIYKGHDRASVAVRDANNANGDVDEIKQYRDARWVTPPEAIWRIFSFDLSQNSPRVMQLQLHLENMHMVSFHECAKVNPVVQHPGADRSTLRHILRQIGHTRRLRASFIMTFLSGTLCSKARCGKGGNETWVDRTIDGDTLPSFREAAQRRGLLEADDTIDECLNEAALYQMPSTLRRLFATILVYCEPNDVAELWQRYLDAMSEDYHRSTQSKPHVQHMVLIDIRNILQSMGKDIKTFHLPAIIDRYDDSHGTDREVYEEETIEPTTKDVAMKETLNEEQRNIEPANGLCNDTRLVVRGFQKNSIDAEIVLGQLAKMQIFLPRIPLFPSKDEMFPFQFKRKQFLIRLSFAMMVNKAQGQTIPKVGVYLPEPVFSHGQLYVALSRATARSKVKILVIPVTDEMKKKKGVERNSTINGTTYTKNIVYKEKNNVQYANLVYKEVLTPARSEGVEGHHDSRLIESRLVESDANLEFVTGILGSLTDKQDTEKANGVVSGCGVGFQNGNYHLDALYSELLMSNSKYDPRVCVINEIQEPGLGACNLISQERKVAAGHSACATPENVTVENKSSAPEACKGQCHFDSSASKLLESYMIHDFEVYGCDNFEIGTQLSELINLCMKDSIEGQSNFGAAPMEQNTIDSKRLSSDHEAKCPLCGSDISNLSEELR

SEQ ID NO: 15377 - protein, 106 aa, Zea mays
  VARIANT 80: note = Ancestral polymorphism is T, Derived polymorphism is M
  VARIANT 74: note = Ancestral polymorphism is I, Derived polymorphism is M
  VARIANT 49..106: note = Derived polymorphism lacks residues 49 to 106
  VARIANT 45: note = Ancestral polymorphism is Q, Derived polymorphism is P
MFGQGMARRCTVTTSWRGFEFREKCFSFWVIGKAVMLDEIINYVQILQRQIEVHHGFYSAYHNTTLLYEILKSIKWARKMYGNLPINVVGHSMGGDLASFCALDLF

SEQ ID NO: 15378 - protein, 525 aa, Zea mays
  VARIANT 480..525: note = Derived polymorphism lacks residues 480 to 525
  VARIANT 279: note = Ancestral polymorphism is W, Derived polymorphism is L
  VARIANT 99: note = Ancestral polymorphism is W, Derived polymorphism is C
  VARIANT 93..525: note = Derived polymorphism lacks residues 93 to 525
MEGVSRATWMLLHIIAGSQCSSLTNQQGDKDGMQRSWCHSGGKDDVLEDGLCDLEVPPVASQNYVGLTSKDIFVEVAPDEFGLPDVDADSKLEKEHIRWLSMQFTISRPLHLESVLLVALGSSTTDLHHTCSTLEDLSLGAFSTQEEAEAYDITTIKVRGLNAFTKFDMSRYNIKSILDSSALPFGGTAKRLKETEAAASARDHTGVLSYDIGGDAHSAVSMIEAYLRANKMFVDKHELEMERVFSSYLEMDLSEVEPCVLGPKRPHDRVPLKEMKSDWHACLDNEVGFKGYAVPKEQQGKVVKFDFHGRPAEIKHGSVVLAAICSSTNTSNPSVMIGAGLVAKKAYELGLEVKPWVKTSLTPGSVVAIEYLKHSLWSTLAHTDIVAATVLSANRNFEGRVNPLTRANYLASLPLVVAYALADTVDIDFEKEPIGVGKGGKEVFLRDIWPSNQEIDEVVESSMQTHLIIQESQQFERLFQFNRKVNELTYTIASKKISFQLGLSKTDIRRGTEIQLIWGGVLGQI

SEQ ID NO: 15379 - protein, 304 aa, Zea mays
  VARIANT 277: note = Ancestral polymorphism is A, Derived polymorphism is T
  VARIANT 252: note = Ancestral polymorphism is D, Derived polymorphism is Y
  VARIANT 249: note = Ancestral polymorphism is I, Derived polymorphism is K
  VARIANT 241: note = Ancestral polymorphism is G, Derived polymorphism is S
  VARIANT 235: note = Ancestral polymorphism is R, Derived polymorphism is Q
  VARIANT 233: note = Ancestral polymorphism is S, Derived polymorphism is G
  VARIANT 199: note = Ancestral polymorphism is P, Derived polymorphism is A
  VARIANT 174..304: note = Derived polymorphism lacks residues 174 to 304
  VARIANT 38: note = Ancestral polymorphism is E, Derived polymorphism is D
  VARIANT 19..304: note = Derived polymorphism lacks residues 19 to 304
  VARIANT 13..304: note = Derived polymorphism lacks residues 13 to 304
MKTQKISKLLSKRFTPPVWNKHKEPREVNMFVDLLLLEVLADKGYDGMATDVWPYGIILFVLMAGYLPFDDANLMRLYKLICHATFSCPPWFSSGARKIIKHIIDPNPDLAKQWACYNLLKEHRDIQVLYHNDRVKDSPSTNGSKEHQGRRPTLDCKRARFAMKDTGRLFTPMQVLHPQSMRPAREGDIPVMVKNSYNAKAPGTIITRQRDMDKVVLTSIVLKSNVTMLDIVSTRMLGQYGFLARVFAIFEDLCIYVDCVATSEELDHVVEELEKIAIVRLLQQRAIISLIGNVEQSSLILQKV

SEQ ID NO: 15380 - protein, 269 aa, Zea mays
  VARIANT 15..269: note = Derived polymorphism lacks residues 15 to 269
  VARIANT 23: note = Ancestral polymorphism is R, Derived polymorphism is C
  VARIANT 37: note = Ancestral polymorphism is L, Derived polymorphism is P
  VARIANT 192: note = Ancestral polymorphism is L, Derived polymorphism is R
MEPGLPRLAVLVCPWPSISMSLRAGIIGLPNVGKSTLFNAITVPTSIELVYIAGLVKGARKGEVVRCFEDDDIVHVNGKIEKRLDKLNKSKTKDTQVKVKALMEGKPARSVDLAEHEKEAIKHLYLLTMKPVISVANVTESDLAEPDINPRVIEVAKAASDLQYGMVTIPAQVETELAELPLEERVEYLKSLGVAESGLGNLVKATYNPLGLRTYFTTGDKVHHLCCVTAPQAAGVIHSDFQKGFIRVETVSYDDFVAAGSLGVAREKG

SEQ ID NO: 15381 - protein, 475 aa, Zea mays
  VARIANT 256..475: note = Derived polymorphism lacks residues 256 to 475
  VARIANT 347: note = Ancestral polymorphism is R, Derived polymorphism is C
MAAMQLAMVVLVVVISMASLHRFYATHSLLPGLASVADPARCSSKFHTDDTAGFSSSFDVRALADRVDEVLVQLAELQDKLEATALKVAKQSKKSKARRRPQENMTMPEFRRFLEDEVIHPLYSAHIALRLIRIPRPPDEGGDGGDASSSSGMDPLVNFFASEETRKYVTAKGNRDGLPSVYGTNRTYGSVGHACVLMRRELDEYMSYDVGARCPDDWDLGQRLMLGGCDPLPRRRCLAPASKLFRRPLPVNESLWTLPDDGNVRWSHYHCRGYRCLSARNQRRGYDRCVGCFDMDRERQRWANRTASSSLANFLVDDVLAAKPGEVRIGLDMSVGTGSFAARMRERGVTIVSAAMNLGAPFAETIALRGLVPLYATMSQRLPLFDNTMDLVHTAGLFEGWVDLQLLDFVLFDWDRVLRPGGLLWVDKFACARKDLDDYMYMFLQFRYKKHRWVVSFKSKDEVYLSALLEKPPRS

SEQ ID NO: 15382 - protein, 163 aa, Zea mays
  VARIANT 28: note = Ancestral polymorphism is A, Derived polymorphism is V
  VARIANT 41: note = Ancestral polymorphism is H, Derived polymorphism is Y
  VARIANT 44: note = Ancestral polymorphism is R, Derived polymorphism is W
  VARIANT 48: note = Ancestral polymorphism is R, Derived polymorphism is W
  VARIANT 54: note = Ancestral polymorphism is A, Derived polymorphism is V
  VARIANT 59: note = Ancestral polymorphism is G, Derived polymorphism is S
  VARIANT 74: note = Ancestral polymorphism is R, Derived polymorphism is C
  VARIANT 84: note = Ancestral polymorphism is A, Derived polymorphism is T
  VARIANT 86: note = Ancestral polymorphism is G, Derived polymorphism is S
  VARIANT 136..163: note = Derived polymorphism lacks residues 136 to 163
MKKDDDLESALLAAKEPAPAPAKGYAYALICALLAGFPHLYHLRLQPRGDERGAEVRASRPRRHGHAAGGAHRRHQRLLPRRLAGGGLSVRPRGPALHHRAVGGLVPRRLSRHRRHRRRRLRRALGGLVRRRRGLRVRPRRRARLHRGDLAGQSSGLPLLHPR

SEQ ID NO: 15383 - protein, 444 aa, Zea mays
  VARIANT 265: note = Ancestral polymorphism is S, Derived polymorphism is C
MPTSREEGQAEPDEHHPTILHRGGGGDAAGGSGGRPRQVWVPGPVIVGAGPSGLATAACLKARGVPSLMLEKDSCVAASWRHRTYERLRLHLPRCFCELPLAPFPPGTPPYPTRDQFIAYLDDYARVFGIQPHLNARVHRAAYDAAIGFWRVTVKEDSGGDGATAANTEFLSRWLVVATGENAEPAWPEGVEGMDTYRGVAMHTSSYKKGDEFRGKNVLVVGCGNSGMEVSLDLCNNGAKASMVVRDKLHVLPREILGVSTFGLSVFLLRWLPIKLVDSLLLFFTRLILGDTEKHGLPRPKIGPLQIKASTGKTPVLDIGALPKIRSGEIKVVPAIQRFTENGVEFVDGHQEDFDAVIFATGYKSNVPSWLKEEELFSHVDGVPRKPFPHSWRGKNGVYAAGFTKKGLMGTSHDALRIAGDIADQWTETFASPAATSRSSDQCA

SEQ ID NO: 15384 - protein, 175 aa, Zea mays
  VARIANT 70: note = Ancestral polymorphism is S, Derived polymorphism is F
  VARIANT 137: note = Ancestral polymorphism is R, Derived polymorphism is W
  VARIANT 140..175: note = Derived polymorphism lacks residues 140 to 175
  VARIANT 147: note = Ancestral polymorphism is P, Derived polymorphism is R
MAAAAAGGENSGAGAGAGEGEFYLRYYVGHKGKFGHEFLEFEFRPDGKLRYANNSNYKNDTMIRKEVFVSPSVLREARRIIQESDIMKEDDSNWPEPDRIGRQELEIVMGNEHISFTTSKIGSLVDVQSSKDPEGLRIFYYLVQVRPHPQIPTLFVHRQITSTYDALITSTRAIG

SEQ ID NO: 15385 - protein, 240 aa, Zea mays
  VARIANT 9: note = Ancestral polymorphism is K, Derived polymorphism is N
MAATTPTTNNAPLLLLLLLLAVLPIAALSSRAGPPAAHKSHGHGHGHDHGHGHRPSAKHPPPPPPPSSSSTPPPPPPAAALVRTTCNSTSYYALCVSALAADPSSATADVRGLSAIAVSAAAANASGGAATAAALAANGTAPAGTATSAADSAVQALLQTCAAKYASARDALAAAGDSIALDDYDSASVHVSAAAEYPQVCRTLFRRQRPGQYPAELAAREETLGQLCSVSLDIIALLSS

SEQ ID NO: 15386 - protein, 344 aa, Zea mays
  VARIANT 27: note = Ancestral polymorphism is K, Derived polymorphism is E
MSSSPLITAAASAAVVALAVANRVLYKLALVPLKAYPFFLAQLTTFGYVAVYFSMLYTRYRTGLVTRDMLALPKHRFVAIGLLEALGVFAGMSAGAMLPGPAIPILSQSFLVWQLIFSALLLGRTYSARQVIGCFLVVSGVILAVASGADDGQLLSDVKLIWPALMIASSAFHAGASILKEAVFIDGAKRLKGKRPDIFVVNSFGSGFQAVFVFLLLPFLSNLRGIKFAELPAYLNGGAECFLNVAESPIDCGGAPFLPLLFIVVNMAFNVSLLNLVKMSSAIVASLTATSAVPISIYILSLPLPYIPHGTELSTSFIIGAVILLMGLILYNLPQSSLKQLKAD

SEQ ID NO: 15387 - protein, 175 aa, Zea mays
  VARIANT 170: note = Ancestral polymorphism is L, Derived polymorphism is I
  VARIANT 74: note = Ancestral polymorphism is A, Derived polymorphism is D
  VARIANT 55: note = Ancestral polymorphism is K, Derived polymorphism is N
  VARIANT 44: note = Ancestral polymorphism is I, Derived polymorphism is V
  VARIANT 29: note = Ancestral polymorphism is E, Derived polymorphism is K
  VARIANT 25: note = Ancestral polymorphism is V, Derived polymorphism is I
  VARIANT 22: note = Ancestral polymorphism is V, Derived polymorphism is I
  VARIANT 12: note = Ancestral polymorphism is T, Derived polymorphism is I
  VARIANT 8: note = Ancestral polymorphism is T, Derived polymorphism is I
MADREHRTVFVTVGTTCFDALVMAVDSPEVKKALLQKGYSNLLIQMGRGTYVPLKVSGDATLQVDHFTFSPSIADNMRTASLVISHAALAGSGSIFETLRLGKPLIVVVNEDLMDNHQSELAEELAERKHLFCARPQTLGETIRAMDLETLVPYEPGDAKPVVTLINRFLGFPVD

SEQ ID NO: 15388 - protein, 380 aa, Zea mays
  VARIANT 249: note = Ancestral polymorphism is R, Derived polymorphism is G
MAASSCIACNNGSTDEKEEKRKCDLVGYEALPEWLKDNEFIHGYYRCEWPMKETVLSIFSIHNETLNVWSHLLGFLLFLCLAIFTAMVIPRNGSSRSSNSAAYQLGDLVEMANMTVALRHEALAACFLLPPSAAALSEDGQQQIPTSCPPNTSSSHHHAIQIQSSTGTAATVDAGTAADPITRWPLFAYLVGAMVCLLTSSVCHLILCHSERTAYVTLRLDYAGIAALIVTSFYPLAYYSFLCNPALQRLYMGSITALGAAAVTASLVPAFQAPELRPLRAALFSCMGASGAVPIAHKLLLYGGTAPGAVASAGYEALMGVLYGLGVAVYAARVPERWAPGRFDLVGHSHQLFHLFVIAGAYAHYHAGVEYLKWRDVDKC

SEQ ID NO: 15389 - protein, 160 aa, Zea mays
  VARIANT 149: note = Ancestral polymorphism is P, Derived polymorphism is L
  VARIANT 144..160: note = Derived polymorphism lacks residues 144 to 160
  VARIANT 136: note = Ancestral polymorphism is F, Derived polymorphism is C
  VARIANT 86: note = Ancestral polymorphism is P, Derived polymorphism is L
  VARIANT 82: note = Ancestral polymorphism is R, Derived polymorphism is C
  VARIANT 73: note = Ancestral polymorphism is D, Derived polymorphism is E
  VARIANT 66..160: note = Derived polymorphism lacks residues 66 to 160
  VARIANT 47: note = Ancestral polymorphism is E, Derived polymorphism is K
MGHLHTASAPSPPRPASPPFAPAPSIVVQDTAAFFDEQHAAGASLSKFEQQLSRDGSVAASTSRARSREKRRDGKPPERFRRRREPELQKLWDDNQVLKRVSERNTGTAFVLHDGPPYANGDLHMGHALNKIFKDCINRYKLLQNHKCPLFLVGIATAFQ

SEQ ID NO: 15390 - protein, 399 aa, Zea mays
  VARIANT 259: note = Ancestral polymorphism is D, Derived polymorphism is H
MGSIPAAAAGPGTELEDLPEDALLCILVLLAPPDAAAAACSCRRLAAAASSPALPLALALRLGLPPPPPSHPLLPAAPCPADARRLLRSLHRLRRLLGLWRRLPSGSGYASSSLSSPSLAAFEWAPRATLAASFLAPSAHGDVGVSKSPFVTLSIEESGDTVAVVGEVSVCVNFVGNNHIVVEAVVGEDEEFEMVSGSPPEEIYAHFANRRSPGAGRRRRGKQGRKGGGMEAEHFVRIADTEPTKARPLQGLWKGICEDRTLEFYLVTYDDIGGVTCRRFRDTQSQNSGYSPVFWTTDTTFLEPPFSEQELVNYASRDHIQGVTSNHAGAENRVVSRILRINSSYDVVDTHLSTPLDDGRSVEGRIWLYEDGTFGFGFVGSNSIIDLRHVSSAGCILDT

SEQ ID NO: 15391 - protein, 326 aa, Zea mays
  VARIANT 257..326: note = Derived polymorphism lacks residues 257 to 326
  VARIANT 239..326: note = Derived polymorphism lacks residues 239 to 326
MAFNPTPPGLGFPYLPPNPYLPRPPQQPFPPPRRAPPPPTLPQPPPPRRAPPPPALAPPPPTMPPPPPRRAPPPPTQPPPPPRRAPPPPTQPPPPPRRAPPPPTQPPPPPRRAPPPPPSPPIRPPPPPTPRPQAPPPPHLPMPPPPAPVPPPPSPPHHIVIIVVFVSLGGLLLLACLAAALLCWHKKKKRRGRKAEEEEAKAEVLNFSDHVHVHKQTVPGPAGGASAVRLTVDEDVRFQEAVRKQDAIGESSSTAPWTWHKKHQSGEERKTEVINVTKHKHVDEMIVPGPHGERVEVLSEDEDIRFEEAGESQEEYDKSKARITKS

SEQ ID NO: 15392 - protein, 216 aa, Zea mays
  VARIANT 10: note = Ancestral polymorphism is A, Derived polymorphism is V
  VARIANT 61: note = Ancestral polymorphism is R, Derived polymorphism is W
MFGGDDGARVLRRAGSFPRAPPPPATARHILSRSESIKKKSGAAKRARVRAGLAAALQELRLAGRKHGARSRGGGALSEAVSAGAGAGAAAGPRASDDVQGGGCCAAAPLHVSDVAEAQASRGAAATAGRRRVNAAGGWTTPLLLVAVLALACVVALGRTPAVCCCTCAAWLCRGPCAVRPRRTGATGAASPLLQRGAASDACGCELNIGHVRAGD

SEQ ID NO: 15393 - protein, 343 aa, Zea mays
  VARIANT 315: note = Ancestral polymorphism is G, Derived polymorphism is A
  VARIANT 239: note = Ancestral polymorphism is R, Derived polymorphism is S
  VARIANT 162: note = Ancestral polymorphism is L, Derived polymorphism is Q
  VARIANT 154: note = Ancestral polymorphism is R, Derived polymorphism is T
  VARIANT 89: note = Ancestral polymorphism is P, Derived polymorphism is L
MEKMLHSAPAHGRLPECFIFPADKLPQAKATSATVSLPIVDLSLGRDEVRRAILEAGKEIGFFQVVNHGVSLEAMQDMETVCQEFFRLPAEDKAGLYSEDTGRATRIYSSTMFDTGAEKYWRDCLRLACSFPAVGDSAAAWPDKPRRLREVVERFTVQTRGLGMEILRLLCEGLGLRPDYLEGDISGGDVVLHVNHYPPCPDPNATLGLPPHCDRNLLTLLLPSMVPGLEVAYRGDWIRVEPVPGAFVVNFGCQLEVVVTNGILKSIEHRVMTNLGVARTTVATFIMPTTDCLIGPAAEFLSDDNPPCYRTLTFADFKRIYSVVKLGSSLNLTTNLKNVQKEL

SEQ ID NO: 15394 - protein, 80 aa, Zea mays
  VARIANT 24: note = Ancestral polymorphism is R, Derived polymorphism is L
MGQCPCFGSAKAAEQERRAEADRRESQDARAKAAEAAQRRQQDYEKSAAGRAAKAQMKAMKESKASNQGGEPVLKWQMGS

SEQ ID NO: 15395 - protein, 66 aa, Zea mays
  VARIANT 35: note = Ancestral polymorphism is K, Derived polymorphism is Q
  VARIANT 38: note = Ancestral polymorphism is A, Derived polymorphism is T
MGQCSSSQHPEAEQQKQQQAAACVDIQKRQEQLRKKAAAHMNQPYQASSNDELVLLVSLDSITKIG

SEQ ID NO: 15396 - protein, 144 aa, Zea mays
  VARIANT 132: note = Ancestral polymorphism is R, Derived polymorphism is C
  VARIANT 104: note = Ancestral polymorphism is V, Derived polymorphism is M
  VARIANT 100: note = Ancestral polymorphism is M, Derived polymorphism is L
  VARIANT 88: note = Ancestral polymorphism is A, Derived polymorphism is S
  VARIANT 84..144: note = Derived polymorphism lacks residues 84 to 144
  VARIANT 73: note = Ancestral polymorphism is D, Derived polymorphism is N
  VARIANT 62: note = Ancestral polymorphism is R, Derived polymorphism is L
MAHVAQKVHFSPITGLWNYGPFGPIGSAPGLGFRSLRQLYIPLLPTAPLLSAHRTPSISSPRTLAAAAELGGDGALQRLELAPQELRARIPRLVTDSLILDLSVFIVVIRVCANPHGLIRKYGLMCCRQCFRSNAKDIGFIKYR

SEQ ID NO: 15397 - protein, 167 aa, Zea mays
  VARIANT 48: note = Ancestral polymorphism is G, Derived polymorphism is V
  VARIANT 138: note = Ancestral polymorphism is C, Derived polymorphism is G
MSSVAGEGEGEGGGRRRREEPRSQQHEDGVEVADGKLDLGDLYGAAAGWVEARTSCPHLGTMPPAGAELLMTLLACLRPTLRAPDVMCSRFINKHMLCHHEEETGHCLALSFSDLSVWCFSCDSYLDVQAILELRPSCTFVEVWRTPFQSLEVLDFSTGESGSSSRT

SEQ ID NO: 15398 - protein, 149 aa, Zea mays
  VARIANT 40: note = Ancestral polymorphism is L, Derived polymorphism is P
  VARIANT 117: note = Ancestral polymorphism is R, Derived polymorphism is W
MRCCNLRWGFVEDPRDREVASLVCRRWHRVDALSRKHVTLPFCYAVSPKRLLARFPRPEWLAVKGKPRAAMKGDYYRYLAEFSTGTEKKAASDQSLMAYQHAMVVASSELSPAHQIRLGLALNLSVFFYEIMNSHERSLIFNALFLPFY

SEQ ID NO: 15399 - protein, 160 aa, Zea mays
  VARIANT 33: note = Ancestral polymorphism is Q, Derived polymorphism is H
MEKEHIKMAMLRQEQTFRQQVHELHRVYQVQKQLMMQMQIAKTNSYGNEAAERQTKPTEKLEHRQWCGSSGKTEAKLAEDFSLELTLATGAGRRGEEEKPSNSDSEATMSSSTSAESEPGQGFAPKSDVTNLRFQNESSRHDAQVLQSPWRYQCLSLKMA

SEQ ID NO: 15400 - protein, 263 aa, Zea mays
  VARIANT 119: note = Ancestral polymorphism is P, Derived polymorphism is T
MATAGAFHAGGFLLLPVRRSLRGPSPSPWSHFRTHFISSKPPPSTPLPPPVPPARLSPVGSAFGPPSRKTGAVGAGAGAGVVGWYLGLLDARPVLTKSVTAAVIFTAADVSSQMLTLGPEDSLDFLRTMRMASYGFLISGPSLHLWFNFISKLFPKKDVVNTLKKMFIGQAVYGPIINSVFFSYNAGLQGETVAEIIARLKRDLVPTIKSGLLYWPTCDFITFKFVPVHLQPLVSNSFSFLWTIYITYMASLKKADVEVAPST

SEQ ID NO: 15401 - protein, 98 aa, Zea mays
  VARIANT 9: note = Ancestral polymorphism is P, Derived polymorphism is S
MVVSTFTGPGIGIGFGVGCGFGVGWGFGGMPLNTFGLGIGGGCGVGLGLGWGFGNAFGCQYRSSRVQFQGIEFQKKAGGDESQKVVSPELAEKSHPYG

SEQ ID NO: 15402 - protein, 143 aa, Zea mays
  VARIANT 44: note = Ancestral polymorphism is T, Derived polymorphism is P
MSVAIRSGELLACPVALRRAPLAVSVVSVRMRARGAVAVRAEATAEGVGKEGKKAAGKKKPASGITKPKPISTELREFVGGAAELPRTEAIKLVWAHIKGNNLQDPNNKKIIICDEKLKKIFGGRDRVGFLEISGLLNPHFQK

SEQ ID NO: 15403 - protein, 346 aa, Zea mays
  VARIANT 6: note = Ancestral polymorphism is G, Derived polymorphism is D
  VARIANT 23: note = Ancestral polymorphism is H, Derived polymorphism is D
MMMMGGAGKMVRAALHAFIRHYHPAASLLALPFSAAALLSRTHPAVLGASHLLSRRLRRALVAAGFPPASQLLFLLSHRLSQRACASLAAAPFALSFLLLAKACAVHRCCDCSPPPPHATQCCRRRNESGTFAQLLRSSYPAMACTQLANCLALLLANAAVFSALLAAFNAAEAMHLLGAAPQPTSTSSPGSGRAVLALSAAGVIVYSVALANASAACNLATVVAAAEGRGGAHAVLKAVLMLLRSGDAATAVAASLPASLAAAAVEALFQLRVMRPYAATGRVTPGMLWEGLLVAYIHAMVCVLDTVVTTMVYRSCKASRSCHLLELELELELGGGSHRQEDLSL

SEQ ID NO: 15404 - protein, 496 aa, Zea mays
  VARIANT 236: note = Ancestral polymorphism is R, Derived polymorphism is Q
MSARPPPQPRPRLALPPRSTAESLFTGAGDTSPGPLTLASALFPSDADGGGGPGGASSSAAGAATFTQLLTGSLAPPPPPQQRHDAERGRGGGVARAGPALSVAPPASASAGASVFTVPPGLSPSGLFDSPGLLFSPAMGGFGMSHQQALAQVTAQATHSPLRMFDHLEQPSFSTAATMSGALQHMNSAASMAGISDMTMATANNENTSFQSAEASQRYQVNAPVDKPADDGYNWRKYGQKVVKGSDCPRSYYKCTHPNCPVKKKVEHAEDGQISEIIYKGKHNHQRPPNKRAKDGNSSAADHNEQSNDTASGLSAAKRDQDNIYGMSEQASGLSDGDDMDDGESRPHEVDDADNESKRRNIHISSQRTLSEPKIIVQTTSEVDLLDDGYRWRKYGQKVVKGNPHPRSYYKCTFAGCNVRKHIERCSSDPKAVITTYEGKHNHEPPVGRGGNQNAGMSSQQKGQNNVSSNQASFSRPDLSNANQMPIGILQFKSEQ

SEQ ID NO: 15405 - protein, 135 aa, Zea mays
  VARIANT 39: note = Ancestral polymorphism is P, Derived polymorphism is L
  VARIANT 87..135: note = Derived polymorphism lacks residues 87 to 135
MASLPCSQIKLSKVLVRRKFHESGQTNLPRPLHWKPLRPGRFENLVLQCTKNLSWETSLPYASAEDDASIIKGTGVVEPIDTEEAPQIPILQSDEDVVEVKNEPSWHLKAFKLAMWLVGPSILLVTAVKRTVFLT

SEQ ID NO: 15406 - protein, 152 aa, Zea mays
  VARIANT 106..152: note = Derived polymorphism lacks residues 106 to 152
  VARIANT 86..152: note = Derived polymorphism lacks residues 86 to 152
  VARIANT 66..152: note = Derived polymorphism lacks residues 66 to 152
  VARIANT 50: note = Ancestral polymorphism is S, Derived polymorphism is F
  VARIANT 44: note = Ancestral polymorphism is W, Derived polymorphism is R
MSLAPATDFDSVVDAFGYNELAIARCLGAPTAHPRISTPLLPVWGKIFHSGCVLYRKNTMGSGADRPSVVAWRTTREWWKEAGEGQRNEAPLAAQGLHPCLGKAWRARHGEAMDCHNLVERGEDQLADEAAAGSRAGLQQGNREDTLTHSLN

SEQ ID NO: 15407 - protein, 267 aa, Zea mays
  VARIANT 2: note = Ancestral polymorphism is L, Derived polymorphism is Q
  VARIANT 126: note = Ancestral polymorphism is D, Derived polymorphism is Y
  VARIANT 197: note = Ancestral polymorphism is G, Derived polymorphism is W
MLHAVQVAKQFVESALYHSKDLVIGNGPQGPFDHLFELKSPLYKTGSLQKFNPGDLFLYAVTDSGMNKKWGRSIKDAVKAAIEGGATIVQLREKDAETREFLEAAKACVEICKSSGVPLLINDRIDVALACNADGVHVGQSDMPAWEARELLGPGKIIGVSCKTLAQAEQAWKDGANYIGCGGVFPTRTKAANPTLGIEGLRTVCLASKLPVVAIGGINAGNAVSVMELGLPNLKGVAVVSALFDRECVATETRNLRSILENAHSRS

SEQ ID NO: 15408 - protein, 75 aa, Zea mays
  VARIANT 72: note = Ancestral polymorphism is L, Derived polymorphism is H
  VARIANT 69: note = Ancestral polymorphism is W, Derived polymorphism is C
  VARIANT 65: note = Ancestral polymorphism is T, Derived polymorphism is R
  VARIANT 46: note = Ancestral polymorphism is M, Derived polymorphism is I
  VARIANT 34: note = Ancestral polymorphism is G, Derived polymorphism is D
  VARIANT 33: note = Ancestral polymorphism is I, Derived polymorphism is T
  VARIANT 21: note = Ancestral polymorphism is A, Derived polymorphism is T
MPGPNLCSFGGKLSLENQITTLENKCSCDYQWTGFCHNDLQNGNIIIDEKTNVLTIIFYDNNVDRTVKWEYLEHG

SEQ ID NO: 15409 - protein, 464 aa, Zea mays
  VARIANT 325: note = Ancestral polymorphism is N, Derived polymorphism is H
  VARIANT 237..464: note = Derived polymorphism lacks residues 237 to 464
  VARIANT 190: note = Ancestral polymorphism is L, Derived polymorphism is P
  VARIANT 186: note = Ancestral polymorphism is L, Derived polymorphism is P
MEMKLTIRRVPTVVSNYQEDADKPRAGCGRNCLGDCCLPASKLPLYAFKLTPAKGSQEDAASTKLLVDILLSEWEDRMTRGLFRYDVTACETKVIPGNLGFVAQLNEGRHLKKRPTEFRVDRVLQPFDPAKFNFTKVGQEEVLFQFENSGGDDSYFLNNAPIIAVDRAPNVIAINVHLSVTLEIQLPFYLFLFPLMFFLQWFLQVSPIEYGHVLLIPRVLDRLPQRIDPESFLLALQMAAEGGSPYFRLGYNSLGAFATINHLHFQAYYLSVPFPVEKAATHKIPLSEDTKKNGVTVSKLINYPVRGLVFEGGNTLDDLATVVSNACIWLQDNNVPYNVLISDCGKRVFLFPQCYAEKQALGEVSQELLDTQVNPAVWEISGHMVLKRRMDYEEASETSAWKLLAEVSLSEERFEEVKAYIFSAAGLVQYDEEEEEASDGEGPTAYVPVKVTPLPVAEGCLVLP

SEQ ID NO: 15410 - protein, 500 aa, Zea mays
  VARIANT 8: note = Ancestral polymorphism is A, Derived polymorphism is T
MEAALEAARAKDTKERLARVERLHEALNAAACRGLTAAEVTALVRSTPTSASPRVASRRSPSPPSPEDNKYTEEELLLLKNKDMGYILQSIQSEKKKIEKLGSTLHELDNKPQNKHVYFAEDGKIASSYRELEEMKQRLQKLEKLYAAATRIFAGILVTLIAFLSTEVFRHKASKKRQGYFEQHGGRTLLRILETDDNNITFTLYDRGDLAKATRGFHKANIVGEGAHGTVYKANLGSSAAENASTTVAVKRCKQIDRSRTDGFVQELVVLCRVSHPNVVRLLGCCFHFEAPMLVYEFVPNGTLSDLLHGKPRRRPQNILLGEGYVAKVSDFGCSTINDSVQVVPKGTLAYLDPEFLQDHQITDKKDVYSFGVVLIELLTRKNPQAKEWKNLTVMFQSSTGNGTLGDLLDADIVEEGSMGLIYAAAKLVSRCIAVPGNARPAMGQVAGELRRLSDQMPESPEVRVALEVEDGRYSYAASTEGETTRFSNLTKPSTAELAR

SEQ ID NO: 15411 - protein, 233 aa, Zea mays
  VARIANT 132: note = Ancestral polymorphism is N, Derived polymorphism is K
  VARIANT 26: note = Ancestral polymorphism is S, Derived polymorphism is G
MERKRKEMEKGKSELRLAMEELRLCGSRDGAEEEEEVQVQQVKVQEQHKSSTMDLLYVSKQLIHVLDEIGPTLLVLRQDIQQNVQRLQDLHEKDCSKYACLTAIVTEEMEQGTAKKTKSCTRAIIWLSRSIKFSKYLLERLLETPESSLEEIVEEAYANTLKPWHGWISSAAYKVALKLIPEREFFVALLMGNCQDLEDLAEDARMLAYAVQPLLQEIDAISAKHNLDKMKSS

SEQ ID NO: 15412 - protein, 288 aa, Zea mays
  VARIANT 182: note = Ancestral polymorphism is R, Derived polymorphism is C
MMTSHSSVLVAGLVCLSAAVVVPMPWLAAGESSIGGAECKRSCGGVEILSISPEQGEAKVLLPISSYCYDSASRTMVADEWHWSLGANYRFSSTANKFTVVGCRALAYIGDTRKKRNNVAENNYLTGCVSTCFNRTISLNTCSGMGCCQTVIPNGPPYFHVWFDAGFMDISGIDGGADLFGRCSFAVLMDSSNFTSWTSSSSNISSPEFVNNVSSLLQFFNSSRGGKAPVVLDWSIGEDDCKNPAGYACRSVNSFCSSAASGRGYICKCNQGFDGNPYLPNGCQGVRA

SEQ ID NO: 15413 - protein, 312 aa, Zea mays
  VARIANT 249: note = Ancestral polymorphism is S, Derived polymorphism is F
  VARIANT 247..312: note = Ancestral polymorphism lacks residues 247 to 312
  VARIANT 194..312: note = Derived polymorphism lacks residues 194 to 312
  VARIANT 105..312: note = Derived polymorphism lacks residues 105 to 312
MAADSTMGFHQGITASLYNHHMLSFQSNNDVGIGGGNDATGGMVMAPGSVSGGSGNARLFLSPNTGVVDNAPGVAPSRNSSGDAFRGTGTAKYNCSDWREVDLCSSERTGARGTLGDPAGPAASVATVEAESVAQARVARAPQASLLSHPTADPHVSSSLSASEKPANLLLPLPKATHAAPRALPKNSNTSLPQSGSQGEPSKGFNFKFGSINMNGLPQFPARTSSAPPNLDEQKRKQLSCLLLFIRYSDNSRLMKSVLDIYCELRAVTGSSLTHQTRYDPTRAVDPIIEDGHYTLFRSLGRLYASVFNYYT

SEQ ID NO: 15414 - protein, 465 aa, Zea mays
  VARIANT 375: note = Ancestral polymorphism is G, Derived polymorphism is R
  VARIANT 257: note = Ancestral polymorphism is P, Derived polymorphism is S
  VARIANT 109..465: note = Derived polymorphism lacks residues 109 to 465
MLCAHIYHAAFILLKLALRNSCPICRHEMPTDAALRAAASVGVAERAAGEEQAWDAPHARDFHLPPNLIREFTRTSENILMPSPDWLEEFDTHDPKENTLLLPYLRKRSKIIEIVAARDIVFALSQLGNNSNRVMLCQCNCFFYPVIFLKFFPIVQGPNVSARDLGFPYPKAGTAKPTDVVVKFYVLYEKWRRGELLGSSSVARYLKSITHSNGTIIHPSGSERSLHASVDALSSCYVDKQGNKNFRVWVDRLVTSPIGTSNWLVRFDNWEMEGGVRYCCRTTLLLNNKEGMPASSHPTPPLSLRYEYASPHLHNATAMPTLEEFWDEEPSGLDTTQQPRKTVRPDFFHCFDEFTLQVAFLKSRKGFVKIAIQSGCPLVPVFCFGQSYAYKWWRPGGKLFIKIARAVKFTPIIFWDRFGVHVMLPSRIKVVVVSRSIKCDKVERTQFSSEVISFQQVDFDLILLP

SEQ ID NO: 15415 - protein, 33 aa, Zea mays
  VARIANT 30..33: note = Derived polymorphism lacks residues 30 to 33
  VARIANT 20: note = Ancestral polymorphism is P, Derived polymorphism is L
  VARIANT 19: note = Ancestral polymorphism is S, Derived polymorphism is L
MASSSSSFHNSSLPNLFSSPSQHKNTRLQWYVC

SEQ ID NO: 15416 - protein, 219 aa, Zea mays
  VARIANT 119..219: note = Derived polymorphism lacks residues 119 to 219
  VARIANT 169..219: note = Derived polymorphism lacks residues 169 to 219
MGYSICGCWAAISFPTLYYVTIPSLCFLNGISLFPEITNPWFVPFAYVVVAAYSCSLVESLQCGDTAVEWWNTQRMWLFRRITSYLLAAIDTICRMLGVTESGFTLTAKVTDSQSLERYKKGIMLFGSLSTMFVIITTVALLNLACMMLGVAKVLLCKGAVSLGAMFVQTVLCALIVAINFPVYEAMFVRKDSGRLPASVSVVSLCIVLPFCILLPTKL

SEQ ID NO: 15417 - protein, 592 aa, Zea mays
  VARIANT 33..592: note = Derived polymorphism lacks residues 33 to 592
  VARIANT 117..592: note = Derived polymorphism lacks residues 117 to 592
  VARIANT 139..592: note = Derived polymorphism lacks residues 139 to 592
  VARIANT 294: note = Ancestral polymorphism is P, Derived polymorphism is R
  VARIANT 327..592: note = Derived polymorphism lacks residues 327 to 592
  VARIANT 383..592: note = Derived polymorphism lacks residues 383 to 592
  VARIANT 500..592: note = Derived polymorphism lacks residues 500 to 592
  VARIANT 544..592: note = Derived polymorphism lacks residues 544 to 592
MSQKVTDGRIRRARGKKLRLFVEKEVTATRQGYRSARIPLNEEAQIDMAMRNSLRDSFSTLEHDSCSPFDKSTGSASGAASCSTGKQSRLSRYYKNTQDTSRGPFDIDLAHSRTQVQPRIDVMLERGHKEKLGIALAKWFHANDIPGRKADCPYFRSALKLAQQLGDGVPIPRGREIDGPLLDTNYADMEAHMAKFKEDWKDYGVTVMYDSWTGPTMMSIINFMIFCNGRMFFHKLHAMMREKIGGELVRWNATRFGTVFIFLQSFWTEKINLSCGWHQLIGRTKSVSMSSFLPKMMSAMAKMRANLGDDPINKTLCDRLMQVINRRLDYMLNDTLMLAAAALNPEALYTSKMARKPKFQHAVTMAIKKLSSSSSKASAAIDQYTFFRKQAGLFGGEEAKDLALNGRASAANPIMEWLCSSRSESVPTLDENDEPESPNRPSGFVLEELGGLNEEEMILLNSRIGSGRKNVRKRKVVKEDIGDDFLSDSSEGGGSPTYNESGDSDSNDGGGDDEDGDPSGPSSAARPPTHVATDQYNGHSQDEQPAPLCPRSKRQKKLSIKGLYMLEKVNDLIFKHKHKNMAYAWTDSMARF

SEQ ID NO: 15418 - protein, 208 aa, Zea mays
  VARIANT 58: note = Ancestral polymorphism is N, Derived polymorphism is T
  VARIANT 60: note = Ancestral polymorphism is P, Derived polymorphism is L
  VARIANT 65: note = Ancestral polymorphism is T, Derived polymorphism is I
MRSLKSIYWQVTGIDDQLKTIGMEILENCDGLPLAIKVIGGLLSTEYPSEHEWKSVLNKPAWSLTGLPPELDNRIYLSYEDLSPQLKQCFLYCSLFPKGVNIIHGVVTKMWISEGFIQPPDGSSNSSPQYGFEEIASEYYQELIKRNLIEPIIEYSLTGFRCTIHDVVRTFAEYMAREESLVVVGREQAATGIGGGGGMHVKDTFTLR

SEQ ID NO: 15419 - protein, 264 aa, Zea mays
  VARIANT 88: note = Ancestral polymorphism is L, Derived polymorphism is R
MQVMYGNGTAVVQLEHRKKSWPNYTLKALLFACAMLFSAYMNLSSLTSITIKILFVVDIIVFFIINGVLYINPPDWGNALVCISCLLLQVALCLLTVPFNGCYAFAIFLVVCLILVVTLLQPKFQHSVKKYVLPTFTTNDGNTQGDIGDQENHYLNHLFDISNGIATCGGLVTGIMGYDSYMVRPVTAAGWLHLLLHCTSRTLSDDGHSNESCVPTPCRLPRHRAEGSPPAHYRYRLNLICSPLSDHSKSCKLDSNHRKNLVML

SEQ ID NO: 15420 - protein, 74 aa, Zea mays
  VARIANT 42: note = Ancestral polymorphism is P, Derived polymorphism is L
  VARIANT 31: note = Ancestral polymorphism is A, Derived polymorphism is V
  VARIANT 8: note = Ancestral polymorphism is S, Derived polymorphism is N
MVYAQHLSRGLPDPAVDLLCPGVLVFAVGLVGNKPLWWSRDPVASEAGSSAQPAAEPSPGLRSHAIETESGREE

SEQ ID NO: 15421 - protein, 408 aa, Zea mays
  VARIANT 257..408: note = Derived polymorphism lacks residues 257 to 408
  VARIANT 189: note = Ancestral polymorphism is E, Derived polymorphism is V
MTIELRSSNTSSGRHWKTGCKSVGRPLRWGDGSSSISNRTKLYVVADEFSMPTSRVMFKEVDAPSPSPALWNGPQEAGKKVEEEFSTYPLSVLMMSVKNNTKAHIKEPEEVKLLKNLSHPNIVRYLVTVREEDTLNILLEFVPGGPINSVAFGEARFIPRAFYFFKATLDENSSLADIEVALIPILASELPEFLGGSCTCSDKGGCLGSNKGPWNDPYILKLIHNLEVGCMRETIKPVSEGGERSTSSFRLEQMKWQGMLSDTSNDESGSDVDDFGPSFVHKVSGYGCLTLVREEVKGTDCATYLSCDDQSHPDMVPEFYHGVQRTTEMVQKQMADFRQYSTNGRPRDLGILFSYHSGDVKHVSIIGLKAARVFVKGTRCFFIPGTQIRIHVYHRECYRKELELKLYR

SEQ ID NO: 15422 - protein, 167 aa, Zea mays
  VARIANT 13: note = Ancestral polymorphism is C, Derived polymorphism is Y
  VARIANT 25: note = Ancestral polymorphism is P, Derived polymorphism is S
  VARIANT 27: note = Ancestral polymorphism is A, Derived polymorphism is T
  VARIANT 31: note = Ancestral polymorphism is T, Derived polymorphism is A
  VARIANT 32: note = Ancestral polymorphism is S, Derived polymorphism is L
  VARIANT 44: note = Ancestral polymorphism is A, Derived polymorphism is G
  VARIANT 51: note = Ancestral polymorphism is F, Derived polymorphism is L
  VARIANT 54: note = Ancestral polymorphism is A, Derived polymorphism is V
MASDGTAEMRMFCFDNIAKRIIGKPCASLLTSATSTSNIPPDLAAIVSLKFTFAVVYNEMSFQVSEKELFIKSVIASHGRDLTFPSPKLKIPVQPSTPTQLLGAAKQPVSPSSALSKLSTAISPENSPQTEDNLQNEDQNILAFESPPKRARRKSLKFDCDKNLHDE

SEQ ID NO: 15423 - protein, 127 aa, Zea mays
  VARIANT 42: note = Ancestral polymorphism is T, Derived polymorphism is M
  VARIANT 80: note = Ancestral polymorphism is I, Derived polymorphism is T
  VARIANT 85: note = Ancestral polymorphism is S, Derived polymorphism is N
MVWDQLKSSSFQVNEEMIETLFICNPANAPTKEATRRPVLLTPRAENKVLDPKKAQNIAILLRALNVTKEEVCDVLCEGIWNRYNELYLQSPVLQLKIILAVEPLIPSEGPRIGEHIFGYTESNVAG

SEQ ID NO: 15424 - protein, 153 aa, Zea mays
  VARIANT 112: note = Ancestral polymorphism is W, Derived polymorphism is C
  VARIANT 37: note = Ancestral polymorphism is A, Derived polymorphism is V
  VARIANT 21: note = Ancestral polymorphism is G, Derived polymorphism is V
  VARIANT 10: note = Ancestral polymorphism is A, Derived polymorphism is V
MAVAGAIFGVAFGGWMNDKFGRRPSIILADALFFGGAVIMAFSPTPRVIIIGRVFVGLGVGMASMTAPLYISEASPARIRGALVSTNGLLITGGQFLAYLINLAFTKVPGTWRWMLGITGVPALVQFVLMLMLPESPRWLYRKVDSSICFYKK

SEQ ID NO: 15425 - protein, 124 aa, Zea mays
  VARIANT 62: note = Ancestral polymorphism is G, Derived polymorphism is S
  VARIANT 87..124: note = Derived polymorphism lacks residues 87 to 124
  VARIANT 89: note = Ancestral polymorphism is T, Derived polymorphism is M
MKCRNGSTSIKKAKKTNRELHVRDVTLSSNSRAATRKVWVVLVEDTLANKYGGGIEKLSHEGKLAFVENQLFDIFDSAANPIDGNYWWTNAEDPFQCLAACMDLSDALRSPSPYHAVCHLLIHQ

SEQ ID NO: 15426 - protein, 151 aa, Zea mays
  VARIANT 71..151: note = Derived polymorphism lacks residues 71 to 151
  VARIANT 46: note = Ancestral polymorphism is E, Derived polymorphism is V
  VARIANT 27: note = Ancestral polymorphism is A, Derived polymorphism is T
MYVWHHILPSGKMGLSISYPPDDYLPAVEDDMGRLFIWSLSFDDMEAAADSPSYSPSALPPAFGSGKLIMEGSLGFFERRETDSVQMQNVLSIRNPKPPNREACSSVSPGHENLHNSIDEAIMLKDMYHFHAHLWWEIEIQCGLNHPNVPR

SEQ ID NO: 15427 - protein, 436 aa, Zea mays
  VARIANT 247: note = Ancestral polymorphism is G, Derived polymorphism is D
  VARIANT 287..436: note = Derived polymorphism lacks residues 287 to 436
MEAAAAGSGGSGAATKLQKVYRSYRTRRRLADSAVVVEELWWQALDFARLNYNTISFFDEPKPKAAASHWNRIGQNALKVGHGLSREPKALKLAFEHWIEAIDSRHRSGHNLHFYYNLWCQSQAGQPFFYWLDVGDGKEVDLPECPRTLLKKQCIRYLGPKERELYEYIINEGKVIHKQSGEPLDTSKGPKDAYWIFVMSTARRLYAGKKEKGVFQHSSFLSGGATIAAGKFTVKAGVIKSIWAYSGHYKPSTEDLNNFMKFLEENGVNLKEIEMRPFKKGDYHNDSMPNETQNIIVGTNPPQLILSSDTKEGDEGKDAPIERAKVTYHRTLSGGLHNPKGTDVPQKAILERIKSKSETESYQLGLKLSLKWSTGAGPRIGCVKDYPTKLRMQALEMVHLLTGASTIPHSSLLAEAQECHDPDRRLEDLVKRAQAN

SEQ ID NO: 15428 - protein, 265 aa, Zea mays
  VARIANT 156: note = Ancestral polymorphism is G, Derived polymorphism is V
MMDIVYRDLKPENVLVRADGHIMLTDFDLSLKCDPTAPTLAHVISDPLSLAARSGAAASCAISSCIVPAASCFQLFPGRGRRRRCWRTKKLSSNSGNNFASSGGGGGSSGSGLELEFVAEPVELRSMSFVGTHEYLAPEIVSRQGHGNSVDWWTLGVFVFELLYGFPKDPTVLSAARDLVTALLAKDPARHLGATVGVAAIKRHPFFAGVNWALLRCAAPPYVPPPFSVVANAKAGGRSNGNAVVDDDDDDVSDDSCPGTPVEYY

SEQ ID NO: 15429 - protein, 452 aa, Zea mays
  VARIANT 117: note = Ancestral polymorphism is L, Derived polymorphism is P
  VARIANT 63: note = Ancestral polymorphism is A, Derived polymorphism is V
  VARIANT 58: note = Ancestral polymorphism is T, Derived polymorphism is M
  VARIANT 50: note = Ancestral polymorphism is R, Derived polymorphism is C
MLSPPTTTAAAQHHCHRHHSTGDGVVISQADYQGLQAIKHDLSDPYIFLRSWNDSGVTACSGAWAGIKCVLCSVVAITLPWRGLGARSPRAGSASSSAFAGAIAGAVPSSLGFLTDPCGVYLFNNRFSAVANSTRLIQLNLSRNTLSDAVPVEVVASASLVFLDLSYNNLSGPIPDAFAGSDKSPSKLLNNNNNNKEAITGSYQLVFLSLAHNFLDGPIPASVTKLQQLDLYSNSLNGTIPTQLATLADLKSFNVSYNNRSGAAPASLARKFGEPAFTGKGNVLLCGYSASTPCPASPSPAPASPAEEPPRGRGSRKFSRKALVLIVVGIIVGVLVLLLLCCLLLCFLRRNKRSSGGTAGTRSEKQAAAKEAGGAGAGAAAAGHGEKPGSGAGEVESGGDVGGKLVHFDGPLTFTADDLLCATVEIMGKSTYGTVYKATVEDGSLVIANSFS

SEQ ID NO: 15430 - protein, 168 aa, Zea mays
  VARIANT 81: note = Ancestral polymorphism is R, Derived polymorphism is C
  VARIANT 79: note = Ancestral polymorphism is A, Derived polymorphism is T
  VARIANT 55: note = Ancestral polymorphism is A, Derived polymorphism is T
  VARIANT 43: note = Ancestral polymorphism is V, Derived polymorphism is M
  VARIANT 39: note = Ancestral polymorphism is Y, Derived polymorphism is C
  VARIANT 34: note = Ancestral polymorphism is P, Derived polymorphism is L
MPGADVGADEQQEPAAARAEEMPEPAPAPAAAPPLTIFYGGTVVVFEDFPAEKTAEVMRPAAGDDLPIARKASLPWFLTKRKDRLVERAPYARPSSPAKEPEKKTNEHPNLCSPRFPRVWKSSGMAYDPLRTHLERRAAEQLDIFKEMVSLRVFESCSYYIQDCQVLL

SEQ ID NO: 15431 - protein, 202 aa, Zea mays
  VARIANT 134..202: note = Derived polymorphism lacks residues 134 to 202
  VARIANT 186..202: note = Derived polymorphism lacks residues 186 to 202
MACKVKGIFKGLNAFSQIFDERHHGVLRLVVPGKLRSAHWYLLGFSRGTFLSNFYGSYIHDSRIGVLIEVNCETDFVSRGDIFKELVDDLALQIAACPQVQYISIDDVPEEVVKKETELEMQREDLLTKPKQVQAKIVEGHVKKRLGELMLFEQPFIKNDKVTISEWLKQTIGTTGENMKVRRFARYNLGEGLEKKSQDFAA

SEQ ID NO: 15432 - protein, 371 aa, Zea mays
  VARIANT 255..371: note = Derived polymorphism lacks residues 255 to 371
  VARIANT 61..371: note = Derived polymorphism lacks residues 61 to 371
MTNLNSQVGVLRSIIINSLVALYIIVSFIILFYKGHEVQMPMVVKHEHQEMQAKVAAEHHEQLRGKDTSREECNWSTGRKDVMYQHWRWQPHGCDLPRFDAIRLLEKLRNKRLVFVGDSLNRNQWVSLVCMVEISIPDSRHKMHTFNGSLISFKALEYNATIDLYWSPLLLESNSDDPLVHRVEHRIIRADRIEKHASAWRDANIIIFNSYVWWRKHKADMRMKVMYGSFESGDARLDEVEMIDGFEIALKKLTEWLGENIDKNKTRIFFAGSSPSHSWASNWGGENSNKCLNETEPIYKVGYKAATTDYSMMEKAKSYFGTLEEKGIHIQILNITELSEYRKDGHPTVFRKQFAPSQLCGLHALVPPGCS

SEQ ID NO: 15433 - protein, 405 aa, Zea mays
  VARIANT 42: note = Ancestral polymorphism is S, Derived polymorphism is F
  VARIANT 65: note = Ancestral polymorphism is L, Derived polymorphism is V
  VARIANT 147..405: note = Derived polymorphism lacks residues 147 to 405
MAAEMVKAATSDKLKEMDWAKNIEICELVAQDPGKAKDVIKSVKKCIGSRSKTTQLFAVMLLEMLLNNCGEPVHRQVIDNGLLPILVKIVKKKTDLPVREKIFLLLDATQTSLGGAKARFPQYYEAYYELVSAGVQFSNRPNVLVTRAEVPVPETRTEPNNESLSTRLTEAQQEVHTQPVPDASIVQKASSVMEVLRDVLNSMDPRHPEGATDEFVLDLVEQCTFQKQRIMHLVMTSRDETLVSQAIELNEELHKVLVRHDALLSVHPTTAVASNIKEEEEEEDAESLYRRLRKGKALSQDYTDDLVPSFRSMPEDKLRRPLTIQSPHPDKRLGALNIRSPDREEPRLDPAPLIPPPPAKHAERERFFREKSIDGVASLPGHMRGLSQHSRDGSSSCSGSTDYGD

SEQ ID NO: 15434 - protein, 345 aa, Zea mays
  VARIANT 16..345: note = Derived polymorphism lacks residues 16 to 345
  VARIANT 95: note = Ancestral polymorphism is P, Derived polymorphism is L
  VARIANT 166: note = Ancestral polymorphism is C, Derived polymorphism is Y
  VARIANT 279: note = Ancestral polymorphism is A, Derived polymorphism is D
  VARIANT 294: note = Ancestral polymorphism is L, Derived polymorphism is M
MQPPGKQPPPRIPYLQRTATGSQHNAGVRADVVRLGSGEGADYCSSSAARRLEKVKDEAEEAGKAVVAVAAASWSFRLRSLRKSLEGEQVAAGWPLWLSAVAGEAIQGWIPLKADSFEKLDKLSVFNLFKLDDSGFESRRLSFRKQETTGLLVVIKPLMFDSTADCPQHIEHVIVSSCGGESTGIDANGNSYDLSTKLLHLAWHPSENLIACATANSLYIKFTEICASENVYGPLPTVDLFLSVYGDMMQWKDIAESVASAELSATEYWTKNTTKETAAQVAKDLCGEMQRWFLAFVEDALHVDGKWKHSINTPTLVSQLNKISGWLEEVEHEIVEEEWMKKIGV

SEQ ID NO: 15435 - protein, 583 aa, Zea mays
  VARIANT 202..583: note = Derived polymorphism lacks residues 202 to 583
  VARIANT 40: note = Ancestral polymorphism is P, Derived polymorphism is S
MLSSSGPCNSYTDTNEPLRSGNAGSSPNREMRSTEQERAPYLDLAEFRGEGSFYIAVVVRIKVTHYVLTPYLCAQITTLYVSGVLNTVLSSEHQKEILRYIYNHQNEDGGWGLHIEGHSTMLSSALNYVALRLLGESPNGGDGAMEKSRKWILDHGGATFTAAWGKVLGVYDWSGVNPVPPEFWLLPYYLPFHPGRMSCYCRMVYLPMSYIYGRRFVGPITPLVMELRKELYTDAYDEIDWNKARTECAKEDMYNPHSLVLGISWTILHKFEPIMFHWPWRKLRNKALAFIMRHIHYEDESTHYINLGAVSKALSMLACWIEDPDSEAFKCHIARVPDYLWIAKDGMKTQLTGMSNVSSAIQALALFRKLNPGHRKEEVENCVSKGADFIQNIQRTDGSWYGSWGVCFTYAAWFGVTGLVCAGRTFENCTAIKKACDFLLSKELPSGGWGESWLSAHNEVYTNLNGNRPHGTNTAWALLALIEAGQAERDPVPLHRAAKVLLNLQLEDGDEFPQQLLYAKDPILIYYHLQHYADKNVYNRRSLEFSYKLPWLVTPLTGISFLSGLSQSIAVRCCLQARNRNMI

SEQ ID NO: 15436 - protein, 234 aa, Zea mays
  VARIANT 86..234: note = Derived polymorphism lacks residues 86 to 234
MLSSALNYVALRLLGESPNGGDGAMEKSRKWILDHGGATFTAAWGKFWLTVLGVYDWSGVNPVPPEFWLLPYYLPFHPGRMSCYCRMVYLPMSYIYGRRFVGPITPLVMELRKELYTDAYDEIDWNKARTECAKEDMYNPHSLVLGISWTILHKFEPIMFHWPWRKLRNKALAFIMRHIHYEDESTHYINMGAVPKALSMLACWIEDPDSEAFKCHIARVPDYLWIAKDGMKMQ

SEQ ID NO: 15437 - protein, 113 aa, Zea mays
  VARIANT 28: note = Ancestral polymorphism is G, Derived polymorphism is V
MTIRSGDVIEAYVDTAGNDYTTDLWGGGNGSFTKIELGDDEYVREISGTYGPYDNVLNLVTSLNIIVTNVASFSFGNAQGDTFSIPVENGGQIAGFYGRSGWLIDAIGVYIHP

SEQ ID NO: 15438 - protein, 120 aa, Zea mays
  VARIANT 29..120: note = Derived polymorphism lacks residues 29 to 120
  VARIANT 23: note = Ancestral polymorphism is E, Derived polymorphism is K
  VARIANT 10..120: note = Derived polymorphism lacks residues 10 to 120
MDGWSLLKPQYFILQPAVPLSGEFVKGRQLKKTDVFHMPLGNHYHRGNRLIEEATGFVKENINEISLQKKKAFIQESGSYNGIDTNGHRLSCAYTWSRSSPYCRTVSDASQRVITLGVHT

SEQ ID NO: 15439 - protein, 77 aa, Zea mays
  VARIANT 29: note = Ancestral polymorphism is E, Derived polymorphism is K
  VARIANT 64: note = Ancestral polymorphism is M, Derived polymorphism is L
MGADGNDGIVDIFSAHSYYDAAEYSQLAEEDMEGSSTMDQVVKNTQENMSCLSIWWQQFVDASMVIWFIVGLFMCTE

SEQ ID NO: 15440 - protein, 409 aa, Zea mays
  VARIANT 7..409: note = Derived polymorphism lacks residues 7 to 409
MLQIGSQEQREKHTTVMGHDHMSRIKMHMAEGSFGDRIRCQQPGCNEVVDRRVVYCKIHSGELSCQQFSYLQSGLESSGLSVRPVNDSQFKGSVSIAAVPCTEQELHVKHEGGDRGKLKDSSGYTLGQAAQFIFSGASMLCKNDNCSKQAHENSIHCKLHSGGVNKGCMARGCTRGAHGGTPLCIGHGGGRRCVVPGCPNAACGQGRSDRCVRHGGGKRCKFEGCAKGAQGNTDHCIRHGGGRRCRFQGCTKSAQGRTDFCIKHGGGSRCRFQGCGASAKWGTDLCSVHRKSLLGGDNAIPEALAAPSEKRRRAKTPQREAKPSEVFQENVTTAATAGNSTQHTGFLLVAAPVANRDILTNGMAVTGQAAIAPQRIVAPMFMRSPTPSGSVAASAQRWEAGASRGMLGL

SEQ ID NO: 15441 - protein, 416 aa, Zea mays
  VARIANT 332: note = Ancestral polymorphism is I, Derived polymorphism is T
MAMSASSSSRALLRRIGGALLRRSFSSSSAASAGYHVAGGPSYMRGAVFWEPGRPLTLEEFRMPRPKAGELLIKTKACGVCHSDLHVLKGELPFSTPCVVGHEITGEVVDHGTHTPVEIINRFPVGSHVVGAFIMPCGNCFYCVKGQEDLCESFFAYNRAKGTLYDGETRLFLRGNGKPVYMYSMGGLAEYCVVPANALAVLPDSLPYTESAILGCAVFTAYGALRHAAEMRPGDSVAVIGVGGVGSSCLQIAKAFGASQVIAVDVLDEKLQNATTLGATHTVNAAKDDAVERIKEITDGRGVDVAIEALGKALTFSQCAKSVRDGGKAVMIGLAATNVMGEVDITRLVRRQVKIIGSYGARARQDLPQIVKLAESGAFNLQNTISRKCKFEEANGAYEDLNQGKIVGRAVVEIME

SEQ ID NO: 15442 - protein, 172 aa, Zea mays
  VARIANT 21..172: note = Ancestral polymorphism lacks residues 21 to 172
MSPHRPRPQRPHPRPPETWIQPPSSAPPPPPARDLDPRRRRVDASLSCCPPYPTPTTAPNLPSALDLPSGEGSALGSDAWVPVSEVSTGYFIGGDRIFGPDPSSQPCSFSLLPSSVARTTNASLLHVSATLTISSERLPFRDRGGKERRHLELHDQWPHAVGTLRGGAEGFR

SEQ ID NO: 15443 - protein, 185 aa, Zea mays
  VARIANT 144..185: note = Derived polymorphism lacks residues 144 to 185
MFSGLGLWHLFNHITLFVSHASTSSSSYVAPAWFPAPRVRDLELIVMLAGGVCGLATQMLAYSPMPFNADGSIPPERLPNHEHAIMYASLLVYAGSAISLDRRHGRHRHDTLCMLLLAALFAQELFVFHVHSTDHAGVEGRLHWFLQAAAATCLATVLLGAGRLPAELQFAVSLVRSASLAFQGL

SEQ ID NO: 15444 - protein, 204 aa, Zea mays
  VARIANT 162..204: note = Derived polymorphism lacks residues 162 to 204
  VARIANT 188: note = Ancestral polymorphism is V, Derived polymorphism is A
MVYAAPRTGWRRRLRGRGRGGGAEDGRAFSMNLAAPIFSATTYEHCGLPQDGAHGRKVGGGRRRRHGRGCDGGGEAQALGVGMGMCAEREAEGGERGTVVETTEAVAREKIFLGGAGLSVHGRTGRWQNSQRQTTITYLISSRDVEHKGLIGDVPVMLAKPQTFMSASGKSVGQLVSYFKIPLNHLVVIYDDLDLPFAKLRLLP

SEQ ID NO: 15445 - protein, 671 aa, Zea mays
  VARIANT 368: note = Ancestral polymorphism is R, Derived polymorphism is H
  VARIANT 69..671: note = Derived polymorphism lacks residues 69 to 671
MASAVGRARRAQMGFGGGGRLGRQQQLEARGRRRSEMGTRKQGRRCGLERKREKIVVVKCRCFSNSKMRMQVKMTLEKVRVSIATNPHILLIDSAHTFTLNGKAVVRVEAPSSMKNHAPIDLVTLININQSMSWPAASQTEIPSRLDLLKNAMKFIIRQLGDDDRLAIVAFNDKVIKENTTGILEISGSGRMAIEKKVDGLVAMGDTAFKPSLEHAVKLLDDRADKKRAGFIVLISDGLDGQSKWGDESITPTDPIRGLLRKYPVHTFGLGKAHDPKALHYIADISYGIYSSIVTDNLDKIIEAFAVCLAGFKTVVAVDACVDIWSNSLLITRIDPGGYILRGSSGGILVGTLYAGEVKDFIVYFSYRTGSWSGGYYTILNGINARVTYREAPGRQSTTTDTCSVSLPIHVANSSSPPANPCPPYPMVLQQMVRLKVLDLLISVLKEFLVLKGEAASAVHGKEGGDDPVLQAIAASLLQRKWKEFKQSDESWKEAPRNFVNLGGIDEDISAMVGILKRGLGVGCIHSWLSSNQMQRATATGGLPGAHMVATGQFRTPAMNAMVQEAHRHLAREASAHDAGTSIVCKRAVELLDGINKRFDLWCKLDQELPRTNQPSPHQEEGHESRDLTAVLRGDINRARQHDIYLAADHAIKQWRSFLTSVEKTHGHGHI

SEQ ID NO: 15446 - protein, 634 aa, Zea mays
  VARIANT 208: note = Ancestral polymorphism is W, Derived polymorphism is C
  VARIANT 225..634: note = Derived polymorphism lacks residues 225 to 634
  VARIANT 228: note = Ancestral polymorphism is R, Derived polymorphism is I
  VARIANT 256: note = Ancestral polymorphism is T, Derived polymorphism is M
  VARIANT 264: note = Ancestral polymorphism is I, Derived polymorphism is T
  VARIANT 284: note = Ancestral polymorphism is G, Derived polymorphism is R
  VARIANT 379: note = Ancestral polymorphism is P, Derived polymorphism is L
  VARIANT 495..634: note = Derived polymorphism lacks residues 495 to 634
  VARIANT 498..634: note = Derived polymorphism lacks residues 498 to 634
MWLKIAACVRRVASEVFGVSKGDKQEAKDTWWRNDEVQRAIKEKKECFKRLHLDKSATNAEGYKIAKRDAKRAVSVAKGQAFDDLYQRLGTRKGEKDIYRMARIHERKTRDINQIKCIKDGTDRLLVKDEEIKNRWREYFDKLFNGENVGPTLELDDSFDDSNRRSVRRFQEAEIEEALKRMKGGKAMGPDGIPIEVWRCLGARAIVWLTKLFNLIFRSNKMPKEWRRSILVPIFKNKGDVQSCTNYHGIKLMSHTMKLWERVIEHRLRRVTSVSQNQFGFMPGRSTIEAIFLIRQLMERYREQKKDLHMVFSDLEKAYDKVLRNVMWWALEKHKAPTKYITLIKDMYKDAMTFVRTCDGDTNDFPIKVGLHQGSALSPYLFALVMDEVTRDIQRDIPWCMLFADDVVLVDESRAGVNRKLELWRHTLESKGFRLSRIKTEYMICGFSVARHEDGDVSLDGQVVTKKDTFRYLGSMLQKDGDIDEDVRHRISADWLKWRQASGVLCDKRVPQKLKGKFYRTTICPSMLYGAECWPTKRRHVQQLSVAEMRMLRWFCGHTRRDRVQNKDIRDRVGVAPIEEKLIQHRLRWFGHVQRRPPEAPVRSGVLKRVDDVKRGRGRPKLTWDESVKRDLKE

SEQ ID NO: 15447 - protein, 161 aa, Zea mays
  VARIANT 31: note = Ancestral polymorphism is R, Derived polymorphism is C
  VARIANT 116..161: note = Derived polymorphism lacks residues 116 to 161
MSFEALNPRPVAVVIDPIQSAKGKVVIDAFRLINPQTMMLGQEPWQTTSDVGHLNKPSIQALIHGLNRHYYSIAINNRKNELEEKMLLNLHKKKWTDGLILKRFDTHSKTNEQTVQEMLNLAIKYNKAVQEEDELPPEKLAIANVGRQDAKKSIWKSMCRI

SEQ ID NO: 15448 - protein, 459 aa, Zea mays
  VARIANT 251: note = Ancestral polymorphism is E, Derived polymorphism is G
MYQILQLLDDRADKKRAGFIVLISDGLDGQFKWGDESITPTDPIRGLLRKYPVHTFGLGKAHDPRALHYIANISYGIYSSITDNLENKIIEAFAVCLAGFKTVVAVDVCVDIRSSSLLITKIDSGGYILRGSTGGILVGTLYAGEVKDFIVYFSYHTGSWSSGYHTTLNGIAASVTYKEAPGRQSTATDSCSVSLPIHVTDTVYPPENPCPPYPMVLQQMVRLKVLDLLISVLKEFLVLKGEAASAVHGKEGGDDPVLQAIAASLLQRKWKEFKQSDESWKEAPRNFVNLGGIDEDISAMVGILKRGLGVGCIHSWLSSYQMQRATITGLPGSHMVATGQFRTPAMNAMVQEAHRHLAKEASAQDAGTSIVCKRAVELLDGVNKRFDLWCKLDHDLPRTNQPSSHQEEGHESRDITDVLHGNINRARQHDIYMAADHAIKQWRSFLTSVEKTHGHGPDK

SEQ ID NO: 15449 - protein, 135 aa, Zea mays
  VARIANT 7: note = Ancestral polymorphism is S, Derived polymorphism is C
MSSSRRSSSPDSNDTTDERKRKRMLSNRESARRSRARKQQRLEELVAEVARLQAENAATQARTAALERDLGRVDGDNAVLRARHAELAGRLQSLGGVLEVLQMAGAAVDIPEMVTDDPMLRPWQPSFPPMQPIGF

SEQ ID NO: 15450 - protein, 417 aa, Zea mays
  VARIANT 157..417: note = Derived polymorphism lacks residues 157 to 417
  VARIANT 253: note = Ancestral polymorphism is S, Derived polymorphism is G
  VARIANT 271: note = Ancestral polymorphism is S, Derived polymorphism is L
  VARIANT 290..417: note = Derived polymorphism lacks residues 290 to 417
MAFTVTMLAWSVVEHEAPLAAAGELRNALAAVRWGADYLARAHAAAETLYVQVGDGDSDHSCWQRPEDMDTPRTAYSVDASRPGSDVAAETAAALAAASVAFRQLDAAYSAMLLGHAEQLFSFAKNHRGLYQNSVPGAAKFYASSGDEDEMLWAAVWLFIATGGEDYKAFIAGDGNVGGAQTFFSWDNKFVGAQALVAKASDRARAANSPAMLINNDRGHLLADAGNAAALKSQLEQFLCGVLQHNASDGRLSPGGVLWLEPWNNLQFVTSAAFVVAAHSDHLAGAAASSLRCGAATLPPSQLLAFARSQADYILGANPERMSYMVGYGARFPEQVHHRGASVPSIKSSPGKITCKGGFAYYSRDTPNPNVLVGAIVGGPDGNDRYDDSRPNYKQTEPSTVTVAPMVGVLARLSKQN

SEQ ID NO: 15451 - protein, 162 aa, Zea mays
  VARIANT 4: note = Ancestral polymorphism is E, Derived polymorphism is K
  VARIANT 53: note = Ancestral polymorphism is R, Derived polymorphism is W
  VARIANT 72: note = Ancestral polymorphism is D, Derived polymorphism is N
  VARIANT 81: note = Ancestral polymorphism is R, Derived polymorphism is C
  VARIANT 99: note = Ancestral polymorphism is R, Derived polymorphism is Q
MLQEIKSAYQILAHKYHPDMNKSPEAEEKFKEISAAYELGSDRCTLCRRLNLRFSSSLFIPWICPVVVQAFDFCYYNIQRRELILIFFVVVLFPCCLCRWWLGCFDICRLAVKSKGTDKPKGSKGNVDKDPNKPDSQHFLSAGAVAEAQRQQGERRQGPQQG

SEQ ID NO: 15452 - protein, 104 aa, Zea mays
  VARIANT 13: note = Ancestral polymorphism is G, Derived polymorphism is D
  VARIANT 16: note = Ancestral polymorphism is R, Derived polymorphism is L
  VARIANT 46..104: note = Derived polymorphism lacks residues 46 to 104
  VARIANT 52: note = Ancestral polymorphism is D, Derived polymorphism is Y
  VARIANT 82: note = Ancestral polymorphism is P, Derived polymorphism is L
MQVFTAAHQIANGMERCVCRFAVQWSDGPHAGSMEEVSIERVCCLQSSPVQDPVLIEFLDGVTKLVGDTNGETMSQEIRAAPAAEGGVPANAPPGFQRKFGSSK

SEQ ID NO: 15453 - protein, 864 aa, Zea mays
  VARIANT 128..864: note = Derived polymorphism lacks residues 128 to 864
  VARIANT 175..864: note = Derived polymorphism lacks residues 175 to 864
  VARIANT 325..864: note = Derived polymorphism lacks residues 325 to 864
  VARIANT 326..864: note = Derived polymorphism lacks residues 326 to 864
MPMSCHDHAAGHRRLFQLRTTTTTTRLFLSLLVAVLLVADVCSAARQFSTVAISHAPNATLVCALVTAAADDDAGSPGSKQLRCTSLPDGEQFVYPSADIPYNAIAAGTDFLCGLMAPLGGHAAMRWWSFTEEFAANRSRPVGRRLYWGPSLRSLSAGGSHVCGLSDDHDPTCWEWPHLDLPKGLDFSRIALGHDFLCGIDKLDNTSMSCYGAMAAPSLAPDPAPLRTVAAGHRHACAVDAEGGFACWGDGDGDVPEVPAHELPDDMLAMALGNGTTCILSGSGRVRCWGAVQVPDQYRTADFLAIEADGDAVCGILNSNYSVACWGRSDRFGAGGSLVYNSTMPGACARKKSCPCDIISGSGALCGTGGAEGGEELAVCRACATPLNASRILIANGRAGPAAGGDAGKKKAKTLAVAVGVGAAVLAAAAVALYLVAYRKPDKKKKTLTLRLGERSSRRPCRDVEAAMVMPAPQVSPLRSARPLGCEEFTLRDLSRVTDGFSNEKKIGCGSFGSVYRARLPDGREVAIKRAERSSSGGRRRRRFDAERAFRAELRLLSRVNHRNLVQLLGFCEERGERILVFEFMPHGALHDHLHCSSSSGNGGRSPLFTSWEARLRVALDAARGVEYLHCYAVPGIIHRDVKPSNILLDGDWTAKVSDFGLSLASGSSAAAAAASSSATAGTVGYIDPEYYRLQELTERSDVYSFGVVLLELVTGRKAIHRTSQDGSGSPRNVIEFAVPAVETGSIARILDERVPPPRGHEVEALARVAKIATECVRPRGRARPIMSEVVAELEWAVTLCEESVVASDAAVGTVGGQQNSSRHGGSDLPRSESDGPSPFHTRELGFGFGPSRPVTHGRSHSTM

SEQ ID NO: 15454 - protein, 310 aa, Zea mays
  VARIANT 41: note = Ancestral polymorphism is A, Derived polymorphism is S
  VARIANT 45: note = Ancestral polymorphism is E, Derived polymorphism is V
  VARIANT 56: note = Ancestral polymorphism is F, Derived polymorphism is S
  VARIANT 80: note = Ancestral polymorphism is D, Derived polymorphism is N
  VARIANT 131..310: note = Derived polymorphism lacks residues 131 to 310
  VARIANT 136..310: note = Derived polymorphism lacks residues 136 to 310
  VARIANT 160..310: note = Derived polymorphism lacks residues 160 to 310
  VARIANT 198: note = Ancestral polymorphism is I, Derived polymorphism is N
  VARIANT 199..310: note = Derived polymorphism lacks residues 199 to 310
  VARIANT 214..310: note = Derived polymorphism lacks residues 214 to 310
MLAEFDPVIQEHVRRITNEETQAHYLDNKIQNELIHLLASAIKSEIIKKIKRAKYFSVILDCTPDASHQEQMSLIIRYVDLSSNHANIEESFLGFLDVNDTTGQGLFDVLQNELKILDLDIDNILKDNITGLTPKSVSATRWESRIESVKAIRFQCADFQEALLQVADADNDAKTSSEAKGLANNELGEYEFIVAIVIWYEVLFVVNIVSKHLQAKDMLIDDAIDKVQGLISFFKNYREIGFLEALQTAKDIAHEMDIDTSFRKRREIKRKRHFDENPDEANIATQSAEESFRITYFLPIVDQAVSSLTR

SEQ ID NO: 15455 - protein, 153 aa, Zea mays
  VARIANT 139: note = Ancestral polymorphism is K, Derived polymorphism is N
METAALTSHSLQRPAAAAAAPAHGQRRRVGAAGLRHRQPRAGGRIRALPSAEVISEILSPKLVPGSPADTGDVSSLVPVSALMLLFYFVSNWVVPELLLKGLKEPKPEDEASTSFAASADNAAAAGPADDGGARKIRLKVKKKKNGKATIVKV

SEQ ID NO: 15456 - protein, 86 aa, Zea mays
  VARIANT 5: note = Ancestral polymorphism is V, Derived polymorphism is I
  VARIANT 20: note = Ancestral polymorphism is E, Derived polymorphism is K
  VARIANT 27..86: note = Derived polymorphism lacks residues 27 to 86
  VARIANT 68: note = Ancestral polymorphism is T, Derived polymorphism is I
  VARIANT 84: note = Ancestral polymorphism is N, Derived polymorphism is Y
MLEAILLFQATVSGMLLTAEMAFKCARGLPPEVAAEPIVKEAVEAKGLRDDTTCIVIDIISPEKPKRTIQSQRTPGKGLVLLKNSF

SEQ ID NO: 15457 - protein, 338 aa, Zea mays
  VARIANT 134: note = Ancestral polymorphism is E, Derived polymorphism is K
MAPLGDGGAAAAAASNNLVVSFGEMLIDFVPDVAGLSLAESGGFVKAPGGAPANVACAIAKLGGSSAFVGKFGDDEFGHMLVNILKQNNVNAEGCLFDKHARTALAFVTLKHDGEREFMFYRNPSADMLLTEAELDLGLVRRARVFHYGSISLISEPCRSAHMAAMRAAKAAGVLCSYDPNVRLPLWPSPDAAREGILSIWKEADFIKVSDDEVAFLTRGDANDEKNVLSLWFDGLKLLVVTDGDKGCRYFTKDFKGSVPGFKVDTVDTTGAGDAFVGSLLVNVAKDDSIFHPSQNEEKLREALKFSNACGAICTTKKGAIPALPTVATAQDLIAKAN

SEQ ID NO: 15458 - protein, 335 aa, Zea mays
  VARIANT 134: note = Ancestral polymorphism is E, Derived polymorphism is K
MAPLGDGGAAAAAASNNLVVSFGEMLIDFVPDVAGLSLAESGGFVKAPGGAPANVACAIAKLGGSSAFVGKFGDDEFGHMLVNILKQNNVNAEGCLFDKHARTALAFVTLKHDGEREFMFYRNPSADMLLTEAELDLGLVRRARVFHYGSISLISEPCRSAHMAAMRAAKAAGVLCSYDPNVRLPLWPSPDAAREGILSIWKEADFIKVSDDEVAFLTRGDANDEKNVLSLWFDGLKLLVVTDGDKGCRYFTKDFKGSVPGFKVDTVDTTGAGDAFVGSLLVNVAKDDSIFHNEEKLREALKFSNACGAICTTKKGAIPALPTVATAQDLIAKAN

SEQ ID NO: 15459 - protein, 186 aa, Zea mays
  VARIANT 24: note = Ancestral polymorphism is E, Derived polymorphism is K
  VARIANT 31: note = Ancestral polymorphism is G, Derived polymorphism is S
  VARIANT 33: note = Ancestral polymorphism is R, Derived polymorphism is Q
MVNHILDLMGLALSAFIVLPPKKEVTRTRHGYRSARISLDEEAQIDVAMRNSLRDYFSTLEHDSCSSFDKSTASASGAASCSTWKQSRLSRCYAREGHKEKLGIALAKWFHANDIPGRKANCPYFRSALKLAQQFGDEIPFPCGREIDGPLLDTNYANWRLTWLNSNSMGRIVELQSCVIHGKVLP

SEQ ID NO: 15460 - protein, 382 aa, Zea mays
  VARIANT 29: note = Ancestral polymorphism is R, Derived polymorphism is W
  VARIANT 176: note = Ancestral polymorphism is E, Derived polymorphism is K
MEGAAAGWPEPVVRVQSLSESGAATIPARYVKPEAERPASAAGEEEGGGGIPVVDLSSPATARAVSEACRDWGFFQAVNHGVPGELLRRARGAWRGFFRQPMEVKQRYANSPATYEGYGSRLGVEAGALLDWGDYYFLHVRPPHLCDPRKWPHLPPGLRRIGSSEELMYLRAYGRKTTEEYSREVAALCGRLLAAMSAGLGVGEARLREAFGGAEGAGVCVRVNYYPRCPQPELALGLSSHSDPGGMTVLLADDRVRGLQVRRRGAWVTVDPVPDAFIVNVGDQIQVLTNATYRSVEHRVVVNAADERLSVALFYNPRSDLPLAPMPELVSPDRPALYCPMTFDDYRMYIRRKGPRGKSQVDSLKVADAVDADADADGRRCY

SEQ ID NO: 15461 - protein, 77 aa, Zea mays; identical to SEQ ID NO: 12555
  VARIANT 59: note = Ancestral polymorphism is E, Derived polymorphism is K
  VARIANT 57: note = Ancestral polymorphism is R, Derived polymorphism is Q
  VARIANT 54..77: note = Derived polymorphism lacks residues 54 to 77
  VARIANT 46: note = Ancestral polymorphism is P, Derived polymorphism is L
  VARIANT 6: note = Ancestral polymorphism is R, Derived polymorphism is W

SEQ ID NO: 15462 - protein, 245 aa, Zea mays
  VARIANT 208..245: note = Derived polymorphism lacks residues 208 to 245
  VARIANT 99: note = Ancestral polymorphism is S, Derived polymorphism is L
  VARIANT 72: note = Ancestral polymorphism is R, Derived polymorphism is W
  VARIANT 66: note = Ancestral polymorphism is A, Derived polymorphism is T
  VARIANT 57: note = Ancestral polymorphism is E, Derived polymorphism is A
  VARIANT 55..245: note = Derived polymorphism lacks residues 55 to 245
  VARIANT 27..245: note = Derived polymorphism lacks residues 27 to 245
MCWQHISMKDPMSQELLEAVEQERNIRANPSRNTVVFHHPMLGDFEIPVGADDAELEERIIQHLAAAAAVRRSHRHHNRRDGHQSRSGASSHPHFLVLSADERTISGQEGDYEQAPAVASGRPLRTLVEQERTRGLGSKVAMFQYSSVEIYNACKPQPTLEIHNPDMHKDAPRGASSSAAQRLTVDAGLPVLPGLDDILDVPEGLDGQGNDISSWFTDGLDDSLQDIDLSGALEIPDDDLTQLGF

SEQ ID NO: 15463 - protein, 246 aa, Zea mays
  VARIANT 36: note = Ancestral polymorphism is G, Derived polymorphism is A
  VARIANT 40: note = Ancestral polymorphism is A, Derived polymorphism is V
  VARIANT 50: note = Ancestral polymorphism is G, Derived polymorphism is D
MLHVLSTQNRLLSVLSSLTSAHFNYARQLTAQVGCGSVLAVCCRFATYPDASNCCKLGKHMMTEMLKSKQHTRKLICSSMGARMDSEPKSWRILGLTAYVLYGCHCLGSHFTIFPIICLYCSILTADVLYDLGTALEVVSPLCPQLFLEVAGLGNFAKGMVVVAARATRLPIYSSFAKEGNLSDLFAKGEAISTLFNVMGIGAGIGLASTVCSTTQGKVHICRMTYHRLSYHYSCSITPSSGKYTQ

SEQ ID NO: 15464 - protein, 1715 aa, Zea mays
  VARIANT 730..1715: note = Derived polymorphism lacks residues 730 to 1715
MPPPPPDRRDYLYREGRRHDGGVGDSLLPPAPTPPRWRDSPYHPPPPPPLRDPARPSPRRAPPLASSGGHAPRECSDLRPPPPRRPPLVPLISSNRSAISEGYYRQGGGAYDRSYPDDPPSVYTPSRSDRYWPEDDDGGYKGFGRYGSGGRRDGRDMRGSYRKSPYRGGYGSDFSRNHSEQPPPPPPRRSPLRSVAVPICYDPPGNRINRGDRDNLPRVTPWRRRESRSEVADADGPLSVGQSTRLSASGKEASAQPLAAAGPHGTEDEAPRKKARLGWGQGLAKYEKQKVQGPSDPAEVVADVSSGDGEQKTSLAPAPSVASVFPAAPLPESAPAPPAALALSSAPMRCSSPVTAPPYCSSAPEDKSCEMTPNTVTNSTKDVLEADGKTFNNEFSIKLDQLGDDPINGLTNILVELMQHNDSCSGDSNGPTSTCKLLQLKESISKEIEKTELQIDSLEGELKSVNTEAVTTLESSPTGVTHTENLSPSGGTSKVPGSAEICDTFDMIKEPGELIVSPKVPVVQDADVKGVDMMEVETAPVRNAKTVPSEESAVTPGVAEGKACAAADLSSLIASEEAGSQNDIDNDRPKTSLCHADSMKIKVSDELPVKQWTYCDHMSDLHSSFTSANNDIAKEMNEVLFKSLPAGTSALDLLASSDLLSQRKIDLIVKERLGVRKTRLRLKEQILTMKFKAYRHLWKEDVRLLSAKKQRLKSNKRIDQNNRTSQIGSQRQRFSNRSRLAMPAGNLSTFSTPEMSDVARKLFSESQIKRCRNYLKMPALIIDEKEKEHLRFLTKNGLVVDPVLVEKERIMINPWTQDEKEIFMEMLAKFGKDFSKISSFITHKTTADCVEFYYKHHKSDSFREVKKLLDLHQQLPASNYLGAKSGQKWNPESNAASLDMLGVASAEAAHDLEYANKVEKISVKSLIRTAYGSNVSFVTKKSSDKECIDNVPLHERESVAADVLAGICGTPSPDGMGSCITSSADPGLKISMKRVEHVLSQENDKNVNEEESLSDQECEFDPVDWNDDEKSIFIEAMNNYGKDFSRISSCVKSKSYEQCKVFFSKARKSLGLDLIHQGAADVSMPASDTNGGRSDTDEACAVEMDSAICRKQSCSKIVQDVCPTEGAILGPDSVLISKQTEGDISNRCIVDVKIEEDDKEADKNCSNVDDKRSSDSTHQAGPININCPESTDKLQGTDDAVDQVNMHSSVLNSSNEHAMAMHSEVRSSLHSVDVLQTDKAEGTGTDPSQVEECSHHAVYTPMTAGNSGSSAFLTSDSGIKDNVHISNMSGASTVSPAFTSNYQHSLPGDMPLSKPKPLVTSLTPKDLMPVQFSSVLPDPTAFRFEGIKPNFEDSSGNKVSSALGAKDICKYPAFKDPSDNEHDTLFRNIDGYMNNHLTTELPVFSQRTASGTVSTSQTKFQNGRSSSVCLPNSSEGIQWPRKPEEVPEDSLRPCARNAKTEGGEKQKRPGDVKLFGQILSHQPTLPSSGSLCNGSQSKPPSPKIDKTSVRLTNNPRDLVVFSSRPGVSPHVGLEERSVRSYGHLDGSTIQPEPLLVMAKCQRSLASVPFYSAKNSTVGVFPDYQQPSMQPHQLDPKPLEMFSDSQKRNGLELVSGFGGAGILVSNVSDHVAALKARYGPGSKIMGSDADPWKDIGSSTIPFGSLTCQQRPSATVGSLEHFYGFITCAAVSRCMDALNIGWKDIDCVSWSSCPRSE

SEQ ID NO: 15465 - protein, 127 aa, Zea mays
  VARIANT 36: note = Ancestral polymorphism is T, Derived polymorphism is M
  VARIANT 34..127: note = Derived polymorphism lacks residues 34 to 127
MASGLNPPLAFYDSPRPIPRTFWAKPDMGGVTTEVTAEPKICSRMSSKPWLGSESTQLAEDVAKTAVHHHHDHHRLDQRVDLVLPPATLQPEVVRTQGSAQRRPAPQGAPRGVAPRGHGERDLLPWR

SEQ ID NO: 15466 - protein, 221 aa, Zea mays
  VARIANT 17..221: note = Derived polymorphism lacks residues 17 to 221
  VARIANT 183: note = Ancestral polymorphism is T, Derived polymorphism is A
MASVMLIFSAKAADIHQIIPLVKAAGPDKMSSNSEMVYGSEEDENDALAFLSAISEHDTELIETVMCHFREKFENLPEKFNGVEEQLLQEFSLDDLFPLVAPLFVETPHSCSRILQVSFAALHDPRGSPVDLWEDGGSDDGYVLVKQDDVVDGMTSFMAACLVSIKKTKDMPPDQLQKALRKTFSAEKKKSKIRKAWDETKVIYNVASWGRHCCHVRQHKA

SEQ ID NO: 15467 - protein, 650 aa, Zea mays
  VARIANT 324..650: note = Derived polymorphism lacks residues 324 to 650
  VARIANT 239..650: note = Derived polymorphism lacks residues 239 to 650
MSTALTILPLLLVVAAAFTIKACAAALEALPGCQDSCGGTAIRYPFGIGAGCYRPGFEIICDGGTPVLFGTTRAVPLSNLSISTAEALVMLPVAWQCYNSSDQVYDVDYGDVQFNKAGVYRISNARNQVVVVGCNSLGYTESQRSEGSDYSYAYYTGCMCFCNNSASAVDGVCSGVGCCHVDFPSGLTNNNMNFRSYTHKNRLDFSPCDYAFFVDKNYTFHTTDLKMDRNRTMPVWLDWAIRDNQTQTCEEAKKGQGHNYACVSSNSDCYNSTNGPGYVCNCSMGYDGNPYVTNGCTGVVGGLLIIAVPVLVALILKEKRKMKEFFEKNGGPTLEKVNNIKLFRKEDLKPILKSINLIGQGGFGEVYKGHLHSNSQPVAVKKPKNAAPPPAKKKKQKTGDGGGALAQKDDQFANEVIIQSRIIHKNIVKLIGCCLEVDTPILVYEFVSKGSLDDILHGGGSGSSTVPLRLDRRLDIAAQSADGLAYMHSKTTTSILHGDVKPANILLDDNFVPKISDFGISRLIAMDKQHTNYVIGDLSYMDPEYLRSGILTNKSDVYSFGVVLLELITRKKASASDNNGLLKNFLDAYTKDNRLVTELVDAEIAATENLELIHSMAGMIVQCLNLDIDKRPEMTDVAERLQYMAKRSRG

SEQ ID NO: 15468 - protein, 233 aa, Zea mays
  VARIANT 176..233: note = Derived polymorphism lacks residues 176 to 233
MEMLGFKNMPQGLREDNEEITPNGCIYVATNQMMLEDDIEADVYVHEADILSVLDVPPGKMGELLAKRGSTAMAVKESCKQDLTLGSGVTVPARSILIVPLHLVQMDASVWGDDADQFNPHRFLKRDIDLGEILGAPKGSTTINIFSECTKAESFLPFGSGSRACVGQKFVVLAISMLIASLLFSYEIDTHLIMSECVKVQPHPSLSKEMDTTVDSSHLHLPNPKIILTKRRI

SEQ ID NO: 15469 - protein, 164 aa, Zea mays
  VARIANT 149: note = Ancestral polymorphism is C, Derived polymorphism is Y
  VARIANT 100..164: note = Derived polymorphism lacks residues 100 to 164
  VARIANT 97: note = Ancestral polymorphism is S, Derived polymorphism is F
  VARIANT 25: note = Ancestral polymorphism is H, Derived polymorphism is Q
MELPSNAGDGELLPMEEHKERALRHLLRRSKRPLEEFVAAVADVAEQLDDFISDMILKNGKGCFSFVQHNLPNNFRTLNLVENSKNELKSCDRGLFSSVKIFRCQLPRNNAFYSAQPPKHDGSDKPLCPGAPVCHWCGTWKGDKICSSCKKARYCYEKHQFCQL

SEQ ID NO: 15470 - protein, 179 aa, Zea mays
  VARIANT 9..179: note = Derived polymorphism lacks residues 9 to 179
  VARIANT 33: note = Ancestral polymorphism is R, Derived polymorphism is C
  VARIANT 34: note = Ancestral polymorphism is Q, Derived polymorphism is R
  VARIANT 47: note = Ancestral polymorphism is R, Derived polymorphism is Q
  VARIANT 58: note = Ancestral polymorphism is E, Derived polymorphism is G
  VARIANT 81: note = Ancestral polymorphism is S, Derived polymorphism is L
  VARIANT 82: note = Ancestral polymorphism is V, Derived polymorphism is E
  VARIANT 122: note = Ancestral polymorphism is G, Derived polymorphism is R
  VARIANT 142: note = Ancestral polymorphism is R, Derived polymorphism is C
  VARIANT 156..179: note = Derived polymorphism lacks residues 156 to 179
MLLAAHPDWQDRARAEVLEVCRGQTAMDIDVLRQLKILTMVIQETLRLYPSGSLIMREALTGISLGGVDVPRGTIIQVAISVLHLDMEAWGPDANEFRPDRLANGAAAACKPAHMYMSFGYGPRLCTGQNLAMAKLKVVLARLLSKFSFSVSPGYQHSPVFRLTIEPESGMPLVVTRLA

SEQ ID NO: 15471 - protein, 102 aa, Zea mays
  VARIANT 90: note = Ancestral polymorphism is T, Derived polymorphism is I
  VARIANT 75: note = Ancestral polymorphism is R, Derived polymorphism is C
  VARIANT 62..102: note = Derived polymorphism lacks residues 62 to 102
  VARIANT 5: note = Ancestral polymorphism is N, Derived polymorphism is K
MDFFNYFHFCYIPGGIHAISKRAASFMYQMLYGRCPFGHDQTQERILWEDTIINARRVEFPSKPAASNEAKDLIRRCLTYNQSERPDVLTITQDPYLSYAKK

SEQ ID NO: 15472 - protein, 414 aa, Zea mays
  VARIANT 232: note = Ancestral polymorphism is L, Derived polymorphism is Q
MWGGDSNAKQMLKSRGGTGVVGGLPAAGDEESDYFPPTPRKDYWWSTGLLKLVTATVIFMGGVVLGLSVSGSVARYYYNASHAELFFPATTYGCDPRDRDCGMGLAFRAFVHPPRLAHSMTDDELFWRASLVPRAEEFPFQRVPKVAFLFMARGPIPFAPLWDKFFRGHQGLYSVYVHTVPDYKLNVSKSSAFYGRQIPSEEVSWGSITLVDAEKRLLANALLDFSNERFVLLSESCIPVFNFPTVYEYLINSAHSFVESYNIDTPQCAGRYNRRMAPHIMADQWRKGSEWFELNRELAVQIVADYKYYSIFRKHCRPSCYPDEHYIPTYLHLFHGPLNANRTITWVDWSRGGPHPASYGATDITEDFIQAIRNNGTQCFYNSKPTSVCYLFARKFAPNALPRLMNLTSTVLDF

SEQ ID NO: 15473 - protein, 1073 aa, Zea mays
  VARIANT 1040..1073: note = Ancestral polymorphism lacks residues 1040 to 1073
  VARIANT 1012..1073: note = Derived polymorphism lacks residues 1012 to 1073
MVGAHLAAPTPRCPSLFPVSDSTHLPFPLAAGDPEPGAAHMAGRDERWGARGGPGDTHASTSRAPAGTAGESEGASPDSLRNTPSNIARLEDAIGHCAARRKYLAHTKSPSDGKDVRWYFCNLPLADKVLSSSVPRTEIVGKGDYFRFSERDSLALEASFLEREEVLLAYWWREYAECSAGPRGSLVESDDSAYLYKVEEERVGVPVKGGLYEVDLMRRHCFPVYWNGENRRVLRGHWFARKGGVDWIPLREDVSEQLELAYNCQVWHRRKFQPSGLFAARVDLQGSTLDLHALFTGEDDTWEAWLVFDTGPKLGSNTIKLRRGFSPSESASTKPSQDELRQTKEEEMDDYCSQVPVGHLVFMVHGIGQRLEKANLVDDVVDFRRVTANLAERYLTSYQRSTQRVLFIPCQWRKGLKLSGESTVEKLTLDGVKGLRVALGATVHDVLYYMSPIYCQHIIDSVSNQLNKLYMKFLKRNPGYSGKVSLYGHSLGSVLSYDILCHQESLLAPFPTEYLNMETSDRSQGAKSANEVALHDSGAKDHDTYTLGHSCTGNENSAVDEGSTRTDMSHMDSIVPSCVLEDSLNNPETGVPRGAVVAEQNEKENRIENHQTVYTEEGTTSGVSTKDAEASHISRSAEDVHEEVLDKEKMIISLEEEVKRLKAKLDQLEQHKHLVTESTSGVEYHGGKNGNHALNFGELFTAQGSINQPYSPQIKYTKLNFKVVDTFFAVGSPLGVFLSLRNVRIGIGKGRDYWKDKNIIEEMPCCRQMFNIFHPFDPVAYRVEPLVCEDYQKKRPVIVPYHRGGKRIHVGVQEFTEDISARSQAIACQLKSLKVKAVAALLALSRNDTEEDGESANEEGRSYGSIMMERLTGSPDGRIDHVLQEKTFQHSYLSALGAHTNYWRDHDTALFILKHLYRDIPEDPPSDVVERMHIKLFYERDPVEEETPVTFSDHAAIKEFCRKVSFPDGNHVTSPRSSPRRKMQAWEGRTIPQNRDPRIRILRNVVPRLTPESGHLRNVVQSRFPMLLHLFPSSMQCCTENVLLYLSVYVILRAVHTEYDGFSFKRQLTATPG

SEQ ID NO: 15474 - protein, 121 aa, Zea mays
  VARIANT 50: note = Ancestral polymorphism is L, Derived polymorphism is M
  VARIANT 65: note = Ancestral polymorphism is H, Derived polymorphism is Q
  VARIANT 67: note = Ancestral polymorphism is A, Derived polymorphism is V
MLVAYIDKAPVRSLPLSDPSPARACFLVLGYSAGPFIVQRTWHETLHQSLFTDYLNVHNMDTGDHVAVKIFDKAKVHKKKLAGQVMGSKTRIYMVLDFVMGGELHDIIVGHCFFSFLCHLT

SEQ ID NO: 15475 - protein, 313 aa, Zea mays
  VARIANT 287: note = Ancestral polymorphism is P, Derived polymorphism is L
  VARIANT 160: note = Ancestral polymorphism is D, Derived polymorphism is A
  VARIANT 121: note = Ancestral polymorphism is H, Derived polymorphism is Y
  VARIANT 120: note = Ancestral polymorphism is R, Derived polymorphism is W
  VARIANT 112: note = Ancestral polymorphism is L, Derived polymorphism is R
  VARIANT 58: note = Ancestral polymorphism is T, Derived polymorphism is S
  VARIANT 28: note = Ancestral polymorphism is K, Derived polymorphism is T
MGTGTGAGAAPDRAKQRRASAGGHLWKKALLHFSLCFVMGFFTGFAPSSPSSSWKAATTHPPHRLAASRVAVDVDVDARTSLVPPADALSSSSSVATVDAGDDAAEGGQRRLLIVVTTTRHLAFRPEGNLTAAGEAHAQRNAALAHVERHRLAGVLHFADAAAVYDVGFFDQIRQIESVPPPPPTPSAPFLRFYRRRAFGAWPVATVSAGEKKVTVEGPLCSASEVVGWFSRDLDDDGTTRSVAYDRREADLDPAAAGTRARTTTIGVSGFAFNSSILWDPERWGRPASLPDTSQDSIKFVQEVVLEDRAKLS

SEQ ID NO: 15476 - protein, 127 aa, Zea mays
  VARIANT 57: note = Ancestral polymorphism is V, Derived polymorphism is L
  VARIANT 87: note = Ancestral polymorphism is F, Derived polymorphism is V
MRRRRWPPSAASSPASTVATEEEEESASAGGTRLVRASTSTSTATRDAARRCGGWVVAAFQEEEGEEGAKPVKNPMTKQREKWSSAFFHRWPPALARRCLARSGAAPAPVPVPMGRREWNGETKDKV

SEQ ID NO: 15477 - protein, 155 aa, Zea mays
  VARIANT 31: note = Ancestral polymorphism is R, Derived polymorphism is Q
MYSFKVRACSRAYSHDWTECPFIHPGENVRQRDPRKFLQERSPLASNAKIKIDDMDTGRRAATNFVKKCLRCGEVGELEHERVLQRPLPPPPARPATAAAPPPQPSSSSPRGAVAAKAGAGMEQDHLVVERHDLAPSAAAAEAEFGLVVHGKRRS

SEQ ID NO: 15478 - protein, 780 aa, Zea mays
  VARIANT 106..780: note = Derived polymorphism lacks residues 106 to 780
  VARIANT 256..780: note = Derived polymorphism lacks residues 256 to 780
  VARIANT 358..780: note = Derived polymorphism lacks residues 358 to 780
  VARIANT 434..780: note = Derived polymorphism lacks residues 434 to 780
  VARIANT 462..780: note = Derived polymorphism lacks residues 462 to 780
MVQRLTTASTVLRRVLDNPALQDCQENNGFGDMMDEDVISNISVRLNCPAACTASPSPTGSTGTQARCREADTDRRETVPPQGTLERSLKVQRNAVQENSLNLTKQNGYGGGSSHSTQANGLHPMAGVLHAMATSGQVGHLARWDLRSSCMLCDSQKLALSITCTVTNSAYFLLSIDGFSQRTTLETIMTTEDFLSPNISDQVAGYMRDPSRMINKMYLTNSTVRVFGKDVGEPGTAVENATICTNRRYNADYTTWAYFIAFAITQGHIMEGDPGLIDDFEFYQQLLKEFLESCDRGASDHSATDQVPSSDLSPNKAGGSEGLSGSMLPWYHVHEKITNFMAPEPMFCAYTIFLDSVCSSLDVSGCAHGNKQVKGFMFEKPVDLKVGVNHVVLLSSTMGMKDSGGELAEVKGGIQECLIQGLNTGTLDLQAALEGELKEIYSEKGLGKVQWKPAENDRAATWYKVFSFAVVASVERVWSGCSRVFADKAVPSWREQLTLRAFVVSALLAVMFSVIVMKLNLTTGIIPSLNVSAGLLGFFFVRMWTAAAERMGFLRQPFTRQENTVIQTCVVSAYGITFSGGFGSYLFEMSEKIAKQATTVYHGGTNFGRTGASYVLTGYYDEAPMDEYGMYKEPKFGHLRDLAQRNKVISKSIPLGQHSSEILGHWYEGVNQTQKHQLMLVRYFKPCLYMDAGLASAVTMLRTCTDVAHVLEQFRLAWCGKLVRDARTVVPSRTSASTSSSLGVETELSMHAGGARCDRYYPCLINDNNGDGHDIWSILY

SEQ ID NO: 15479 - protein, 221 aa, Zea mays
  VARIANT 165: note = Ancestral polymorphism is S, Derived polymorphism is Y
  VARIANT 168..221: note = Derived polymorphism lacks residues 168 to 221
MEYSSSDTAVCTVAAAAAAASSSPPSSPQPQPQPAAVVLSPCAACKILRRRCVDRCVLAPYFPPTEPHKFATAHRVFGASNIIKLLQELPEEHRADAVSSMVYEAAARIRDPVYGCAGAICQLQKQANELKAQLARAHAELACARAQHAHLLALLCVEVAAAADSSSYSASHHQLAVVAANPMVAVAAADAQAADALYVVDGAGAACLQMQASWGDEALWT

SEQ ID NO: 15480 - protein, 879 aa, Zea mays
  VARIANT 539..879: note = Derived polymorphism lacks residues 539 to 879
  VARIANT 467..879: note = Derived polymorphism lacks residues 467 to 879
  VARIANT 337: note = Ancestral polymorphism is R, Derived polymorphism is W
  VARIANT 223..879: note = Derived polymorphism lacks residues 223 to 879
  VARIANT 209..879: note = Derived polymorphism lacks residues 209 to 879
  VARIANT 178..879: note = Derived polymorphism lacks residues 178 to 879
  VARIANT 155..879: note = Derived polymorphism lacks residues 155 to 879
  VARIANT 147..879: note = Derived polymorphism lacks residues 147 to 879
  VARIANT 123..879: note = Derived polymorphism lacks residues 123 to 879
MSSRRYPSGSEKRKRKKRVDDLIDSQRGAIDKFFKSNASASTNPNDAFALAIVPVGTEEPTNENSREEEHVDINADDNNILKSSTSNSLSSLAHNGCRNWRNISTKLREHENSVEHFQNMNKWNELRTRMQKEETIDKDLQKQINKEKERLRQVLLRIIAIVKFLGKHNLAFRGSIEQLYSDSNGNFLACVEMIAEFDLVMQDHLRRIQNKEIHYHYLSPKIQNELIVLLSSNITRSIIKIVKEAKYFSVILDCTPDISHQEQMTLLVRCVNLSNGKINIEEYFLGFLNVDDTSGLGLFSVLLDSMKSLGLNINDIRGQGYDNGSNMKGKHQGVQKRLLDINPRALYMPCACHSLNLTLCDMAKSCGKAVSFFGIVQRIYVLFAGSTKRWNVLCKHVPIFTLKSLSNTRWESRISSIIAIRYQAKELRSTLFELSHASDIEPKDKSDAKSLFDALDNFEFLLGMVIWHDILYSVNKVSKKLQSPDMCIDSALNQIQGMVQYFEAYRNEGFPSSLIISKGIADEMGLEASFPVKRSALRKKQFDESNDQEEILETERVFKVKYFLVVVDMAITSLKTRFEELMVFKDIFGFLLISTILKSLNDTELEECCTKLGNTFSHNGSSDVERFTELEYLILGLVSTVPAFVIPLFLVGKADSVRNFKDRYWVKANIWIIIFSYVGNYFWTHYFFTVLGASYTFPSWRMNNVPHTTFLLTHACFLFYHMASNMTLRRLRHSTAHLPQSICWLFEAAWILALSYFIAYLETLAIANFIGHLKIIVDIDMLDLFPYYEFVDRDIMYKVGSLFYAIYFIVSFPMFSRIDEKDEKWSLSRVAVDSLGAAMLVTIILDLWRIFLGPIVPVPESRQCGQPGLAWFQAQNGST

SEQ ID NO: 15481 - protein, 668 aa, Zea mays
  VARIANT 11..668: note = Derived polymorphism lacks residues 11 to 668
MSVAPRAAPFRGVTPTDRPSLVTAEGFGEESRHADFKTKPKNCCTQLCTCIAHVHSSVARSGSSDAPQRTSPRTPRASRVAKTGGNETDSTGVTPTRTPTERSPKVTERRSPRSPITEKKRPSRLSELESKVSQLQDELKKAKEQLSSSEARRRHAQQEAEEAKTQEQAAAASKLEELQRQLDEFSAAEESRLQELRKISQERDRAWESELEAVQRQKSADAAALGSAMSEIQRLKQQLEASAESDAARAKQCEYVEAEIEGLKQEMEIRLATIEGLKVNVSESDRAAAEANATVNETKQQLETAKATIDSLVAEGVRMQECLRSKDMELNESKALVASLQEDMKKSHDTDNAKAKANTDVRSETEALQKVLVTTSAADANGSCGSYDPEIEQLRTALEVAEIRYQEQQTRMTIETGGLYETLESVRAECARELCELRLELKNKNDALMEAMAGAAADPHRPDAMQQPELEAKLMRSITDAAELKACLMDKENALQSLAEENEALKAGAGRAEAELRRKYEAAVAELELAKAAEQDVRMRLGLVTDEADRSSRRAARASEQLDAAQAAGAEMEAELRRLRVQSDQWRKAAEAAAAALGGGGGKDGNGGTVERTGSLGPEYGSSIGGKLMSSPFSDDVDEESPKRRNGGGGGGGGVLRRMSGLWKKSPK

SEQ ID NO: 15482 - protein, 238 aa, Zea mays
  VARIANT 211..238: note = Derived polymorphism lacks residues 211 to 238
  VARIANT 196: note = Ancestral polymorphism is G, Derived polymorphism is R
  VARIANT 175: note = Ancestral polymorphism is S, Derived polymorphism is P
  VARIANT 105: note = Ancestral polymorphism is P, Derived polymorphism is S
  VARIANT 95: note = Ancestral polymorphism is R, Derived polymorphism is W
  VARIANT 93: note = Ancestral polymorphism is R, Derived polymorphism is W
  VARIANT 92: note = Ancestral polymorphism is R, Derived polymorphism is W
  VARIANT 85..238: note = Derived polymorphism lacks residues 85 to 238
  VARIANT 84: note = Ancestral polymorphism is R, Derived polymorphism is W
  VARIANT 82: note = Ancestral polymorphism is G, Derived polymorphism is E
  VARIANT 53..238: note = Derived polymorphism lacks residues 53 to 238
  VARIANT 48: note = Ancestral polymorphism is G, Derived polymorphism is R
  VARIANT 45: note = Ancestral polymorphism is C, Derived polymorphism is Y
  VARIANT 36: note = Ancestral polymorphism is P, Derived polymorphism is S
  VARIANT 10: note = Ancestral polymorphism is R, Derived polymorphism is C
MTLDDDGNLRAYYWTTGDSSAWTSDYKAIAERCELSTSCGAYGLYVPRNAQCQCLDSNSTSPVLPCHGEDTAELCSTGSSNGSRQLGFNVVRRTRVSVAYKEELPFRTNTTADGCELACAGNCTCRGALYNGASGYYYLIDFPMETLVYQANDRMLGYFKIRKAAIANSARRGMSPGVNAETVALLLVLAGLAAAGAYWGYRMWERRKRKRAGMEQELVPGPYRDLKSMASSNNSFKA

SEQ ID NO: 15483 - protein, 114 aa, Zea mays
  VARIANT 68..114: note = Derived polymorphism lacks residues 68 to 114
  VARIANT 53: note = Ancestral polymorphism is S, Derived polymorphism is C
  VARIANT 50: note = Ancestral polymorphism is G, Derived polymorphism is R
  VARIANT 47: note = Ancestral polymorphism is C, Derived polymorphism is Y
  VARIANT 37..114: note = Derived polymorphism lacks residues 37 to 114
  VARIANT 33: note = Ancestral polymorphism is M, Derived polymorphism is K
  VARIANT 32: note = Ancestral polymorphism is G, Derived polymorphism is R
  VARIANT 22: note = Ancestral polymorphism is G, Derived polymorphism is C
MPFVGALHMSSEVNCISFIGGGTGIAISKKTGKVSLQMELEERCLHCARGCKSRFGCSKHSEGWLLIQKVNAKLAKLKVGPPENNSDINLVVTESSTNFIEGLVMDAKEKGATF

SEQ ID NO: 15484 - protein, 702 aa, Zea mays
  VARIANT 368..702: note = Derived polymorphism lacks residues 368 to 702
  VARIANT 371..702: note = Derived polymorphism lacks residues 371 to 702
MADADAALPTPPPEVVAPEEHPVGAESTVAAPAEVDNKRKLEEVSADAEVKGTSEDAKRPRVDGEPDAATGVEQQIDGSSVNADPAAPEDKAALNVGAAMDGDNDTPAPAPAPDSQAVSDEKPLEAAAEAPQQEGDAATAVQEISRKIEVPNSKVGVVIGKAGETIRNLQISSGAKIQITKDIEADSNALTRPVELVGTPGSVDKAEQLIKSVIAEAEAGGSPALIARGFGSGQPGSEQFEMTVPDNKVGLIIGKGGETIKGMQTKSGARIQLIPQHPPEGVTLTERIVRVTGNKKQIEAAKDLIKQAMNQTFSKHTNQSGGYGPQGYRPQGHGAASQLGPRSQNHGYGYPPRGMPPPQNYNAPYGGYPPQGPSRGGMGWDQRPGPPTHPSYQGGGSDYYKQGSQPYDSQPPSYPPGPGNYNSYGQSQGPNYGQPQYPQHAPQQNYSHGYGDPRYNAPPPNQQYYGQPPMAPQQGYPQQPDPYARPPYSGPGQWTPRGAPAADGSYQAPPSSYGPPSQQPPAYGQTYGAATGPDGYGQQGYPQQGGQVPASYGQSAPAAPGYPQQGTQQGGYAQYPQTQPAYGDQAAQANANYGYQGAPADPNYGSAYPQQPGYGPPGQATGQAGYASSAPAASQPVYGQAGYTQPPTNPPSYDQSAAPAATQSGYAAPPANPQQPAAAKGVSPQPAAAAAAGYGASGQWTA

SEQ ID NO: 15485 - protein, 154 aa, Zea mays
  VARIANT 38: note = Ancestral polymorphism is A, Derived polymorphism is V
  VARIANT 52: note = Ancestral polymorphism is R, Derived polymorphism is C
  VARIANT 79..154: note = Derived polymorphism lacks residues 79 to 154
  VARIANT 90: note = Ancestral polymorphism is W, Derived polymorphism is C
  VARIANT 110: note = Ancestral polymorphism is G, Derived polymorphism is D
  VARIANT 112: note = Ancestral polymorphism is T, Derived polymorphism is M
  VARIANT 117: note = Ancestral polymorphism is S, Derived polymorphism is N
  VARIANT 118: note = Ancestral polymorphism is I, Derived polymorphism is T
  VARIANT 136: note = Ancestral polymorphism is C, Derived polymorphism is Y
MSQSITLHRAPGPAVESRNFSSLPRALCPPLPLAAAVAPLVSTRLSISGGACPVRRRHHAARPSVSFVATETPRTEEQQPSPFGEERFDWLDQWYPLAPVCDLDLHVPHGKTVLGLSIVDWYDHGAGEWRVFDDAYPHRLASLSECRIDDSGRL

SEQ ID NO: 15486 - protein, 952 aa, Zea mays
  VARIANT 321..952: note = Derived polymorphism lacks residues 321 to 952
  VARIANT 163..952: note = Derived polymorphism lacks residues 163 to 952
MGSQESEQAKVLPGTDCPQQPPASRTWQRRFDDEGKNVAMFSMTMSDLVELMPLMVKILKLQVEENAEGRVAVYDLLRKWMDNCYRGVPVGGIGSGSIGRSYRGYFQQFQIFPVTNEEKPVLANQFSAFVSRPNGNKYSTVLSAPTADLLKGVGKAGIGSWDWRLKEDRCTYHALFPRSWTVYDGEPDPEIKITCRQISPFIPHNYRESSFPAAVFTFTVNNSGSSPADVTLLFTWANSVGGKSELTGNHVNSKMTEHDGVRGVLLHHRTAGGQPPVTFAIASRETDGVRVSVCPSFTIASGGPSSSGEPTAAAMWDEIKKHGAFGHAGAGNGNAARAAASKAGSSVGAAVAASTAVPAGATRVVSFSLAWACPEVKFPAGSTYYRRYTRFYGTDADAAAEHLAHDALLEHMNWESQIEEWQKPILHDQRLPEWYPVALFNELYYLNAGGTIWTDGQAPKRAGFASSLTATEPFSIDTLLPVAAGGSAVDGVVRAVASATERSHSAAAFGAALLRGGEDNVGQFLYLEGMEYNMYNTYDVHFYASFALLSLFPRLELSLQRDFARAVLLHDPRPRRTLDGRTVARKVLGAVPHDVGLNDPWVELNAYMLHDAARWKDLNPKFVLQVYRDAVATGDAAFAEAVWPAVYVAMAYMDQFDRDGDGMVENEGVPDQTYDMWSVSGVSAYTGGVWVAALQAAAGMARVVGDRPAEAYFRARRDRAARVYDAELWTGAYFRYDNSGGGGASESIMADQLAGQWYARACGLEPVVEDAKARSALATVLDYNVMRVKGGAIGAVNGMRPDGAVDASSTQSKEVWPGVTYAVAAAMVHEGMTEAAFRTAKGAHDAAWGNDGFGYAFQTPEAWTEDGGYRSLHYMRPLGIWAMQWALSPPELHRDLRTPEARSSEEPSPADAALGQAQFDKVASMLRLPEEQQPKGYLWAIYNLVRQIVLPA

SEQ ID NO: 15487 - protein, 582 aa, Zea mays
  VARIANT 211..582: note = Derived polymorphism lacks residues 211 to 582
MDDAAAAAAITVLAFIVGSDAAAGAWNQETVAGDREVHRTGKKVKNCSCCGLKGHLGAECSTKLYCVICDGHDHVNHVAICSSNLDPWHMLSDMRCLAWVSIIYLIRHSPGKRIPKQPLLRLLVVLFRVISWWRNCNVLFQNSFIVTFPSKNELQGAIAFGGADVREKNVPMGTRMQFEEWHEEEEGFLLPKVWIRVTGIRKKLREFLNLWAIGSMLRSTQTVDMETTRKNNFGRVLVAVLDPKLLPTKLDAVIGDHYFELRFEVESVGFYENGDEVNQNFGDGNDGDNEDMDEDDPNDSSSLDREGKRSKKDLSRCQNGSDTSMGMGGAAPVLAEEDGEYLEGAADGISIDMVAESPTDCPMKVVNGGSLDGVLVDKLPAAFSVVGGVSDDGVCGGGSPSEAMLMADTEATMVAADLVQESHPGRPRECLAVYARRGAVSTPPCSRRGLQQPGLGTLSSDMLVADAGIKEVVSQPTRSSPRLAGGADHHILEKAKLRAAWRNLDGPEFEHSDNDEVDKYESDNLALGHLCGDFVEEVMDEDNDQLSCDFHTVFKKNKSKGSSRSKGSTKIKFVKKHKRCTK

SEQ ID NO: 15488 - protein, 1313 aa, Zea mays
  VARIANT 727..1313: note = Derived polymorphism lacks residues 727 to 1313
MAIVRTGAGNRVPRLDGGSEGSPEATEDDDNEEESRATPSQESEANGFSVDDDDGQNGSGGGGKDPEEVVEEEEEEEGDSGMGSDGLDVAELGEPSTEICQVGDQSVAVPLELYDLDGLGDVLSLVAWNTLLSEDERLRLAAFLPDMDQETFARTLVELFAGRNFHFGSPLAAFFKRLKGGLCDPRVNLYRRGTRFAERRKHCYWIQSYHNSMVRGLREIKDCLKGHERYSLAEKIRMLHTLKAQQQQRKALELARRAGSETDSESRGSGEQVLDRLKHDKSGQKKSGKLVKEKSKGLLRAGMPKGVDEDYMGGSGRDAVMSLSELSRYDPRTHRGKLPRSIEGHYSEDLGYGRDSSRSWFQRALPKPVKKELTTTYDGNLYGNNYSDNHTASPYHYGRNPIANQGVTLAAAYDPPYFDTRRNSRYSGRDWAQGGKGVHTNALMGDEMNWPAGIHTGTLHDRQKGQSAGDYRSRKDQAGYGLKVKSYKSIDQQVNDAHVGSDPRSKISQAKMAGKSSTQLDRTGQKHSRSNAVYAQSDETESDSSEKFEDGGEVHYLERKPERHHSGYYRPAHGAKKPNKLAKVAKMNYPTTDADLEPSQSKGFEGKGSETGYLRDVDVMVTEQISDVMKPPAASGERKRKGAGNLDMHVYHNSDLHEINEDANDSSRLAENERFASRSGHAGQDSNGDYVGTERVSSSSKKAKGRVEVPSLDEHGEHLSSGSKLVENIGGSKKKNKKKPESSTTDAAIIAEPAAAVPEINVVAAEPEKVEKPKKKYVPITPTIHTGFSFSVVHLLTAVKKAMVTPAEDTPATAKQPDGEEGKICFNNEEHIKTPHQEQSTTDQTEQVLEGANASAAEQTVPINAPALTVQEIVNRIRENPGDPRILETQEPLQDLVRGVLKVLSSRTAPLGAKGWKALVAYEKSNKSWFWVGPVPSVSSYDDPDEETSAEAWSIPHKMLVKLVDAFSNWLKSGQETLKQIGSLPPPPPPNPANLDLKERFKELKAQKSLNTISPSSDEARAYFQREEFLRYSIPDRAFCYTAVDGEKSIVAPLRRGGGKPTAKARGHPMLLPDRPPHVTILCLVRDAASRLPARTGTRADVCSLLRDSQYLNHEEANKEAAINQVVSGALDRLHYERDPCVLYDNDKKLWTYLHRGREEEDFEDDGTSSTKKWKRPRRDLSDPAEPGAANDDVDDEGTGTPPGSNAKKQKADHGDSTLSGEANDEGNHPTQNPSSGGLEGDPDLNARNYEESGGVVYMDARTDVGVGSNSIDAKPGSRADDNTASWQSLPEQNKTSTALPEDTSMDGTPGPA

SEQ ID NO: 15489 - protein, 247 aa, Zea mays
  VARIANT 179: note = Ancestral polymorphism is A, Derived polymorphism is V
MLVYERLYHGSLDKLLFGRSDGRFMDWSKRLKVALGAARGLAFLHDEGPFQATYNEFSTLNIQIDKGFTAKLSGYGCVGFNTEEISNAPMICFLESAANLSVETLEKGLLTPKRNVWSFGVMLLELITGRKNLDPNYSKEEHNIFSRSRPFLTDDSHLCLIMDSRIKGRFPTKAARIVADIILKCLRKDPSERPTMRDVVEALARVQEIMVPCRYPLQEPFFVLELGGSSVPSGPCNLITQLPLDTL

SEQ ID NO: 15490 - protein, 473 aa, Zea mays
  VARIANT 7: note = Ancestral polymorphism is R, Derived polymorphism is C
  VARIANT 15..473: note = Derived polymorphism lacks residues 15 to 473
  VARIANT 21: note = Ancestral polymorphism is C, Derived polymorphism is Y
  VARIANT 33: note = Ancestral polymorphism is A, Derived polymorphism is V
  VARIANT 37..473: note = Derived polymorphism lacks residues 37 to 473
MMEGGSRADGQNPNQLRLFTCTGNLLHRAHGCARWAQGGIVVLATVYGPKPGTVRGRTPEKASIEAVWKPRTGQIDTPLFPSSSFCPTAVRVTGSLKWRVVFVGRQDREYEMTLKRTLQSICLLTVHANATTSVVLQVMFAWLVATMLLLIYFCCSINSSTIDVGCVRDRREKLSEDFYFHILPTDMQDAQGSLDRRSVFSLDTHSPSVCLLIQLEKAATEEGGVTPSVYSHKEPVHLAEKEKQKLRVWSRIMPCKESFAWAMIPLFEAAESNDWMSPGYANAGSSPVPTPPSGKGLKASTKPKATKGQKSGPQTPLGFGLLTKFLNLLKGAPGGIVDLNNAAETLETPVVKRLICSCDGDNEIRFWSIKHGNDVRIFKGGSTQLRFQPRYGGLLATASDNVVSILDVERQAFVRRFESHTKGVDSVCWDPTGEYVVSVSEDTVKVWSLNDESFMNELSCGGRKLSRYYMFQM

SEQ ID NO: 15491 - protein, 258 aa, Zea mays
  VARIANT 45: note = Ancestral polymorphism is Q, Derived polymorphism is L
MPSQQQQQQGQQVAAGSTRWCPTPEQLMILEDMYRGGLRTPNASQIQQITAHLACYGRIEGKNVFYWFQNHKARDRQKMRRRLCMSHHLLSCAQYYAAAAHHGHAAFLAAPPPYGHQLLSPSTTSPTPAAAAAAAAAAYGYYYPATAAFAAPASRCAGNATPPSPTTQLFHYQGGGGLVPTEALGRPEYSLGKLDNFGVALDDVVVSSTSGAVVDTMGAPPVAGFEVAPPLPAAFSCRPLKTLDLFPGGLEEEQHDVA

SEQ ID NO: 15492 - protein, 142 aa, Zea mays
  VARIANT 8: note = Ancestral polymorphism is C, Derived polymorphism is S
  VARIANT 37: note = Ancestral polymorphism is S, Derived polymorphism is L
  VARIANT 44: note = Ancestral polymorphism is G, Derived polymorphism is S
  VARIANT 58: note = Ancestral polymorphism is N, Derived polymorphism is S
  VARIANT 70: note = Ancestral polymorphism is S, Derived polymorphism is L
  VARIANT 99: note = Ancestral polymorphism is C, Derived polymorphism is S
MEASSSLCFQVSGFSLSKIWLCLFLVFVLQNCSPALSDSPYLVGMGSYDITGPAADVNMMGYANAEQIASGIHFRLKARAFIVAEPNIKRVMFVNLDACMASHLVTIKVLERLKARYGDLYNENNVAISGIHTHAGPGGYLQ

SEQ ID NO: 15493 - protein, 131 aa, Zea mays
  VARIANT 97: note = Ancestral polymorphism is D, Derived polymorphism is H
MAARASRHLISPEERNTILIHGSPRDRGIRGEAPAEPQQPRLGRSVPDSRGQQQIFHRMRMTVVARRYSAVPMGFLQSTFSLLIGTGCGIYIAQNYDVPNIKKLMRSLVGKAKEVEESYKKTGNSKNKDNE

SEQ ID NO: 15494 - protein, 157 aa, Zea mays
  VARIANT 151: note = Ancestral polymorphism is S, Derived polymorphism is F
  VARIANT 142..157: note = Derived polymorphism lacks residues 142 to 157
  VARIANT 113: note = Ancestral polymorphism is S, Derived polymorphism is Y
  VARIANT 112..157: note = Derived polymorphism lacks residues 112 to 157
  VARIANT 109: note = Ancestral polymorphism is E, Derived polymorphism is K
  VARIANT 108: note = Ancestral polymorphism is A, Derived polymorphism is T
  VARIANT 105: note = Ancestral polymorphism is D, Derived polymorphism is N
  VARIANT 95: note = Ancestral polymorphism is R, Derived polymorphism is M
  VARIANT 83: note = Ancestral polymorphism is S, Derived polymorphism is G
  VARIANT 75: note = Ancestral polymorphism is A, Derived polymorphism is T
  VARIANT 67: note = Ancestral polymorphism is S, Derived polymorphism is Y
  VARIANT 39..157: note = Derived polymorphism lacks residues 39 to 157
  VARIANT 35: note = Ancestral polymorphism is R, Derived polymorphism is W
  VARIANT 34: note = Ancestral polymorphism is R, Derived polymorphism is W
  VARIANT 25: note = Ancestral polymorphism is S, Derived polymorphism is Y
  VARIANT 21: note = Ancestral polymorphism is S, Derived polymorphism is L
  VARIANT 19: note = Ancestral polymorphism is A, Derived polymorphism is T
  VARIANT 11: note = Ancestral polymorphism is R, Derived polymorphism is C
  VARIANT 2: note = Ancestral polymorphism is A, Derived polymorphism is V
MAVWVRGLGVRVLLDPVDADSLRPYVNIIFACPRREKQQPPLGHRLARMFCSSLLLCSTCNNTDVASSSYYTSPAGNDQGSSSRALLVVNGAIDRDLFVASLRRDLSAEPSRSPLLSTTSAMVVSTTEEQVHRGFTVVKRSRDPYNNFHSSMVAMIM

SEQ ID NO: 15495 - protein, 143 aa, Zea mays
  VARIANT 3: note = Ancestral polymorphism is R, Derived polymorphism is Q
  VARIANT 64..143: note = Derived polymorphism lacks residues 64 to 143
  VARIANT 77..143: note = Derived polymorphism lacks residues 77 to 143
  VARIANT 116: note = Ancestral polymorphism is T, Derived polymorphism is K
  VARIANT 117..143: note = Derived polymorphism lacks residues 117 to 143
MGRKRKELLSSAPWRTGEAAEDEDAARMSREGKVSVTSNPGETPTMSMPRSKRQDLDLTVDDFEEDEIDPELRYSFQRNSRFLKRVFSVDTLVKPLPPVMAYSVSRNINFFFRIFTQFWDEEGIANAQKSLGLGNEDGSRRMR

SEQ ID NO: 15496 - protein, 1112 aa, Zea mays
  VARIANT 48..1112: note = Derived polymorphism lacks residues 48 to 1112
MLQRAASNAYSWWWASHVRTKQSKWLDNNLRGSSFLRTHITFPSMYIQTAIAPGFPCMCTRADMEDRVKCILFLLEEEADSFAKRAEMYYKRRPEVICSVEEAYRAYRALAERYDHMSGELHKANHTIATAFPDQIQYSLLEEDNDNLPKAFTAVERRKIHKSTVEELMKKKHGEKSRPKGSGEKSAAPVSKDNAQAEISRLQKEILVLQTEKEFVKSSYESRIAKYWDLEKQINEMQEEVCYFQDEFNESAEIEDHEAQALMAATALKSCEGAITKMQEQQKSFFRQEMIESERVEVSRHKLKSFFRAYGKSLAYSGNSADENVNNDASARKDELFSMKQEKTELQELVGKIRGYFEMSSDLSVEDIADKIDELVNKVVDLELMIPTQTAQINRLCLENNELEKSLQKLEEEKAEQTCASGELDGKLKEAEEVLIRVHNLLTSYHAEERIVYTNFEETINSFCDISHMLLQSPLTEQQAVSRCMLNDEATQSTDTELSSVHRKTSPSETPEMDETARKPHVDGFTNGPDTSEPSIFSDDRQSSTCHYEIKAERHSHVDKTEDLWCCEFEDKFSISASVDVGTTENADHNLSADNNNGGPEHVDEVTRNNESSVQPYIAHSLESCPLEQLHRISPSSPGENVKQEDNVIYYSTQCNNMSESRPEQNMEMDEAEASYVNKNPTSICGEVANVGDQEDDVINLQQSLMTGIQDKEKVLLDEYTSILRNYKNAKRRLAEVETKNQECLNEMRAMISELECANEMKDAEIRSLCELFESLTYKDASQRGHQLNSTMSLSEKNKTVRGHRRTPSILQLHQRAQSVSSIPRRMENNSSLKNILNTSSSMEPDVPHDAVTNQESIILEDLTPTNVVEMEKASPLEEKFRRNIDALMEENLALLMKLSMSFQQIQGFQTKYDQLQSEISKVTNDKLKPNKDGTNECPADSEMEATKKRLRELKIELQVWSEQNMMFKGELQCRFDSLCNLQEEIEGAKEMDEDTEHGARFTWYQVAKLQGEVLNMKQENNKVADEVQASLDHVEGLHTELDKVLAKIVKSTSLSGPKASSTWRNAPSKSKVPLRMFLFPAKKKKTSLFACVNPSYLSKQHSDMAFFTKMS

SEQ ID NO: 15497 - protein, 196 aa, Zea mays
  VARIANT 14: note = Ancestral polymorphism is P, Derived polymorphism is Q
  VARIANT 67: note = Ancestral polymorphism is I, Derived polymorphism is L
MARGKVQLRRIENPVHRQVTFCKRRAGLLKKARELSVLCDAHVGIIVFSAHGKLYDLATSGTMEELIERYRTASSREAADGCGDNNRMFLTKRKHFGRYIYGNRTNEHMNVEELNALERYLEIWMYNIRSAKEGMLQAANEVLQEKIVEQSSLLDVGMVVADQQNGHFSTVPLVEEMISNPLTILSGYSNCRGYSF

SEQ ID NO: 15498 - protein, 166 aa, Zea mays
  VARIANT 67: note = Ancestral polymorphism is S, Derived polymorphism is A
  VARIANT 44: note = Ancestral polymorphism is E, Derived polymorphism is V
MGIGEHFEGVKQHWASNFAFLDYFKKVYGRAEPLPKWSDADVDEFIASDPVYGPQMRFPQLKALRESRKFALAGALVGAAHLGGVALKYSKAPHGVLLATGFGAITGAVLGSEVADHWYQLYEMDKQGANLRFIYWWEDKVSGLFRSLCHLLLLKLWITMLKANFT

SEQ ID NO: 15499 - protein, 392 aa, Zea mays
  VARIANT 315..392: note = Derived polymorphism lacks residues 315 to 392
MGQLRVWADGLKRPSQHQASSELDSESEQPYLFPTPLLAHPLTKSFSSAPPQPGAPLDRDPGDMPRYDDRHGNTRLYVGRLAPRTRSRDLEYLFSKYGRIREVELKRDYAFIVCSTTLRLSPTIPPPNPSIWGAEADTLLRGSPSVLRWSGLGLLVLWKLKKTFILHVTFFILSDVLIAKQEFSDPRDADDAQYNLDGREVDGSRIIVEFAKGVSVIKAIHGLHPHVVDVAAAGATAEAGAIACVNNPPITLSRSRSPSGSPRGGRRERDERRSRSLSYSRSASPRRSVSPAKEKERSRTPNGSRSPRSPSPRAEVSPPLKDNGARNGSDHEGNPGGGENSKRSRSPSDGYRSPVANGRSPSPRDDRSPSPKGNNEDDERRGSPRGSQSPLN

SEQ ID NO: 15500 - protein, 503 aa, Zea mays
  VARIANT 288..503: note = Derived polymorphism lacks residues 288 to 503
  VARIANT 290..503: note = Derived polymorphism lacks residues 290 to 503
  VARIANT 327: note = Ancestral polymorphism is G, Derived polymorphism is E
  VARIANT 389: note = Ancestral polymorphism is F, Derived polymorphism is S
MPESGTQPPRAPAYRPGNPTSAVDSAPTPPAMTRNDRPYSSGTTAEKPPLAVSPSLVPRSTLPRCPAPRPSRGPSPTPSSSRPPPLQPPAAGNPAAGRHRPKKRCHGGVDSASPTLTPDSVVLAILIGDEDIEPAMLAKEANGGHMALEKHRRTDQGLKKGVLKLEFFLHESQDVLYAFINIFSYFRRATHVALAWDGVSEGQFSHVLLHEMDAIRKACASLEEGYLPPLTFVVVQKRHHTRLFPEVHGRHDMTDKSGNILPGTVVDQKICHPTEFDFYLCSHVGIQEASSRSSSVITNYVGYLSKGQIPPKHISLVNLTVTLNIEGSKYTGTSFQCLLYRSSARECYRRRLRTRTPPSRVLYKSGSIIVLSRTDFLRPDMLASLANYFGLGKQRHRSLDDVKMNIDVLKNCATVLFLTDDTRSSGAFSGFVELDDVSTESIKISGPRAIVQHKGSPLQLICPGLEVRWVNTKGFPNSPHRPKVSIKVHIPENLSKVLGFSTI

SEQ ID NO: 15501 - protein, 343 aa, Zea mays
  VARIANT 51..343: note = Derived polymorphism lacks residues 51 to 343
  VARIANT 164: note = Ancestral polymorphism is C, Derived polymorphism is R
  VARIANT 173..343: note = Derived polymorphism lacks residues 173 to 343
MGSRSLPVPRKNLRLRVKVPTVDSCRRWTREASRLGVAPPLSPVPEHQQPQAKTSEEVSERTKKEPIARGGGVGGCGGGRISAEKDLQRRRSGSAAALEPDGAPTEAANGREKSERMAEVDLRPGAEAAAAAEVDSSLLPSTTWGGWWGGDSRLLMASVVGRRCGHCKKLAPEYENAAKALSKHDPLIILAKVDANEEKNMPHATKYEVQGFPTIKIFRDQGKNIQEYKGPREADGIVDYLKKQVGPASKEIKSPEDATALIDDKKIYIAKLVSSLSDTEFTNFMEVAEKLTYDYDFGHTLHANHLPRGDAAVERPLVRLLKPFDELVADSKVLLTFFITFWL

SEQ ID NO: 15502 - protein, 326 aa, Zea mays
  VARIANT 236: note = Ancestral polymorphism is W, Derived polymorphism is R
MENPPSILVTPMAPAMSAQFTRITFSNLFVRRAGPGSTELTVEGRPSDQLGRRNLTDSPVFDGRGPDASLVARVQGVATQMGDVRQLYTVVFQERPLKGSTLVTEGAMTEGSDEWAIYGGTGVFAMARGVIRRTFLADTSGGNSDELAVEVLCPVFRPAAFGSSSSQPAAKDISSTVVVTKVGVWGGEGGSAQDIATTEPPRRLQSLTVRAGVAVDSIEFTYSTDTGGQTRTAGRWGGLGGNVRKLDLGDAEYVKEVSGTYGAFEGATTLTSFRIVTSTARAWGPWGIESGTRFCITAPIGSSIVGFYGRATTRLVAAIGVYLRQL

SEQ ID NO: 15503 - protein, 325 aa, Zea mays
  VARIANT 209: note = Ancestral polymorphism is T, Derived polymorphism is A
  VARIANT 75: note = Ancestral polymorphism is L, Derived polymorphism is Q
MENPAPSIVVPPIAAPVSANFSRLAFRNLYIRRTGPDSREMVTVEGRRGSSDQTGDMRYVSDFPVYDGRGSDAVLVARVQGVTTTFGNSNQFFTVAFEAGRLKGSTLLTEGVVTDGSDEWAIYGGTGEFAMARGVVKRRYLADRDGAGNTDELSMQVFCPVFGSSQQPNKQARADSTISVTKIGLWGGEGGSAQDITTTEPPQRLHSLTVRASAAVDSIEFTYTDRGGQRRAAGRWGGLGGNLRTIDLGDAEDVREVSGTYGTFEGATTLTSFRILTSSRTWGPWGVENGTRFCITAPVGSSIVGFYGRATSRLVAALGVYLRRL

SEQ ID NO: 15504 - protein, 325 aa, Zea mays
  VARIANT 256: note = Ancestral polymorphism is G, Derived polymorphism is S
  VARIANT 171: note = Ancestral polymorphism is I, Derived polymorphism is N
  VARIANT 37: note = Ancestral polymorphism is S, Derived polymorphism is R
MENPAPSIVVAIAAPVAAEFVKLTFRALYMRRAGPGSREMTVPGRPSDQLGRRVVTDSPVYDGRGADARLVARIQGVTVLVGNADALFTMVFETDRLKGSTLVINGMVTDGSDEWAIYGGTGVFAMATGVMKRRNLAGGSNDGNSDELALEVFCPVFGASQQPISKQQESISSVTKIGLWGGQGGSAQDITAEQPPRRLHSITVRAGVAVDSIEFTYTDDAGQRRTAGRWGGLGGNVRTIDLGDAEDVREVSGTYGAFEGAITLTSLRLVTSSRTWGPWGVENGTRFSITAPNGSSIAGFYARAGTRLVDAIGVYIRPVVPGRPR

SEQ ID NO: 15505 - protein, 323 aa, Zea mays
  VARIANT 287: note = Ancestral polymorphism is A, Derived polymorphism is P
  VARIANT 28: note = Ancestral polymorphism is G, Derived polymorphism is C
  VARIANT 14: note = Ancestral polymorphism is R, Derived polymorphism is K
MAKTTMSAAKNLVRLLVLVQVSLGLLGGVAALSFDYYGMTCPFAEMMVRSVVYDALMKDPTLAGSLLRLHFHDCFVQGCDASVLIDSADGNTAEKDAQANLTLRGFEVIDRIKELLESQCPGVVSCADVLALAARDAVLLARGPYYGVPLGRRDGTRSVDSDTFTALPPAFFNVTMLMKLFGSHGFTVQDMVALSGGHTLGVAHCANFKGRLAETDTLDAALGSSLGATCTANGDAGVATFDRTSTSFDTVYFRELQMRRGLLSSDQTLFESPETRGIVNMFAMNQAYFFYAFQQGMLKMGQLDLKEGDDGEIRHTCRVINSS

SEQ ID NO: 15506 - protein, 827 aa, Zea mays
  VARIANT 167..827: note = Derived polymorphism lacks residues 167 to 827
  VARIANT 200: note = Ancestral polymorphism is C, Derived polymorphism is Y
  VARIANT 371: note = Ancestral polymorphism is T, Derived polymorphism is M
  VARIANT 427: note = Ancestral polymorphism is R, Derived polymorphism is C
  VARIANT 520..827: note = Derived polymorphism lacks residues 520 to 827
  VARIANT 576: note = Ancestral polymorphism is S, Derived polymorphism is F
  VARIANT 583..827: note = Derived polymorphism lacks residues 583 to 827
  VARIANT 641..827: note = Derived polymorphism lacks residues 641 to 827
METKKLYNNTPRRKGSKLEYIRKHRALLADTLSQESIAMEDPTYTPEVVHPTIDAIEPDGSSVTPEFVSNPFIPASTQTKDVDSLDMSTEPLRHKHHVPHGERQAILVRRNQQFEASITRNVATATEATIGDAGEGDDWTQPHIPAKINNNDEDTDEDIKIDGTQDEFSGTDVPDLYDKVYSNLPEETHMLKPVPDCGYCTAKKFQYEPPGFCCRGGKVELAPLETPPHLMRLWDSADSDAKHFRDNIRFFNGHFSFTSLYGCLDSMTTNVRDSGIYTFRAQGIMYHNIKSFGREGGAEHKHLELYFYNDDPSLEHRYRELGWHANIPKVGVSMDEVDAYRVTHRASNANDEDAGVFNPILHGKWLFQQFTADTYIKIESSRLDFILQKFGKPDIFPTMTCNPNWDEIRMELLHGQTPQDRPDLVVRVFHAKLQELKYRLTKQDILVEIPDKKYPELRKMVIKHMMHSLCGSLNPNCPCTKGRASCKNHYPRPFSDITLQGKDSYPVYRRCDDGHKEKVRGCELDNKWVVPYNPYLLRLLNCHINVEMRSSSTEMQVGDPLEALWRIYGFELSQNFPPMMQLQLHLLNMHMAAFHEQQMVERVVNRPCADRSMLTAYFEANRRHKEARGILYRDFSEWYTWQSGKGKMPPALRRLFATILVYCEPSDVAVLWQKHLDSMSEDYQRRSQSKTHVEQMVLIDIRNMLQSMEKDIKTFPLPPIIDTYDDAIGTAREVYEEESIEPAAGDVALKDSPNEEQRAAYDKIISVIDTDQGELFFVDGPGGTGKTYLYRVLLATLRNQGKIAVATATSGVAASIMPGGRTAHSRF

SEQ ID NO: 15507 - protein, 366 aa, Zea mays
  VARIANT 40: note = Ancestral polymorphism is D, Derived polymorphism is N
  VARIANT 2: note = Ancestral polymorphism is A, Derived polymorphism is V
MAAAAGLPWWLLLLAVVPAVTAAATAGGEGRAPALFVFGDSLIDSGNNNNLASLAKANYFPYGIDFAGGPTGRFCNGYTIVDELAELLGLPLVPPYSEASSVQHVLQGVNYASAAAGILDDSGGNFVGRIPFNQQIQNFETTVARIAGAAGAAAAADLVARSVLFVGMGSNDYLNNYLMPNYDTRRRYGPQQFADLLARQLAAQLARLHGAGGRRFVVAGVGSVGCIPSVRAQSLAGRCSRAVDDLVLPFNANVRALVDRLNGNAAAGLPGASLTYLDNFAVFRAILTDPAAFGFAVVDRGCCGIGRNAGQVTCLPFMPPCDHRERYVFWDAYHPTAAVNVIVARLAFHGGADVVSPVNVRELAGM

SEQ ID NO: 15508 - protein, 741 aa, Zea mays
  VARIANT 367: note = Ancestral polymorphism is W, Derived polymorphism is C
  VARIANT 488..741: note = Derived polymorphism lacks residues 488 to 741
MEEGFTGGVRIVSRRLVRPEPTASSPDNNSAPPEEEEDEIMHMTPWDLRMITVDYIQKGLLLPKPPAAGGAHAHRLVDGLASSFARALARFYPLAGRLAVDAATGGPGVVVSLRCSGEGAEFVHAEAPEVTVSDIITLPAGHYYVPSALVWSLFPLNGLLGTDAALDDDSRAPLLSAQVTELADGVFVAMSLNHAVGDGTTFWHLFNTWSEISRAGGEGREAELCTPRPVLDRWFLDTCPVPIALPLRKLEDIVRQPEYPPVRECFFDFPAESVRKLKAKANAEIAAGGGTAPAAVVLSSLQSLFAHLWRAVCRARELAPGAETAYLLPVGCRARVRGVPQAYVGNAVTLAVAKSTAGEVLGGGLGWAALLLNRAVASFDEAGVRAELAAWARDPRFAYVEPRGYGGAATVATGSSPRFDVYGNDFGWGRPLAVRSGAGNKMDGKVTVYEGRGGAGSMALEVCLEPQALARLVADDEFMEAVTANIEYGLERINAEVSEWIRGEGGDNTRALEYVRGRDTVVWLRRFFDGFDCDCKRLEGVLGMIPGAKRMVMGHTIQTVEINTVGRGPPPSTSPVSVGRGPPRRDDAMAQTLATTGRTLPQRGGAMVGQGTSVKGFGLAMKTSNTKLILNGGQRVSVRRSLYLLYCWFLDLIYFSHNVPAGTHLIEVSSIGYFFSPVRELFSVMSLLKSPMGLMVDFMVLMVFVMPKMMENIDPEEMKQAQEQMRNNPVSLSGLLARAQG

SEQ ID NO: 15509 - protein, 590 aa, Zea mays
  VARIANT 203: note = Ancestral polymorphism is A, Derived polymorphism is T
  VARIANT 387: note = Ancestral polymorphism is C, Derived polymorphism is Y
  VARIANT 439: note = Ancestral polymorphism is R, Derived polymorphism is Q
  VARIANT 458: note = Ancestral polymorphism is D, Derived polymorphism is Y
  VARIANT 469..590: note = Derived polymorphism lacks residues 469 to 590
  VARIANT 531: note = Ancestral polymorphism is P, Derived polymorphism is L
MAMGISDARDALLGRSTRGALLSGVPGGGPPGHRRFLAAPPHRRGIVLRHGRGAVSTSSPLCAGVAGLLVPDIESEDSKVSVGNAAKQSHDVVGVGIDCIFNPVKVSTEANLGTQPDMIHLTSLDVQNESSQISSDADMLEQNKQDALDTLIIISQHKKPKKLNVARVVSEVLVSIDSAWLNRNGMECLFHVDIQLSGEVLSAYIHCIRDEEHLLHREGGKVFLENTFISSLLKRDGDPKVFISINIENCHWYLAVLNAKKSELKGLERRIKHAAEYKELYQGKWSNLDVASWPVIEKITTQMQTDGFKLPAILWDSRLNTKKIHQNLDHNVDEDGESSSDVEIIDTPCELPKSSNTSHQIEPYISPCILPAKVTSTNTQELMFVLCTYIMGIDNAKYLKKHWIQSTKPYPISLSVQKLKDILDVNKPMDTNCFNMAIRMITCNDALFLLEDKYPYMDLQFCSITKFGRDSRLRAKPDINMLAKLLECWPAMEYDFSDCKQILLPDSFLGHFTLYVLNMDTRSIYIMDSMPIPSWFKGIYLAFLLSTLCMLGMNGNVLRIKILVELLKYKDNESKDNIPEEIQEIIRHIR

SEQ ID NO: 15510 - protein, 250 aa, Zea mays
  VARIANT 18: note = Ancestral polymorphism is E, Derived polymorphism is K
  VARIANT 42: note = Ancestral polymorphism is A, Derived polymorphism is V
  VARIANT 55: note = Ancestral polymorphism is R, Derived polymorphism is S
  VARIANT 57: note = Ancestral polymorphism is A, Derived polymorphism is V
  VARIANT 77: note = Ancestral polymorphism is T, Derived polymorphism is I
  VARIANT 105: note = Ancestral polymorphism is P, Derived polymorphism is S
  VARIANT 106: note = Ancestral polymorphism is T, Derived polymorphism is S
  VARIANT 115: note = Ancestral polymorphism is G, Derived polymorphism is D
  VARIANT 120: note = Ancestral polymorphism is T, Derived polymorphism is N
  VARIANT 132: note = Ancestral polymorphism is T, Derived polymorphism is I
  VARIANT 158: note = Ancestral polymorphism is S, Derived polymorphism is R
  VARIANT 159..250: note = Derived polymorphism lacks residues 159 to 250
MAPAGGQQQPMKRPRPTEFSGRRVVVQPYNSLLTLKRLTLNADCVVVLDNTTLNSIAVEHLHLSNPTFAQTNSLVSTVISASTTTLRYPGYMNNDLVGLLASLIPTPRCHFLMTGYTPLTVERQVNMIHKTTVLDVMRRLLQTKNVMVSSYARTKEASQAKYISILNIIQGEVDPTQVHESLQRIRERKLVNFINWAPASIQVALSRKSPYVQTTHRVSGMKLANHTSIRHLFGKCLGQYEKLRKKTDFS

SEQ ID NO: 15511 - protein, 103 aa, Zea mays
  VARIANT 10: note = Ancestral polymorphism is P, Derived polymorphism is L
MVVLHVKLAPPAAAAATAAASSPMQDVDEETEFLYECAASAVVADVAAALGALAGLQAAILSLCRRLRARCAGAMGELERALDEAEAYASKIVVRLIEARDEC

SEQ ID NO: 15512 - protein, 504 aa, Zea mays
  VARIANT 19: note = Ancestral polymorphism is A, Derived polymorphism is D
  VARIANT 93: note = Ancestral polymorphism is A, Derived polymorphism is D
  VARIANT 133..504: note = Derived polymorphism lacks residues 133 to 504
  VARIANT 394: note = Ancestral polymorphism is I, Derived polymorphism is N
  VARIANT 412: note = Ancestral polymorphism is S, Derived polymorphism is C
  VARIANT 424: note = Ancestral polymorphism is D, Derived polymorphism is G
MTTLGHRMIKKQFNKTPRAGWQIDCLEQREFDSVVVKLQIFTNVFRVDYSPPDGFGFEVLDENILPVQDDMPMFDYNVEEQVNDFVAAAIEQDARKIEFLVGRRSSLGLFTTSLEDPMAIAQHHDAVSGIAKQHTTDDYSKCLALGASKNESINGINIVSCYPLQYTTLKPLADRVIVKINSSEEKTTGGILLPTTAQSRPQGGKKYVKEKCRTTQKINSRTGCFNKSLSMRMACNITCPSIEIGGYGDALLNLIYASPSSQFEELSLECELDATGNHSRVKDAQVHGSPIPESNGRLSTTAQTKMMSTVSEDAILVGSSFRWKRKLTYFITMKPEDVYQSSLGNNNKRVGLFDMGDGSSEPAAEDNNQMHQVYHGFYSAYDNTTLLYEILKSIKWARKTYVNRPVNVVGHSIGGDLASFCALDLFLPEMRLYVMILVRTRPIAEVGHGMSVADNLEYYSVTLHVDSRGTCQFVIGTANQVYNYIREVDGSIILLRYICKNHEL

SEQ ID NO: 15513 - protein, 336 aa, Zea mays
  VARIANT 304: note = Ancestral polymorphism is D, Derived polymorphism is Y
  VARIANT 276: note = Ancestral polymorphism is S, Derived polymorphism is F
  VARIANT 255: note = Ancestral polymorphism is D, Derived polymorphism is Y
  VARIANT 188: note = Ancestral polymorphism is C, Derived polymorphism is R
  VARIANT 173: note = Ancestral polymorphism is V, Derived polymorphism is D
  VARIANT 166: note = Ancestral polymorphism is G, Derived polymorphism is D
MEGSLSLAIPARLLQGRKVRPRHRHPRAAAFPSRHPRTAAPRKEGPTPPSPQWEIPILCARARHGAGVPEAQERAPVCSATRSLQDLASRKRAYRGSEPQQSHCTDAPVPAVVMTAPAASGASASARVLSGRELKRKVGCIDNAMRIGRRKRLESEYDLGDEIGHGKFGSVRVCRPKAGTRGEEEFACKALPKNGGDTTHREVVREGKLSERRAANVIKELMVVLKYCHEMGIVHRDVKPENVLLTRSRRLKLADFGLAVRVADERIHNELNDPMSAKYFGGGMKITPIADPSSNNLEVVILYDFKWYFLLKQHSLYGGTHLSVNGVSSMRWVLAG

SEQ ID NO: 15514 - protein, 795 aa, Zea mays
  VARIANT 357..795: note = Derived polymorphism lacks residues 357 to 795
MGGGRAQVNKAHKSRFASKASRHTHKIDKVRSGKSETSHRAAVKGARAARIQQSKAIRDKKRAALLKEKRSSTGPSSAPRVIVLVGLSSSANVGSLAKDLLAFAEGDDRKLKLSTIASPTYKLRTTSISRIGFSYFIIFVKVLQAPYGDLTTCMELAKVADLLAFVLPANSFYSGDLNSPIDEFGSQCLSVFRAMGLPSTAVFIRDLPADNKSRQELKKAATSFLSAELPEDCKFYLADTKDDLHKFMWLFKEQHLSSPHWRNQRSYVMSEQVCINPDENTGLCTLLVSGYLRAHNLSVNQLVHVSGAGDFQLGQIDVLKDPCPLSERKSSDVMETEDNGIQIVNTFVPDPSSQEPLLVENVPDPLAGEQTWPTEEDMEEVDINNKQRKLEKRKLPQGTSEYQAAWIVEDTDDEDNDSDDDNQTESGMVIDEQGHSDQGSDGSDIDAVSHFTEKFDGETIGDTEMADEENLTKDQIEAEIKKIKEANADDEEFPDEVETPLDVPAKKRFAKYRGLKSFRTSSWDPKESLPLDYARIFAFDNFTRTQKHVFAKIAELDGGMKNCAQVGSYVRLYVKNVPTDIASKLCHPSRRIPVVVSGLLQHESKMSVLHFSIKKHDSYEAPIKSKEPLIFNVGFRQFTARPLFSSDNINCNKHKMERFLHHGRFSVASVYAPISFPPLPLIVLKNRDGEQPAIAAVGSLKSVDPDRIILKKIVLTGYPQRVSKLKSIVRYMFHNPDDPVELWTKHGRRGRIKETVGTHGAMKCLFNSSIQQHDTVCMSLYKRAYPKWPEQLYHV

SEQ ID NO: 15515 - protein, 1474 aa, Zea mays
  VARIANT 1348..1474: note = Derived polymorphism lacks residues 1348 to 1474
MLKPVPDCGYCTAKKFEYEPPGFCCRGGKVELAPLETPPQLKRLWDSTDSDARHFRDNIRFFNGHFSFTSLYCCLDSMTTNVRDSGIYTFRAQGMMYHNIKSFGREGGAEHKHLELYFYDDDPSLEHRYRKCRADQLQRDKEVIRQIVGILRGNPYSEHLRSMGHVENLDDYYIALNLDQTLNQKTYNAPLTSEVAAVWIEGSERRGQFSKSVMLHGKDRSNHGIRSYHGCYDALSYPLFFPKGELGWHANITKVGVSMDEVDAYRVIHRASNANDEDAGLFNPILHGKRLFRQFAVDTYIKIESSRLDFIRNNQEQLRADLYQGLVDSMVDGDISAEKVGKRTVLSPSFIGGPRDMRRRYMDAMALVRKFGKLDIFLTMTCNPNWDEIRRELLPDQTPQDRPDLVVRVFHAKLQELKHRLTKQDILGKVRAYIYVVEFQKRGLPHAHFLLIMQRKYKLTCPEQYDLLISAEIPSNKYPELRKMVIKHMMHGPCGSLNPNCPCTKGRASCKNQYPQPYSEATLQGKDSYPIYRRRDDGRKEKVRGCELDNRWVVPYNPYLLRLFNCHINVEACGSIKAVKYLFKYIYKGHDQALWRIYGFELSQISPPVMQLQLHLPNMHMVTFHERQMVERVVNRKGADRSMLTAYFEENRMHKEARNILYRDFPEWYTWQQGKVWQRRKRNTGGKVGRIVSALPAEGERFYLRLLLNHVTGATSFADLRTVDGDILPSFREAAQRRGLLEADDTIDECLNEAALYQMPSALRRLFATILVYCEPNDVAELWQRHLDAMSEDYHRINGERHKYIPLPAIIDIYDNSHGTDREIYEEECIEPTTEDIALKETLNEEQRSAYDKILSVVDTNNGGVFFVDGLGGTGKTYLYKALLAALRSQDKIAVATATSGVAASIMPGGRTAHSRFKIPLTIDDGAVCSFTKQSGTAKLLQKASLIIWDEASMAKRQAIEALDNSMRDIMGRTGVPFGGKTIVFGGDFRQVLPVVRKGSRAQIVAASLRSSYLWESMCHLKLVRNMRAQSDPWFAEYLLRVGGGTEEENNDGDVRLPDEVCVPYTGNDHDLDRLIDDIYPKLNENMSNTSYITSRAILTTRNDWVDMINMRMIDHFQGEQMMYHSFDTAMDDPNNYYPSEFLNTLTPNGLPPHVLKLKVGCPIMLFRNIDPGNGLCNGTRLVHAGMRIFLPRIPLCPSDDEMFPFHFKRKQFPLYVALSRATARSKVKILAIPVIDEKKKKNWVEKNSTINGATYTKNIVYKEDCPPEFREAVSNLIFTVARYPDLPELCDLRHIFTERYGNFVEHFVSQEETNAQITPNSQSKHIGMRNGALNHKNNSGRLMQRMQPEAAETAIDCGNLFPRNANGQMRHNSGRGGDMDEEERMMDKLLMHYRKKGSDLTNNETHTDAVHKVSLAPCIPRVELSRYHLNLLARAKMRRFMLDAHHFSRKVLGVRMFTQKCQTLMNCLLGSRL

SEQ ID NO: 15516 - protein, 108 aa, Zea mays
  VARIANT 67..108: note = Derived polymorphism lacks residues 67 to 108
MSPVAGKSSLILSHQSTGMLLLLTSPPSQPCRRPCWRSARVPESEEECKASRRAARSMLLVRVTHCWRSYIFCMMQGLTPTPVFPLIVGVYVVALEFMFLMNIDFMLL

SEQ ID NO: 15517 - protein, 375 aa, Zea mays
  VARIANT 339: note = Ancestral polymorphism is W, Derived polymorphism is S
MAAAAGLPRWLLLLAVVPAVTAAATAGGEGRAPALFVFGDSLIDSGNNNNLASLAKANYFPYGIDFAGGPTGRFCNGYTIVDELVVIDAVVFVAELLGLPLVPPYSEASSVQHVLQGVNYASAAAGILDDSGGNFVGRIPFNQQIQNFETTVARIAGAAGAAAAADLVARSVLFVGMGSNDYLNNYLMPNYDTRRRYGPQQFADLLARQLAAQLARLHGAGGRRFVVAGVGSVGCIPSVRAQSLAGRCSRAVDDLVLPFNANVRALVDRLNGNAAAGLPGASLTYLDNFAVFRAILADPAAFGFAVVDRGCCGIGRNAGQVTCQPFMPPCDHREHYVFWDAYHPTAAVNVIVARLVLHGGADVVSPVNVRELAGM

SEQ ID NO: 15518 - protein, 487 aa, Zea mays
  VARIANT 252: note = Ancestral polymorphism is D, Derived polymorphism is V
  VARIANT 367: note = Ancestral polymorphism is W, Derived polymorphism is C
MEEGFTGGVRIVSRRLVRPEPTASSPANNSAPPEEEEDEIMHMTPWDLRMITVDYIQKGLLLPKPPAAGGAHAHRLVDGLASSFARALARFYPLAGRLAVDAATGGPGVVVSLRCSGEGAEFVHAEAPDVTVSDIITPPAGRYYVPSALVWSLFPLNGLLGTDAALDDDSRAPLLSAQVTELADGVFVAMSLNHAVGDGTTFWHLFNTWSEISRAGGEGREAELSTPRPVLDRWFLDTCPVPIALPLRKLEDIVRQPEYPPVRECFFDFPAESVRKLKAKANAEMAAGGGTAPAAVVLSSLQSLLAHLWRAVCRARDLAPGAETAYLLLVGCRARVRGVPQAYVGNAVTLAVAKSTAGEVLGGGLGWAALLLNRAVASFDEAGVRAELAAWARDPRFAYVEPRGYGGAATVATGSSPRFDVYGNDFGWGRPMSVRSGAGNKMDGKVTVYEGRGGAGSMALEVCLAPQALARLVADDEFMEAVSAAAP

SEQ ID NO: 15519 - protein, 68 aa, Zea mays
  VARIANT 15..68: note = Derived polymorphism lacks residues 15 to 68
  VARIANT 12: note = Ancestral polymorphism is V, Derived polymorphism is M
MSMIGRDVAATVKKWRLRDDISNHGHLVSCFISQHTQCISLCPSFFGFADDCIFVYEGLSIPVLFSYA

SEQ ID NO: 15520 - protein, 134 aa, Zea mays
  VARIANT 25..134: note = Derived polymorphism lacks residues 25 to 134
  VARIANT 118: note = Ancestral polymorphism is P, Derived polymorphism is T
MGTPAPRSATPGRGTLLSLGTWSGQDPAEVSADERRQPEVRDLGREGCVEEDVLRLDVAVDDALAAALVQVAQSSCDPDGDPVPLAPIQRSGDGGGAALLEQMRVEGAVHHVLVHKQPLVAFAAEADQSDQVPR

SEQ ID NO: 15521 - protein, 125 aa, Zea mays
  VARIANT 69: note = Ancestral polymorphism is A, Derived polymorphism is T
  VARIANT 31: note = Ancestral polymorphism is R, Derived polymorphism is S
MASFGLAYPMSTATTRNLVRLIGFCCEGDKRLLVYEHVVNGSLDAHLFQQSSAAAVATALDWSKRYRIAVGVARGLCYLHQSCRECIIHCDIKPENILLDASFAPKIADFGLAAFVGRDFSRVLS

SEQ ID NO: 15522 - protein, 235 aa, Zea mays
  VARIANT 132: note = Ancestral polymorphism is P, Derived polymorphism is L
  VARIANT 65: note = Ancestral polymorphism is T, Derived polymorphism is I
MGGRGTAASAEAAMVGLGGSLVKGDKRLLLYEHVVNGSLDAHLFQHSNAVAVATALDWSKRYRITVGVARGLCYLHQSYRECIIHCDIKPENILLDASFAPKIADFGMAAFVGRDFSRVLTTFRGTAGYLAPEWLSGVPITPKVDVYSFGMVVLEIVSGQRNTPPQALSRETSAWRRRRGCAKSRSGASKTTSATGRPWLTLSAFLRASRSSICPQCQYYLQLLQHAPMRISCDR

SEQ ID NO: 15523 - protein, 124 aa, Zea mays
  VARIANT 24..124: note = Derived polymorphism lacks residues 24 to 124
  VARIANT 35: note = Ancestral polymorphism is T, Derived polymorphism is I
  VARIANT 101..124: note = Derived polymorphism lacks residues 101 to 124
  VARIANT 107: note = Ancestral polymorphism is P, Derived polymorphism is L
  VARIANT 110: note = Ancestral polymorphism is C, Derived polymorphism is W
  VARIANT 116: note = Ancestral polymorphism is P, Derived polymorphism is L
MAHLGKTLETSSRRQSRGGSLRRQRLAHQPWNLRTVAPTRQAGSDDATEAAERAPAPTPEVKKQASSVALSKQEIADDFTAIRGTRPPRWPKKRPRMVQQQLDLLYLGLWLADVAPGSYKIEER

SEQ ID NO: 15524 - protein, 428 aa, Zea mays
  VARIANT 299: note = Ancestral polymorphism is W, Derived polymorphism is C
  VARIANT 298: note = Ancestral polymorphism is C, Derived polymorphism is F
  VARIANT 289: note = Ancestral polymorphism is P, Derived polymorphism is L
  VARIANT 201: note = Ancestral polymorphism is T, Derived polymorphism is I
  VARIANT 152: note = Ancestral polymorphism is I, Derived polymorphism is N
  VARIANT 67..428: note = Derived polymorphism lacks residues 67 to 428
MTGNLVDGVENESQQDAQVAEHAAGGTASIRHHEVGEAPPLRRYRRHPRPMEAKVAAVAEFCRAAGQPFAAVRGKMLSVAGAARGSYAADGTLVHMNDGEFAEMMLLDGCFLLQFMASVCRHRDDDPLISRGEVRRSINAIVRDVMLLENQIPWLVLSSLMQLMPPPAEPVVDSFLVLMASAFHIVGDTNDASSQTRLLATGELDQSAPPHLLGLFHRRHMDMGAVRTQQHQSGILRVPVQLASLSSTAVELAEMGVKLAPSKTKTFGDMAMSKRHWPLGLFGELSLAPLVLNRLTECWLLNMAAYESCQPQQQGDATDSFPVSSYVTLVSLLVNRPEDVQEMRAKGLVVSVFDDGETLAFFKALAPHLSVGCRYYEVFQFLQEYRQERWLSGCGSPSTGSCTTTSRPSPLSSPSSACSRDSSRPSFL

SEQ ID NO: 15525 - protein, 495 aa, Zea mays
  VARIANT 363..495: note = Derived polymorphism lacks residues 363 to 495
  VARIANT 343: note = Ancestral polymorphism is P, Derived polymorphism is T
  VARIANT 331: note = Ancestral polymorphism is G, Derived polymorphism is W
MTGNENLVDGVENESQQDAHVAEHAAGGTASIRRHEVHEAPPPRRYRLPKVRRAFGGPPPPPPHISFQYNSAATIERIPYNLQFIVPRNRNVIAPTAVAIGPYHRALPQLSGMQEAKAAAVAEFCRAAGQPLAAVRGKMLSVAGAARGSYAADGTLVDLDNGEFAEMMLLDGCFLLQFMASVCRRRDDDPLISRGEVRRSINAIVRDVMLLENQIPWLVLSSLMQLMPPPAGSVVNDFLLLMASAFHIVGDISNANSQTGLPAAGELDKPPPPHLLGLFHRRQMDMGAVRTQQHQGSLLRVPFQLASLSSTAVELAEMGVKLAPSKTKTFGDMAMSKRGRRWPLGLFGELSLAPLVLNRLTECWLLNMAAYELCQPQGDATDSFPVSSYVTLVSLLVNRPEDVQEMRAKGLVVSVFDDAETLGFFKALAPHLSVGYRYYEVFQCLQEYRQERWLWIAVHRFLYNNIKTIATVFSIVGVLAGLFKTILSVKQPHGP

SEQ ID NO: 15526 - protein, 215 aa, Zea mays
  VARIANT 117: note = Ancestral polymorphism is A, Derived polymorphism is G
  VARIANT 130..215: note = Derived polymorphism lacks residues 130 to 215
  VARIANT 145: note = Ancestral polymorphism is G, Derived polymorphism is W
  VARIANT 178: note = Ancestral polymorphism is L, Derived polymorphism is Q
MAAVEVCVKAATGKPDTLGDCPFSQRVLLTLEEKKVPYEVKLVDLDNKPEWFLKISPEGKVPVFNGGDGECIADSDVITQTIEEKFPTPSLVTPVEYASVGSKIFPAFITFLKSKDASDGSEKALLDELQALDEHLKAHGPYINGENVSAADLSLGPKLFHLQVALEHFKGWKIPENLTNVHAYTKALFSRESFVKTKPSEEHVIAGWAPKVSHL

SEQ ID NO: 15527 - protein, 201 aa, Zea mays
  VARIANT 192: note = Ancestral polymorphism is K, Derived polymorphism is M
  VARIANT 135: note = Ancestral polymorphism is G, Derived polymorphism is R
MAEEQIEEASMAAAAVTPFQLQFDKPIPFQNGKMLRTTKSHDVAIVSLNWAEDSPLSKSDKDEFLSYEDRTTRFFSPPVMPRIGGLRSGDTGLADENEEAIPEFSNASCQRFNIVCSGGKDGCVCFSIFGIFPVGKIASKYSNSLVHNLNSTKNSLSCMLSPASAFPVIGFGDLSTLTAHLEICSTQKYFVKLICSFKQSK

SEQ ID NO: 15528 - protein, 363 aa, Zea mays
  VARIANT 130: note = Ancestral polymorphism is T, Derived polymorphism is I
MAAVDLTPRTPKKAYGGDGGAYYEWSPADLPMLAVASIGAAKLSLAAGGLSLPSYSDSAKVAYVLQGVGTCGLVLPEATKEKVVAVKEGDALALPFGAVTWWHNGPAAQADLTVLFLGDTSKGHKRGQFTNFQLTGSAGIFTGLSTEFVSRAWDLPEPDAARLVSSQPASGIVKLPASAAALPAPSPQDRAGVALNCLEAPLDVDIPGGGRVVVLNTANLPLVREVGLGADLVRIDAHSMCSPGFSCDSAYQVTYIVRGSGRVQVVGPDGRRVLETRIEGGSLFIVPRFHVVSKIADASGMEWFSIITTPNPVFSHLAGKTSVWKAISPEVLQASFNTTPEMEKLFRSKRLDSEIFFAPPSSN

SEQ ID NO: 15529 - protein, 749 aa, Zea mays
  VARIANT 192..749: note = Derived polymorphism lacks residues 192 to 749
  VARIANT 218..749: note = Derived polymorphism lacks residues 218 to 749
  VARIANT 235: note = Ancestral polymorphism is S, Derived polymorphism is W
  VARIANT 277..749: note = Derived polymorphism lacks residues 277 to 749
  VARIANT 380..749: note = Derived polymorphism lacks residues 380 to 749
  VARIANT 454..749: note = Derived polymorphism lacks residues 454 to 749
MATPDDGPAPAGPGVRKFWRSASWSEPREPLPDAAAGPGAAGGRSRRVPPPPPLTPRSMSSKARSCLPPLQPLAITRRSLDEWPRAGSDDVGEWPNPTTPGASKAGGGPSSARPGEGLRLDLSSLRSQGRKDQIAFFDKECSKVADHVYLGGDAVAKNRDILRKNGITHVLNCVGFVCPEYFKSDLVYRTLWLQDSPTEDITSILYDVFDYFEDVREQGGRVFVHCCQGVSRSTSLVIAYLMWREGQSFDDAFQFVKAARGIANPNMGFACQLLQCQKRVHAIPLSPNSVLRMYRMAPHSQYAPLHLVPKMLNDPSPAALDSRGAFIVHVLLSIYVWVGMKCDPVMEKDAKAAAFQVVRYEKVQGHIKVVREGLEPQEFWDAFSSTLPNSDTNTKISKDQIDSASKSNPGSRIIESYDADFELVYKAITGGVVPAFSTSGAGDETHLPARESSWSLLRHKFISRSLARVYSDSALIRDFDPRVDRVQHLAAEASTSPPFLSPSSFSSDSSASSKYNSDSPSLSPTTSSPPSFGLSPASSNLPQALVPSSRSPLSQSSNAGASKPSGLESIRHPSKTSSIAERRGGFTLLKLPSLQKDLVLPPRVPSSIRRTDEALDKSCTNGVKRPTGDFRSEKCTDNSSSLHSETRLTERTDSNSEACSNVQLLVYQWPSMEKLTTFARKDLDSNSVLIFVTSNAIRREAVKMVYVWVGGEIESSKSVNAVDWQQVTGDFLHRKGLSDALPIKDNGSY

SEQ ID NO: 15530 - protein, 753 aa, Zea mays
  VARIANT 404..753: note = Derived polymorphism lacks residues 404 to 753
  VARIANT 384..753: note = Derived polymorphism lacks residues 384 to 753
  VARIANT 281..753: note = Derived polymorphism lacks residues 281 to 753
  VARIANT 279..753: note = Derived polymorphism lacks residues 279 to 753
  VARIANT 251..753: note = Derived polymorphism lacks residues 251 to 753
MSSKARSCLQSLQLLAITRRSLDEWPKAGSDNVGEWPNPTTLDASKAGGGPSSARPGEGLRLDLSSLRSQGRKDQIAFFDKECSKVLCGDAVVKNRDILRKNDITHGAGWPRVCALLPGEGLRLDLSSLRSQGRKDQIAFFDKECSKVADHVYLGGDAVAKNRDILRKNGITHVLNCVGFVCPEYFKSDLVYRTLWLQDSPTEDITSILYDVFDYFEDVREQRGRVFVHCCQGVSRSTSLVIAYLMWREGQSFDDAFQFVKAARGIANPNMGFACQLLQCQKRVHVIPLSPNSVLRMYRMAPHSQYAPLHLVPKMLNDPSPAALDSRGAFIVHVLLSIYVWVGMKCDPVMEKDAKAAAFQVVRYEKVQGHIKVVREGLEPQEFWDAFSSTLPNSDTNTKISKDQIDSASKSNPGSRIIESYDADFELVYKAITGGVVPAFSTSGAGDETHLPARESSWSLLRHKFISRSLARVYSYSALIRDFDPRVDRVQHLAAEASTSPPFLSPSSFSSDSSASSKYNSDSPSLSPTTSSPPSFGLSPASSNLPQALVPSSRSPLSQSSNAGASKPSGLESIRHPSKTSSIAERRGGFTLLKLPSLQKDLVLPPRVPSSIRRTDEALDKSCTNGVKRPTGDFRSEKCTDNSSSLHSETRLTERTDSNSEACSNVQLLVYQWPSMEKLTTFARKDLDSNSVLIFVTSNAIRREAVKMVYVWVGGEIESSKSVNAVDWQQVTGDFLHRKGLSDALPIKDNGSY

SEQ ID NO: 15531 - protein, 266 aa, Zea mays
  VARIANT 63: note = Ancestral polymorphism is E, Derived polymorphism is G
MAMELPLFLGDGPDAALFSSLWPSFLDDLQQPPQEQSVAELKQALLATTLELEAAREELRRKEQSIAKLAGLVREVARERDDARDQLQSLRLLAAQAAAAAPPLVTSSVTDSDGSLASSPADPFFDPVTSADRRCKLSPATPPAPPPKPVQQRHCQPGACGRGSAPAADAVLETLASKRPLPQRGRLLAAVMEAGPLLQNLLVAGQLPRWRNPPTVRAPDTTLPLGAATLASTACMKRPVAAAAMSVLPAASCPPAFIAKRQRLLH

SEQ ID NO: 15532 - protein, 368 aa, Zea mays
  VARIANT 104: note = Ancestral polymorphism is V, Derived polymorphism is D
  VARIANT 61: note = Ancestral polymorphism is W, Derived polymorphism is L
  VARIANT 56: note = Ancestral polymorphism is F, Derived polymorphism is L
MSSLLCISRRNNKKDSDGDGEYGGEQIIISTGGAAMRKGPWTDEEDEQLVRFVRLFGERRWDFLAKVSGLRGGGCVDRSASMQLRMHEEGRSASIEQLAVFLTVCFFFFLLIFVAYLRAALVDTDGDVRAGLRRTGKSCRLRWVNYLHPGLRRGRITADEERRIVELHAQWGSRWSRIARSLPGRTDNEIKNFWRTRTRKKALEERRAAAAATSTAAESASSVMTVSSSSECRRPPVSSSSSSSSLRRDEARRSGDETEEASTPTAAPATKHDEEPQPQPQECYDFPMDQLWNEIAAADAAAMSYLVVDACWGGAAVGGHCYYYGAAAASAASPPPPASPPWEYCGSDFSLWRIDDQEYYKKMLDSSS

SEQ ID NO: 15533 - protein, 858 aa, Zea mays
  VARIANT 105: note = Ancestral polymorphism is T, Derived polymorphism is I
MATEEELPEAAAAPAPAGGGGGDDAEMPDAAVPSGSHSDSSDSDSDDEAATAAAELRIQALEKTLQEQPLDYETHVQYIQCLRKAGNIEKLRVAREEMNKYFPLTPKMWQEWAKDEISLSSSEESFGDIEKIYGHGVQEYLSIKLWRDYLDYVEEHDHSVSQCTPSGLSKMRNLFESAITAGGLHVTEGSKLWAAYREYEMAILITIADANDEEREKQVQRIRMLFHRQLSVPLADMESTLAEYKSWEAEQGNANDPGADFDGVPSNVVSAYKKANDMYNERKQYEDQLSNAGTFEGDKLQQFMKYIKFEEASGDPARVQVLYERAVSELPVSSDIWMGYTSYLDRTLKVPSVVRSVYYRATRNCTWVGELWVHYLLSLERIRASEEELQHVFERAIQCTFSTIQEYFNIYLTRVHGLRRRISDGLDFQLIRQTLTDAAEFLSSQLSTKELLRLYAYWAKLELSLGKDLSAARGVWENAIKKSGSVFEVWEQYILMEIKMDHVHEARSLYKRCYSKRFAGSGSEEICYSWIRFEEENGTLDDYDLAVKKVTPRLKELMTFKSQEEAKVEAYPNLNDNSNANDSSQKRKPSNNKQQPPAKKRKENPPKSTMPSDDQGSNVQSGHSGAVTDVEVGGASREKVMASIEMKVDSDSRTGKSSSNEPKPSFYNDNCTVFVSNIDLKANEDDLRRFFSDIGGATAIRLLRDRFTKKSRGVTEEFKLHFLLICLPLLFLQGLAYVDFLDNKHLEAAIKKNKQKLLGKKVSIARSDPSKGKKSREAGQTSQDNLPPSGGDDAKATGSSGPDNEVPKGDAKTIGKNTLFAPRALVKPLGWTNKDEKKPDVAGELKSNEEFRNLLLKK

SEQ ID NO: 15534 - protein, 525 aa, Zea mays
  VARIANT 107..525: note = Derived polymorphism lacks residues 107 to 525
  VARIANT 111: note = Ancestral polymorphism is P, Derived polymorphism is L
  VARIANT 127: note = Ancestral polymorphism is R, Derived polymorphism is C
  VARIANT 280: note = Ancestral polymorphism is V, Derived polymorphism is D
  VARIANT 379..525: note = Derived polymorphism lacks residues 379 to 525
  VARIANT 402: note = Ancestral polymorphism is A, Derived polymorphism is D
  VARIANT 469..525: note = Derived polymorphism lacks residues 469 to 525
MHGRQSSWPKAKTAVKRWLNLKSHSDCIDGSFGLGLVESSADVYGGSPSPPAPSSSRRHPKELSIFVGTWNVGGRAAHGGLDLSNWLADDGLGGGSSSPHIYVLGFQEIVPLNAGNVLGTEDKGPARKWLDLIRRALNHPPAASPSRSSSRWRRSPWRDTHRLRKGGRVSFSDLLAAEEDGSRRPSTASSEPDDGSEASTPSPGPSSSSEEEPACAAASRRPRGGRHRDRYRLAASKQMVGILLCVWVRADLLPRVTRVRASCVGRGVMGYMGNKGSVSVSLTLRPGVGGGRGASLCFVCTHLASGDRDGDGARRNGDVAEILRRTRFARRGAPGRTACGTRAAPVTILEHDNVIWLGDLNYRLVAPAGRGGGGGTRTWELVERHDWAALLERDQLRAEQKAGRVFAGWEEGRIGFPPTYKFVAGSDAYAMTSLVDDGSLSRERKKRTPAWCDRILWRGEGVEQRWYARGESCFSDHRPVAALFSVRLGGGDYDGAERAVGAGRRDDGDDDILLGNYDRTHKLSF

SEQ ID NO: 15535 - protein, 523 aa, Zea mays
  VARIANT 105: note = Ancestral polymorphism is G, Derived polymorphism is E
  VARIANT 107..523: note = Derived polymorphism lacks residues 107 to 523
  VARIANT 111: note = Ancestral polymorphism is P, Derived polymorphism is L
  VARIANT 131: note = Ancestral polymorphism is D, Derived polymorphism is N
  VARIANT 231: note = Ancestral polymorphism is R, Derived polymorphism is P
  VARIANT 279: note = Ancestral polymorphism is V, Derived polymorphism is D
  VARIANT 330: note = Ancestral polymorphism is R, Derived polymorphism is W
MHGRQSSWPKAKTAVKRWLNLKSHSDCIDRSFGLGLVESSADGYGGSPSPPGPTSSRRHPKELSIFVGTWNVGGRAAHGGLDLSDWLADDGLGGGSSSPHIYVLGFQEIVPLNAGNVLGAEDKGPARKWLDLIRRALNHHPAASPSSSSSRWRRSPSRDMHLLRKGGRVSFSDLLAAEEDGSRRPSTASSEPDDGSEASSPSSSSEEEPACAPAPAPLPRGGRHRHHDRYRLAASKQMVGILLCVWVRADLLPRVARVRASCVGRGVMGYMGNKGSVSVSLTLRPGVGGGRGASLCFVCTHLASGDRDSDGARRNGDVAEILRRTRFARWATLDRAACETRAAPVTILEHDNVIWLGDLNYRLVAPAGGGRGGTRTQELVERHDWAALLERDQLRAEQKAGRVFAGWEEGRIGFPPTYKFVAGSDAYAMTSLVDDGSLSRERKKRTPAWCDRILWRGEGVEQRWYARGESCFSDHRPVAAFFFARLGGGDYDGAERAVGAGRRDDDDYDILLGNSDPTRKLSF

SEQ ID NO: 15536 - protein, 453 aa, Zea mays
  VARIANT 309: note = Ancestral polymorphism is G, Derived polymorphism is R
  VARIANT 321: note = Ancestral polymorphism is G, Derived polymorphism is D
  VARIANT 346: note = Ancestral polymorphism is P, Derived polymorphism is S
MGSMGYDNDKKPREQQARRPSTATMFLLVLTNAASVFVFSGAGAALHAHVGRRYPAVVHAWSSAKLLRELNATGLAVAASHAEVVDLSGRLTAANKVLEAILGGSTAKRDMEAAREEQREAAAGGLWQRELKLGGELKLVVGPHRGGGADAVTFPSLGQACHRYRDELERYMNYTVGGECPSDEASAQRLMLKGCEPLPRRRCRPRTPAGYVEPTPLPASLWAVPPDTSIVWDAYTCKSYGCLARRGKAKGSYDCKDCFDLGGREKDRWVRRRDKEKGDERNSLDYTIDGVLGSLPSGSVRIGLDIGGGSGTFAARMRERGVTVVTTSMNFDGPFNSFIASRGLVPMHLSVASRLPFFDGTLDVVHSMHVLSSWIPDAMLESALFDVFRVLRPGGVFWLDHFFCLGTQLDATYLPMFDRIGFKKLRWNAGRKLDRGIHMDEWYISALLQKPRR

SEQ ID NO: 15537 - protein, 157 aa, Zea mays
  VARIANT 94: note = Ancestral polymorphism is H, Derived polymorphism is R
  VARIANT 93: note = Ancestral polymorphism is R, Derived polymorphism is H
  VARIANT 86: note = Ancestral polymorphism is K, Derived polymorphism is E
  VARIANT 71: note = Ancestral polymorphism is A, Derived polymorphism is V
  VARIANT 68: note = Ancestral polymorphism is E, Derived polymorphism is A
  VARIANT 57: note = Ancestral polymorphism is T, Derived polymorphism is M
  VARIANT 43: note = Ancestral polymorphism is G, Derived polymorphism is R
  VARIANT 41: note = Ancestral polymorphism is R, Derived polymorphism is C
  VARIANT 36..157: note = Derived polymorphism lacks residues 36 to 157
MDGGGAKAKKAAAGRKLGGGGPKKKPVSRSVKAGLQFPVGRIGRYLKKGRYAQRVGTGAPVFLAAVLEYLAAEVLELAGNAARDNKKTRIIPRHLLLAIRNDEELGKLLGGVTIAHGGVLPNINPVLLPKKAAERAEKAAAAGPKSPKKVAAKSPKK

SEQ ID NO: 15538 - protein, 196 aa, Zea mays
  VARIANT 152: note = Ancestral polymorphism is L, Derived polymorphism is P
  VARIANT 144: note = Ancestral polymorphism is T, Derived polymorphism is A
  VARIANT 135: note = Ancestral polymorphism is R, Derived polymorphism is C
  VARIANT 117: note = Ancestral polymorphism is A, Derived polymorphism is G
  VARIANT 109: note = Ancestral polymorphism is S, Derived polymorphism is F
  VARIANT 104: note = Ancestral polymorphism is D, Derived polymorphism is V
  VARIANT 81: note = Ancestral polymorphism is A, Derived polymorphism is V
  VARIANT 73: note = Ancestral polymorphism is A, Derived polymorphism is V
  VARIANT 68: note = Ancestral polymorphism is R, Derived polymorphism is C
  VARIANT 65: note = Ancestral polymorphism is G, Derived polymorphism is S
  VARIANT 58: note = Ancestral polymorphism is A, Derived polymorphism is P
  VARIANT 30: note = Ancestral polymorphism is R, Derived polymorphism is C
  VARIANT 24: note = Ancestral polymorphism is A, Derived polymorphism is T
  VARIANT 1: note = Ancestral polymorphism is M, Derived polymorphism is I
MEGTVLCAANHAPLTPISFLERTALVYPDCPAIVAAGHAAAPPPRTWRQTRDHCLRLAAALAGLGVARRDVVAVFAQNIPAFCELHFGIPMAGAVICALNSRLDAGMASVLLQHSEAKVVFVDAALLGVAREALRFISQQAGGASRVPAVVLINEALDEPPPAATGNDKIPGVDRCYEYEALLSNSRGGDPEFLIR

SEQ ID NO: 15539 - protein, 340 aa, Zea mays
  VARIANT 309: note = Ancestral polymorphism is R, Derived polymorphism is C
MVKQGLISDPVFSFWFNRHADEGEGGEIVFGGMDSSHYKGDHTFVPVTRKGYWQFNMGDVLVDGKSTGFCAGGCAAIADSGTSLLAGPTISFELCILSAFEIEAGGDLSLITIPCFALLCILCCTLFFSDAYKLICSMQAIITEINEKIGAAGVVSQECKTVVSQYGQQILDLLLAELCGNSTCYWVILQTQPAKICSQVGLCTFDGTHGVSAGIRSVVDDEARKSNGGLKSDPMCNACEMAVLCERLPSPMGESAVDCGSLVSMPDIVFTIGGKKFKLKPEQYILKVGEGQAVQCISGFTAMDIPPPRGPLWILGDVFMGVYHTVFDYGKLRVGFAESA

SEQ ID NO: 15540 - protein, 54 aa, Zea mays
  VARIANT 45: note = Ancestral polymorphism is R, Derived polymorphism is C
  VARIANT 31..54: note = Derived polymorphism lacks residues 31 to 54
  VARIANT 16: note = Ancestral polymorphism is R, Derived polymorphism is K
  VARIANT 12..54: note = Derived polymorphism lacks residues 12 to 54
MDLDPDSPTYSQVIHRLPVTHIGDELHHSGWNSCSSCHGDPSAKRRFLILPSLL

SEQ ID NO: 15541 - protein, 139 aa, Zea mays
  VARIANT 120: note = Ancestral polymorphism is E, Derived polymorphism is D
  VARIANT 48: note = Ancestral polymorphism is E, Derived polymorphism is K
  VARIANT 11: note = Ancestral polymorphism is D, Derived polymorphism is N
MANAASGMAVDDDCKRRFLELKAKRTHRFIIYRIDEKKKMVVVEQVGKPVLGYDDFAASLPANECRYAIFDYDFVTEENCQKSKIFFIAWSPDTARVRSKMIYASSKERFKRELDGIQVDLQATDSAEVGLDVIQGRAS

SEQ ID NO: 15542 - protein, 55 aa, Zea mays
  VARIANT 49: note = Ancestral polymorphism is R, Derived polymorphism is W
  VARIANT 14: note = Ancestral polymorphism is G, Derived polymorphism is R
  VARIANT 13: note = Ancestral polymorphism is A, Derived polymorphism is T
MLVTIAGACTRGAGTSFAASGTSFSIYIWHLFQYRNFNNWLSVMNFISRLLFKGL

SEQ ID NO: 15543 - protein, 443 aa, Zea mays
  VARIANT 50: note = Ancestral polymorphism is G, Derived polymorphism is C
MPVGELAARPGGAMAAAAVGGDDAVVMQLAAAEGEETVITVNCPDQAGLGCDLCRTILEFGLRITRGDVSTDGHWCFVVFWVVPRSSSIRIRWASLKNRLMSMCPSSYSIPFYPDMSQPGPSQFYLLKLLSPDRKGLLHDVTHILSDLELIIHRVKVSTTPDGRVVDLFFITDGMELLHKKERQEETCSTLIAALGPSISCEVLSAEGFQQGFSSLAPKIAEELFRVELAGDGEMCSSSLISAELKKVQTATINFDNSLSPAHTLVQIICADQKGLIYDILRTMKDCNIQIFYGRFRSDKKGGRPGSKGCREVDLFVKQVDGKKVTDPEKQDALRARLRSEMLHPLRVMVVSRGPDTELLVANPVELCGKGRPRVFYDATLALKALGVCIFSAEIGRQAASERQWEVYRFLLDDSREFPLTNSLANRNRVVDRVRKTLMGCYN

SEQ ID NO: 15544 - protein, 261 aa, Zea mays
  VARIANT 99: note = Ancestral polymorphism is R, Derived polymorphism is L
  VARIANT 111..261: note = Derived polymorphism lacks residues 111 to 261
  VARIANT 153: note = Ancestral polymorphism is A, Derived polymorphism is T
  VARIANT 175: note = Ancestral polymorphism is G, Derived polymorphism is R
  VARIANT 190: note = Ancestral polymorphism is G, Derived polymorphism is S
  VARIANT 215..261: note = Derived polymorphism lacks residues 215 to 261
  VARIANT 230: note = Ancestral polymorphism is P, Derived polymorphism is L
  VARIANT 240: note = Ancestral polymorphism is I, Derived polymorphism is T
  VARIANT 241: note = Ancestral polymorphism is H, Derived polymorphism is Y
MRGVLPQEISAAISPLRPAAATSRNLGRDSAYPSRRRHNRPQPRERDPQIERPSPIDFCAPRARGGDGTVLSDLLENCVAEVLLRLDPLEICRMARLSRMFRGAASGDGVWESKLLTNYARLLAVAAAGDGEAGQAVGSAPKAEPLPKKELYARLCRRNRFDDGKKEFWLDKGGGGLCMSISSRALSITGIDDRRYWNFIPSDESRFRTVAYLSQIWWFEVRGEVEFFFPESTYSLFYRIHLGRPFKRNQRSSGRDHQVAY

SEQ ID NO: 15545 - protein, 56 aa, Zea mays
  VARIANT 14..56: note = Derived polymorphism lacks residues 14 to 56
MKTFDPWPVFFRREWKRNWPFLTGFAITGFIITKMTANFTEEDLKNSKFVQEHKKR

SEQ ID NO: 15546 - protein, 433 aa, Zea mays
  VARIANT 200: note = Ancestral polymorphism is H, Derived polymorphism is D
MLLLVAFFTHFLVSSLSSAEAGPPSSSATATRWRELQGNNSWNGLLDPLDMDLRRSIISYGELVQATYDGFNRERRSPHAGACLYGRADLLPGVGVAAAGRYAVTRFVYATSALPVPGSDFPLLPLPETREAWTRESNWIGYVAVATDEGAAELGRRDVVVAWRGTVKDLEWANDFTFTPVSAAPVLGSAAAANPLAVVHQGFLSVYTSSNADSRKFFLLIFKIITSIELVLEEVRRLMELYKGEATSITVVGHSLGAALATLNAVDIAANGLNEGSGSSQQLPCPVTAILFACPHVGDRFFRAAFVGYFRDLRALHVRNAGDVVPVVPPLAYVDVAVAVLPIDTSRSPYLRSPGPAGTLHNLECYLHGVAGEQGSAAGGFRLEVDRDVALVNKGADALRDEYPVPANWWVPENRWMVRGSDGHWVLKDFEEI

SEQ ID NO: 15547 - protein, 102 aa, Zea mays
  VARIANT 27..102: note = Derived polymorphism lacks residues 27 to 102
  VARIANT 36: note = Ancestral polymorphism is L, Derived polymorphism is F
  VARIANT 41: note = Ancestral polymorphism is R, Derived polymorphism is H
  VARIANT 63: note = Ancestral polymorphism is S, Derived polymorphism is R
MHTALAPFLGLTTSHEAVKQAEKLVMQSLGVIESIFGDEVRDRFLGAHERILVWMDKVKKATSPHFEEAHELLFQVKKACMVQGSSSKAFEPSTKLKTASKL

SEQ ID NO: 15548 - protein, 145 aa, Zea mays
  VARIANT 18: note = Ancestral polymorphism is S, Derived polymorphism is Y
  VARIANT 30: note = Ancestral polymorphism is G, Derived polymorphism is R
  VARIANT 31: note = Ancestral polymorphism is T, Derived polymorphism is I
MLHLIIEACISRKLIDTSAYLWTGYVVPSGTLKDTALPQESPWLNFMKGSRLSGPLIDALVASPASRCFKLFKVRSVQFGQKGIPYLNTYDGRTIRYPDPLIKANDTIKIDLKTNKIMDFFKFDVGNVVMVTGGRNTGRVGVIKN

SEQ ID NO: 15549 - protein, 134 aa, Zea mays
  VARIANT 66: note = Ancestral polymorphism is T, Derived polymorphism is K
  VARIANT 73..134: note = Derived polymorphism lacks residues 73 to 134
  VARIANT 83: note = Ancestral polymorphism is C, Derived polymorphism is Y
MLLLAVADVPNGKLQQSSSTKTSSHAKFNLPNPNLFYIASQIAAMETDPVAAGASSSPPPSLASAKSPPWQMRDDDEPRAVDYADPRGDLNLAPLPSPQQAIVENAAVGSEVEQEEPKKEAMAGVGETLHSFME

SEQ ID NO: 15550 - protein, 597 aa, Zea mays
  VARIANT 204: note = Ancestral polymorphism is L, Derived polymorphism is Q
MSIRKALGAVKDHATIGIARVTGAVAPDLDVAIVRATSHDDAPPDERHAREVLRLASATGAAPACIASLARRLSRTRDYVVAAKCLSLLQRLASAEGDVEGGAGTRPFLHELLRPAVSGRRAGEPVLALLLDFRDDAHPGSWDHSAFVRAYATYLLDRVRFLVLLLPAPPRFSDGRVAPGPPQAPADDMDAEALLGRARHLRHLLDRLLACRPAGAAGASRVVRAALHPMLRDSFRVYEDVALLLALLLDRFFDMDYSDCVKAFETYVGTAKQIDALRAFYAWCEDAGIARSSDFPDVKRVDDKLLETMEQFLRERGRAGRAWASPPAPSRLAHQPDANAQGDDGHVDGMNSIKVLPAPSTRSIGAEPATPRPAEEASQSDLVDLRETAATADEEGNKLALALFSAPPATNGSWVTFPSGPDAAPEPAVTSAWHTPAAEPRNADWELALVETASNLSKQAASLGGGMDTLLLGGMYDHGAVRRQVAAPGSASSMALLPGHQVAPVLMLLGPDGSTARQVAGGDPFAASLAVPPPSYVQMAEMERKQQLLVQEQQMWAQYRHGGMQGQPAGFNNGLAGGSVFAPNAAMAVPYGGYGYY

SEQ ID NO: 15551 - protein, 196 aa, Zea mays
  VARIANT 137: note = Ancestral polymorphism is G, Derived polymorphism is A
  VARIANT 40: note = Ancestral polymorphism is A, Derived polymorphism is T
MPTQQACSAAAALRSRRPSPASTTTTSRQLRLRPPRAATAGVRLTVSDAELESRGFAVRRTAEGIDVAALNEVFVRVGFPRRQEERLRRALEHSRVVWLSAGEEEGRPVAFARAAGDGVFNAVVWDVVVEPSSQGLGLGRAVMERLVDELRRDGVANIVLYAETRVVGFYRLLDFAMDPDGIRGMAYYRKSTTTAA

SEQ ID NO: 15552 - protein, 622 aa, Zea mays
  VARIANT 494: note = Ancestral polymorphism is D, Derived polymorphism is V
  VARIANT 332: note = Ancestral polymorphism is Y, Derived polymorphism is H
  VARIANT 311: note = Ancestral polymorphism is A, Derived polymorphism is V
  VARIANT 269: note = Ancestral polymorphism is P, Derived polymorphism is S
MVVTVLFQSGVLGRVSLLSPWHCFQRSEAHGICIAVAATPTTGQRRHLHLPPRLPPVSASLDPAASHPSKGAMSPSGELLASISSVFTVAFVLLACVELGDAAAAAVGVYRLIQYDLAGAPLGSRAAVLNHHAAALPLPAGADLSRSALVAPLLDLPLSFLREYLVEKKHLGGLLILLPTNNDSVDDKGQFKGVLTELEKLLLHEQVPYPVYFALHDDNLDNLLADIHRIASTGQPASATTGGYKLVVSSAEPRKVSSPTISNIQGWLPGFKGEGDSEQLPTIAIVANYDTFGAVPALSVGSDSNGSGVVALLEIARLFSRLYSNPKTRGKYNILFGLTSGGPYNYNGTSKWLRSFDQRVRESIDYAICLNNVGSWGNDLWMHVSKPPENPYIKQIFKEFSDVSKEMGVSVGIKHKKINVSNPRVAWEHEQFSRFRVTALTLSEMSTPPDFLESTGGLHDTRESTDAESVIRAARLVSESLARRIYGLKGRNIDVFAENSSLAINPHYIRSWLDLLSRTPRVAPFLQKNDPFIAALEKELSAHTTDVRVQSDALDGMFTFYDATKATLNVYQVAGVTFDLLFLLVLGSYLIVLFCFLVITTRGVDDLINIFRRPPSRKLKGA

SEQ ID NO: 15553 - protein, 251 aa, Zea mays
  VARIANT 8: note = Ancestral polymorphism is L, Derived polymorphism is I
  VARIANT 21: note = Ancestral polymorphism is A, Derived polymorphism is V
  VARIANT 34: note = Ancestral polymorphism is H, Derived polymorphism is Q
  VARIANT 102..251: note = Derived polymorphism lacks residues 102 to 251
  VARIANT 129: note = Ancestral polymorphism is Y, Derived polymorphism is H
  VARIANT 142: note = Ancestral polymorphism is V, Derived polymorphism is A
  VARIANT 144: note = Ancestral polymorphism is A, Derived polymorphism is V
  VARIANT 183..251: note = Derived polymorphism lacks residues 183 to 251
MARHSLALVLLVVIAISVTGVQSKMFTITNNCVHTVWPGISTGASPAPPLDTTGFELAPGESRALPVPSGWSGRVWGRTLCSTAAGTGKFTCVTGDCGSGLQECASGNAAPPVTLAQFSMDGSGGMDLYDVSLVDGYNLPMVVVRQGAAAEGNCVPAGCVVDLSGACPAELRVPGVVACKSACQAFGSPRYCCTGEYGNPDTCKPSAYSEFFKKACPRAYSYAYDGNTSTFGCSASDTGVYIITFCPSTSR

SEQ ID NO: 15554 - protein, 358 aa, Zea mays
  VARIANT 11..358: note = Derived polymorphism lacks residues 11 to 358
MTRAAASGRRRPSSSMGGASGGDQQPQQHGGADDADDGHLQQASGGDMVMPGFRFHPTEEELIDFYLRRRVEGKRFNIELINLVDLYRYDPWDLPALASIGDKEWYFYVPRDRKYRNGDRPNRVTPSGYWKATGADRTVYVEVKRPIGLKKTLVFYVGKAPKGLRSSWIMNEYRLPSGEADRYQKEISLCKVYKRPGIEDNFHLSTTTARSSGSKAAANMDKKHHRTSASPRLAPMFDGGHSSAHMNKPYGGANTAIAITSSAAARAVTMVPQTSMFLSTPSLSSTTSTEEDGTSLYLMKGANNSPMLHSSTHALLNANSATMATIPIDELSRAIGSYSSQGNPNHPLPSQDLVVELD

SEQ ID NO: 15555 - protein, 71 aa, Zea mays
  VARIANT 4: note = Ancestral polymorphism is G, Derived polymorphism is D
  VARIANT 18: note = Ancestral polymorphism is P, Derived polymorphism is L
  VARIANT 35..71: note = Derived polymorphism lacks residues 35 to 71
  VARIANT 39: note = Ancestral polymorphism is G, Derived polymorphism is R
  VARIANT 42: note = Ancestral polymorphism is A, Derived polymorphism is V
  VARIANT 45: note = Ancestral polymorphism is S, Derived polymorphism is L
  VARIANT 48: note = Ancestral polymorphism is E, Derived polymorphism is K
  VARIANT 52: note = Ancestral polymorphism is T, Derived polymorphism is M
  VARIANT 57: note = Ancestral polymorphism is G, Derived polymorphism is E
  VARIANT 64: note = Ancestral polymorphism is V, Derived polymorphism is D
  VARIANT 71: note = Ancestral polymorphism is V, Derived polymorphism is D
MRGDGRGGGGRQPSYAAPDGANAVAIPVASRKMVQSLKRILADRSEGEIYATLCDCGMDPDIAVERLISQV

SEQ ID NO: 15556 - protein, 170 aa, Zea mays
  VARIANT 114: note = Ancestral polymorphism is S, Derived polymorphism is R
  VARIANT 49: note = Ancestral polymorphism is E, Derived polymorphism is K
  VARIANT 44: note = Ancestral polymorphism is L, Derived polymorphism is P
  VARIANT 39..170: note = Derived polymorphism lacks residues 39 to 170
  VARIANT 38: note = Ancestral polymorphism is R, Derived polymorphism is C
  VARIANT 34..170: note = Derived polymorphism lacks residues 34 to 170
MYLHPKLQCIPAVTHLLIANRNHGLVFGGTSKDWDDIRQFIASLERASENSSAIASKIGGGKSTNHSVERAEQKEKGDIVVLDLDDEDGDGNSPEHNKLASEMDKELGTSVLARNIAERMATNGSQTFETVHAYGGKNTQIVPYGQGSTLVNQFPLQTSWQPSSGRFHNL

SEQ ID NO: 15557 - protein, 340 aa, Zea mays
  VARIANT 29: note = Ancestral polymorphism is D, Derived polymorphism is E
  VARIANT 46: note = Ancestral polymorphism is D, Derived polymorphism is V
MGHGVSCARTGDEHDYFRAAQVGDLEALEALLDADPSLARRATLYDRLSALHIAAANGRLEVLSMVLDHGVPPDVVNRHKQTPLMLAAMHGKTDCVLKLLQAGANILMFDSQHGRTCLHHASYFGHVGCLQAILTAARTTPVANSWGFARFVNVRDDHGATPLHLAARQGRPGCVQALLENGAIVSALTGSYGFPGSTSLHLAARSGSLDCTRKLLAWGADRLRRDSAGRIPYAVALKRNHEACAALLNPISRLLLVARASSDDADTEKSAAAAAAAAASSPQLVRRRSRRSHNLSDGGSSSFKGLSSAVAGSFSKIGRGSSRTMADSDGCGVDKPEHDP

SEQ ID NO: 15558 - protein, 215 aa, Zea mays
  VARIANT 17: note = Ancestral polymorphism is F, Derived polymorphism is Y
  VARIANT 28: note = Ancestral polymorphism is N, Derived polymorphism is H
  VARIANT 32: note = Ancestral polymorphism is N, Derived polymorphism is D
  VARIANT 34..215: note = Derived polymorphism lacks residues 34 to 215
  VARIANT 41: note = Ancestral polymorphism is G, Derived polymorphism is V
  VARIANT 54: note = Ancestral polymorphism is G, Derived polymorphism is D
  VARIANT 55..215: note = Derived polymorphism lacks residues 55 to 215
  VARIANT 63: note = Ancestral polymorphism is R, Derived polymorphism is W
  VARIANT 103: note = Ancestral polymorphism is S, Derived polymorphism is Y
  VARIANT 132..215: note = Derived polymorphism lacks residues 132 to 215
  VARIANT 139: note = Ancestral polymorphism is S, Derived polymorphism is L
  VARIANT 146: note = Ancestral polymorphism is R, Derived polymorphism is L
  VARIANT 163: note = Ancestral polymorphism is R, Derived polymorphism is H
  VARIANT 166: note = Ancestral polymorphism is A, Derived polymorphism is V
  VARIANT 169: note = Ancestral polymorphism is L, Derived polymorphism is V
  VARIANT 201: note = Ancestral polymorphism is C, Derived polymorphism is Y
MPARSVSRSTHTEWPVFKVILVLSSWLNETINVWMFMHLLGFMLFFDLTLVHLGQYFTKAVRRDNKQRFSLLEEDGELLIRANQGHTVICYLSNSGQLPYKWSVEIDFCCSRTDAEGWGNLPNICFIFFFLRWFPNKTSLRMAVARIKLLRNRKEVQVHQMRHEVAQLLEANQDMTARIRVEHVIREEKFMQAYDLIEVYYELIVARLSIIDSQK

SEQ ID NO: 15559 - protein, 64 aa, Zea mays
  VARIANT 40: note = Ancestral polymorphism is P, Derived polymorphism is S
  VARIANT 10: note = Ancestral polymorphism is K, Derived polymorphism is N
MAYCCDDGCNCPPDCGCPCDCCNLYPEVETAAASGILAAPTTKASAGGCNTCKCGGTSCNCNCS

SEQ ID NO: 15560 - protein, 229 aa, Zea mays
  VARIANT 118: note = Ancestral polymorphism is E, Derived polymorphism is K
  VARIANT 66: note = Ancestral polymorphism is A, Derived polymorphism is D
MPRSGFSGSFRSPKIDVVIDMGNPFLNRTVDGFLKIGAVGACKVAAEETFECLHRGDVSKHKVEHALRKMCKEGAYWGTVAGVYVGMVYGVERVRGRSDWVRITSHEYKYARFCCGLKPVTSHSCIMKIVGSVSPVPSQYPTHQFNLRHLLVPVLDPRSFCSHGPAEERDDRGRLVRRPDLRRQQQRQRQGRQGRHHRRRGRHSRRVHQLHYLAEQGATAFAVPLSCKI

SEQ ID NO: 15561 - protein, 876 aa, Zea mays
  VARIANT 665..876: note = Derived polymorphism lacks residues 665 to 876
  VARIANT 444..876: note = Derived polymorphism lacks residues 444 to 876
  VARIANT 39..876: note = Derived polymorphism lacks residues 39 to 876
MEPQLTPGAVAAVSAHADGNGTLQPVLQVVDVRMVNNAKNPSAERFRMVLSDGEHTMQSMLATAENARVRDGSIQKGSIVHLLECTCSTIQSRRIIIVIKLDVLQSECAIIGNPRPYEMRNQPNEQGTNIPANAAQANTGTYSSGPGLLGSPAASRPAQVANNVPYSGSYGGYHGTVVPPIAPAVESVPNVASGVTYGTTSAHNTMNAGMTQSNLQQRSLNSHPNQRFAVPSMAGGSGAPGNTYGQPAQSFYQQPPPGHMNRTPVSKNDAYRLVPLAQLNPYLDKWTIKVRVTAKTDLRFYNNARGAGKVFSFDLLDEQRGEIRATCFNTQADQFFNLIEVDKVYLISKGSLKPAQKKFNSLNHEYEISLDSRTSIEVCADDDSNIPRQQYNFRKISEIENIEKDAILDLIGIVTSVGPSVTFIRKDGVETQRRTLELKDMSGRSVQLTLWGKLCVAEGNQLQSLCDSGLNPVLALKGARVTDYSGRSVSSAGSTQLKIDPEIPEAESLRRWYATGGKTAACVSLSVVSMGGTCVRKSIAQIKDENLGQLEKPDFITVKAAISHLIADNFCYPACTIDVNGRMCNKKVTDNGDGTWRCDKCDQSLPNCEYRYVLNGQIQDHSGVTNFTAFEDAAKVMIGHSGHELNNISVEDSERFAEILQAARWQQFLFTLKVKEEIYNDAPQVKCNITKAEKLDPAIESSYLLGVINGLLQDDTGSPSGAQGAMAYNAGISNTGAGRSVPTSNSAYTTNLSGPRYGESANQLAQQESTYTGVTTPVSAARNVQQTCVSCGSSGHNVQNCPAGTYRQQAAASAASSYGTSQPRNGLCFKCNQPGHFANSCPLLAPAPQQQQQYRSGGAPSGGYGRQQPYVGATNY

SEQ ID NO: 15562 - protein, 405 aa, Zea mays
  VARIANT 354: note = Ancestral polymorphism is G, Derived polymorphism is V
  VARIANT 247..405: note = Derived polymorphism lacks residues 247 to 405
  VARIANT 178: note = Ancestral polymorphism is Y, Derived polymorphism is S
  VARIANT 145: note = Ancestral polymorphism is N, Derived polymorphism is I
  VARIANT 129: note = Ancestral polymorphism is T, Derived polymorphism is I
  VARIANT 93: note = Ancestral polymorphism is C, Derived polymorphism is Y
MSPLHPPRDAIPKPSAIPPPSRRIPSSPPPLSALAHADLALSARPRRVKTAIDVYLEDAVVPALARKWAGKTTGELAFDAAFFRDVVTDLLICYLCVVVGESALILIRHGESLWNEKNLFTGCVDVPLTPKGVEEAIEAGKRICNIPIDVIYTSSLIHAQMTAMLAMMQHRHKKLMEYCELLDKADECEDPYMHMVYACEFSPSLALHSVRCHIMLDLTELLINLFQLHGLFRYTSHISAHGSLLIRSLERLMRWLTTRALHFLPSRSVSHHPPMGVAHCENEHFTYDITPKVKTKFLGNSLKIYPVGRTRVTLKKSGVVLDLVPPLTKVNNLIFGRTWVDSPGEMVMTNLTTGDKVVLYFQPCGWFGSVAALTASALGMSGSIVAPPRRGRGPWPRSSGKWLTV

SEQ ID NO: 15563 - protein, 130 aa, Zea mays
  VARIANT 46: note = Ancestral polymorphism is A, Derived polymorphism is V
  VARIANT 51: note = Ancestral polymorphism is R, Derived polymorphism is C
  VARIANT 52..130: note = Derived polymorphism lacks residues 52 to 130
  VARIANT 58: note = Ancestral polymorphism is C, Derived polymorphism is Y
  VARIANT 62: note = Ancestral polymorphism is W, Derived polymorphism is R
MAKARSLAKQKQAQQSNGGGGHALSSKLARYLDPEASLDKDQLLDAVHWIRQAVGLICGLLWGAVPLVGAVWIALFMAISTGIIYWYYTYLLKVDEEEYGGHGALLQEGLFASFTLFLLSWTLVYSLAHF

SEQ ID NO: 15564 - protein, 626 aa, Zea mays
  VARIANT 399: note = Ancestral polymorphism is P, Derived polymorphism is L
MESPEYCEINSNMTLDYINRLLMEEGTDEKASIYQQLDALQAMEKPFYDIIGQTYPSSPMETMISRDNQVDCPQDNYSKQARRGCFVSDILEPQGVHLVANDWTYECDHFSLQFERGAEEANKLVPNIAKLADLDSNGLSDSNRMIEATIGQKGKHGSKIRSHPHVDLEFLEARNSKHLAISASETTRDEMFDSVLLCDCRFNCDAAHIREIKAKEANNSSQNVRRKGYGQRQVKSRGKKKEEEVDLRAHLMQCAQAIVVNNLPFASELLEKIRRHASPYGDGSQRLALYLANGLEARLAGTGSQMYKELMEKQTRATDMLKAYRLFNAVCPFARVAYYFSNQTIADLSNGQPKVHIIDFGITLGFQWPSLIQRFAKREGGPPKLRITGIDVPQPGFRPRAIIEATGKRLTEYAEMFNVPFEYQDIASPWEDICIENLNIDNDEALIVNCMFRTQYLGDETEDIDSARDRVLRTMKRINPEVLILGIVNGMYSSPFFLTRFREVVFHYSALFDMLDATAPQSHEDRIQIERDLLGASALNVVACEGAERIVRPETYKPWQVRCLKAGFKQLPVDKAIMKRSIDEKDKHYHEDFVIDEDSRWLIQGWKGRIMHAVSSWKPKESYTNQ

SEQ ID NO: 15565 - protein, 123 aa, Zea mays
  VARIANT 26: note = Ancestral polymorphism is R, Derived polymorphism is P
  VARIANT 12: note = Ancestral polymorphism is P, Derived polymorphism is T
MGSMGGTDINHPLNNLGNANVLVWKRKAEQYLADSGLLHTIIRAGSLQDKDGGLRELIVGKDDEILKTETRTIARADVAEVCIQALLFEQAKFKAFDLSSKPEGEGTPTTDFRTRFAQVNSRF

SEQ ID NO: 15566 - protein, 146 aa, Zea mays
  VARIANT 56: note = Ancestral polymorphism is G, Derived polymorphism is R
MRQMQPTDHQHPSSSERAPPLAAAVGKDDGASSSSSSVVVKIDDLRCHGDWGAAAGSAAVDVCLAAAAVAGAALLAWWAVAFHPSYAQLWMVPLGLVLAGTPPVVCLALRFSPDARAPPPPGKDGPAGARAPPPPPPLVAVVIDKQ

SEQ ID NO: 15567 - protein, 305 aa, Zea mays
  VARIANT 218: note = Ancestral polymorphism is L, Derived polymorphism is R
  VARIANT 188: note = Ancestral polymorphism is A, Derived polymorphism is T
  VARIANT 171..305: note = Derived polymorphism lacks residues 171 to 305
  VARIANT 114: note = Ancestral polymorphism is A, Derived polymorphism is E
  VARIANT 99..305: note = Derived polymorphism lacks residues 99 to 305
MARTARYPNRPRIAVAAVPPAAAEALSLFLSSFAPLPRPTMELCLAARAGTTAAACRRRAPTTTGVPKKKRHGGGTVRVRCAATAPMGEKTEYRDGPLERAFMGLFARKMEKYAAKKPAAQAKEERAVWEWDYESFVDVSRRVMLGRTRAQQQQAVREVLLSMLPPGAPAQFRRLFPPTRWACEFNAALTVPFFRWLVGPSEVVEVEVGGVRQRSGVRIEKCRYLESSGCVGMCVNMCKVPTQDFFTNEFGLPLTMNPNFEDMSCEMIYGQVPPPLEEDPASKQACYPSLCSMSTPSAPACPKLQ

SEQ ID NO: 15568 - protein, 501 aa, Zea mays
  VARIANT 280: note = Ancestral polymorphism is W, Derived polymorphism is S
  VARIANT 306: note = Ancestral polymorphism is G, Derived polymorphism is W
METQSRLLVSLCAAVLLLLLLAPGLAAAFNYADALANSSLLLALSTSTKAPMGDGHLTSIVHLYPDGVQVDLVGGYYDAGDNVKFGLPMAFTTTMLAWSVADMGKFMGAELPHARAAVRWGADYLLKAATSTPGTLYVQVGDPAQDHRCWERPEDMDTARAVYAVGAGGAPGSDVAAETAAALAASAVALRRADPAYAARLVRAAVLAFELADRHRGSYSAGALSSAVCPFYCSYSGYEDELLWAAAWLHRASGNATFMAYVRANGAQDGAGDDDYSFSWDDKRIGTKVLLARAVLRRDRGRNLPGLQPYKAHSDSYICSLVPGASGFQAGQYTPGGLLYREGSSNMQYVTATTFLLLAYAKYLRSAGATAACGGGRGEVAPAELVALAKRQVDYILGKNPAGTSYMVGFGDRYPRRLHHRGASMPSVRAHPARIGCDQGFAYLHSAAPDANVLVGAVVGGPDARDGFVDDRDSYGQTEPATYINAPLVGVLAYFAGTTKY

SEQ ID NO: 15569 - protein, 62 aa, Zea mays
  VARIANT 48: note = Ancestral polymorphism is G, Derived polymorphism is S
  VARIANT 39..62: note = Derived polymorphism lacks residues 39 to 62
  VARIANT 37: note = Ancestral polymorphism is G, Derived polymorphism is W
  VARIANT 26: note = Ancestral polymorphism is G, Derived polymorphism is D
MGAGSGPAGGHGGDVGQKTKAAATTGMRKVKEGMSQGFQWIKDKCQHGGGKKQQGSEAPRYY

SEQ ID NO: 15570 - protein, 73 aa, Zea mays
  VARIANT 10: note = Ancestral polymorphism is G, Derived polymorphism is S
  VARIANT 18: note = Ancestral polymorphism is P, Derived polymorphism is L
  VARIANT 36: note = Ancestral polymorphism is M, Derived polymorphism is L
MSSVVLGATGRENKTSWPEVVGMSIKEAREIILKDMPNANIQVLPVGSLVTQDFRPDRVRIFVDIVAQTPTVG

SEQ ID NO: 15571 - protein, 608 aa, Zea mays
  VARIANT 110..608: note = Derived polymorphism lacks residues 110 to 608
  VARIANT 422..608: note = Derived polymorphism lacks residues 422 to 608
MASFSLKPQHNGSSSRIYHTICSATASEWRSLLRSRSSVSWSWKKHTRLRLRCCQGSNGGDDSRLSQNTGIFHPSIWGDFFLGCSSSPEEAAASSQQKAWMERCDELKEEVGRLMVVEANSPLHERLHFIDALESLCLDHLLKEEIGAALTQIETAGVSDDCDIGTVSLWFYLLRKHRRRASPDVFVRFRDAEGGFQANDPGDLLRLYNAAHFRTHGETILDEAIAFARSRLEMMLPYVKGPLLAHEVRSSLEIPLPRRVRIYESKYYIHAYETSGTLHEKVLQLAKLNSNVLQLHHQQELKILTRWWEDMQIGSKLPFARDRIVECFLWILGVYYEPCHSRARIILTMVIAIVTLLDDIFDSFATPQECEILTNCIESWDPKGAQDLPGCMKFALEKILDSYQTITNMLHREDKYRMTYLRHFTEDLVRSFNMEVKMLQKGYIPDSVEEHLKVSLRTGGCPILSCACFVGMDDIATKDFFDWISSVPKMVRALSIILRLADDLHSYEREQLIPHVASTIDTYMKKHNVSIEVAQENIHKLKEESWKDLNSEWLNPCNDVYPKQLLERIFNLARTMEFMYNQEDNFTNCHNLKDTIRCLLVEPYRIHI

SEQ ID NO: 15572 - protein, 71 aa, Zea mays
  VARIANT 12: note = Ancestral polymorphism is K, Derived polymorphism is M
  VARIANT 55: note = Ancestral polymorphism is N, Derived polymorphism is Y
MSSTGGGDDGAKKSWPEVVGLSLEEAKRVILCDKPDADIVVLPVGTPVTMDFRPNRVRIFVDTVAEAPHIG

SEQ ID NO: 15573 - protein, 70 aa, Zea mays
  VARIANT 14..70: note = Derived polymorphism lacks residues 14 to 70
MSSTGGDDGAKKSWPEVVGLSLEEAKRVILCDKPDADIVVLPVGTPVTMDFRPNRVRIFVDTVAEAPHIG

SEQ ID NO: 15574 - protein, 377 aa, Zea mays
  VARIANT 281: note = Ancestral polymorphism is L, Derived polymorphism is V
MAWSCARPMSIALAAVLLLCGGAWLQQAAEARPHHMDDDSSIDMDRGSDDFFSIVGYSPEDLTQHDRLVRLFEEWVAKYRKAYGSFEEKLRRFEVFKDNLHHIDEANRKEVTSYWLGLNAFADLTHDEFKATYLGLLPKRTSGGRFRYGGVGDGGDEVPASVDWRKKGAVTEVKNQGQCGSCWAFSTVAAVEGINQIVTGNLTSLSEQQLVDCSTDGNNGCSGGVMDNAFSFIATGAGLRSEEAYPYLMEEGDCDDRARDGEVLVTISGYEDVPANDEQALVKALAHQPVSVAIEASGRHFQFYSGGVFDGPCGSELDHGVAAVGYGSSKGQDYIIVKNSWGTHWGEKGYIRMKRGTGKPEGLCGINKMASYPTKDH

SEQ ID NO: 15575 - protein, 304 aa, Zea mays
  VARIANT 98: note = Ancestral polymorphism is R, Derived polymorphism is H
MLDHLVSSYTHRSGGDQPAAPSPCDLASVDDVPGNGGHKPGKAVTASVYRAKIAGHSRVVTVSWSRDLLSHAFSVAISGADGASAECRVELRPWQFWRRAGSRRVELVGGGSASAAVRVLWDLRRARFCGGVPEPRCGYFVALEAAGEVVLVQGDMRRRRAEAEAVPVARREHVFGRRRFAAKARFDEQGDVHDIAIECGGEGGGGDGDVEMTIAIDGEEAVQVKHLQWKFRGNQSLTFSRAKVEVFWDVHDWLFSAGTRPALFIFRPIVLSSASAPAGMLDGGAVVPAATTGFCLYLYAWKLD

SEQ ID NO: 15576 - protein, 765 aa, Zea mays
  VARIANT 153..765: note = Derived polymorphism lacks residues 153 to 765
  VARIANT 133: note = Ancestral polymorphism is P, Derived polymorphism is L
  VARIANT 57..765: note = Derived polymorphism lacks residues 57 to 765
MPPTPPETETEPEFAEVDPTGRYGRVMPLFPSPDHPPRLRSLATPAAVLTHSALLQYTEVLGKGAFKTVYPSIPPGRLTPGSDSGPFDFARSIKDPGFTRSMPWEGTFPIPFCTFCPRLSTRHFGMAVTGLQPGWFYLVLSNEDPHVYPRGMEYFLRYKAFDQLEGLEVAWNQIKVGDLLRNNDDLERLRSEVRLLKTLKHKNIIKFYNSWLDKRSNNINFITEVFTSGTLRQYRIKHKKVDIRALKKWSRQILSGLVYLHSHDPPVIHRDLKCDNIFVNGNQGEVKIGDLGLATILDNARSAHSIIGTPEFMAPELYDEEYNELVDIYAFGMCLLELVTFEYPYCECSNAAQIYRKVSDGEKPGSLAKIGDPEVKLFIEKCIAKVTERLSANELLMDPFLLDVSDEKIFYPVHPNINTTDTGSPKPSSSFRYDGVASSAGRHDRSGSMSDSHPSDNYVHDTVDPHAAIGRSITVESQRKDLNTIFLKLRIADPTGHAQNIHFPFDIEADTSISVATEMVVQLDLTDQDVTAIAEMIDAEIRSHIPDWAAEESIDNQGDEAAHSETHSSEGDEGTSELRDEIGASHNGFVQEQLPSGRKYWSDSPRRDGEISQSVVEHQIGDSSANGIPKRNKVDGIVICARDEEDQSFGSSIHPAEAMFERISSSVDLSNPSAVDSMSRDASVGGSPHSLDGEEEHNSDQHLAAGVTERLIDLLAQQQEELRALQRKHKADIEEMLKIVPAEDREETLTLCHLKAEQKNRAAEP

SEQ ID NO: 15577 - protein, 498 aa, Zea mays
  VARIANT 355..498: note = Derived polymorphism lacks residues 355 to 498
  VARIANT 347..498: note = Derived polymorphism lacks residues 347 to 498
MPPRAGAMAAAAARARAALLPSSPSPSPLFRLPRRFLSLTATRYPLYYDLIVHRPADPNPPKSSAAGADRQPQPAPEEQTLDRAKRRYLRKRRSRLLPDPDATTTTKPSSLSSEFVELRPEVVDFPRLHAREEALYFHDTFAMPWEKDKHYRMLYRLEKKYFPHQSLDNAFVSADAAPASDADRGLVFFDDEKKENEGEERAVSDKGANKGEVLERKVEDFFRSLKKGPGQVDTKAKRPGTEPQQQVKREVRREEERPQPYLVTRTTELPPRWDGPAGTVVLIDKPKGWTSFTVCGKLRRLVKVQKVGHAGTLDPMATGLLIVCVGKATKIVDSYQGMVKGYSGVFRLGEATSTWDADSPIIQREPWEHIKDENIRKAAASFMGEIWQVPPMFSAIKVGGEKMYDKARKGETVELSPRRISIYQFDIERSLEDRQNLIFRVTCSKGTYIRSLCADLVYTFSCSCAHLTALRRDSIGEYSVNDAWNFDELEEQITKGYL

SEQ ID NO: 15578 - protein, 270 aa, Zea mays
  VARIANT 61: note = Ancestral polymorphism is P, Derived polymorphism is L
  VARIANT 64: note = Ancestral polymorphism is S, Derived polymorphism is I
  VARIANT 147..270: note = Derived polymorphism lacks residues 147 to 270
MEGGEGSGRAKGHARGRQTSKQGGFPNIQSTQHVPSTSISSGLPLPQQLLVYSQPTLPLGPFTSLVGYPYLPQNYYLPSAPFQQAYSSNGPFHQSAAPAVPGAGMKYPMPQYKSSPPASTLPQPSSLSGYGGFGSANNIPGNFSQNQGAAAAPTTLGFDEALGTQFKHPNHYAALQQSDNSTMWLHGGAGSRTISAVPPGNFYDFQGQSQHGGFRQAHQPSQYGGLGYPSFYQSQTSLPQEHPQNPTEGSLNNPQGVPSQPSHQLWQHIY

SEQ ID NO: 15579 - protein, 226 aa, Zea mays
  VARIANT 75: note = Ancestral polymorphism is A, Derived polymorphism is V
  VARIANT 18: note = Ancestral polymorphism is E, Derived polymorphism is K
  VARIANT 13..226: note = Derived polymorphism lacks residues 13 to 226
MGLPVFEKGSYNCLGVIELIMTRQKINFTSKLNTICSALQAVNLRSTEVSSIPRIKFSTASYKDALPEILEVLRAACLTHKLPLAQTWVTCDQQGKRGSRHSDENYRYCISTIDEACFVNEAEMRGFHEACSEHHLLRGEGVAGKAFTTNQPCFLPDIGSSTKLEYPLSHHAKIFKLKGAVAILLWCTRTGTSDFVLEFFLPTDCEALEEQKTVLDSLSGTMRSVC

SEQ ID NO: 15580 - protein, 136 aa, Zea mays
  VARIANT 22: note = Ancestral polymorphism is G, Derived polymorphism is S
  VARIANT 23: note = Ancestral polymorphism is S, Derived polymorphism is N
  VARIANT 43: note = Ancestral polymorphism is Q, Derived polymorphism is K
  VARIANT 73: note = Ancestral polymorphism is G, Derived polymorphism is E
  VARIANT 77: note = Ancestral polymorphism is Y, Derived polymorphism is C
  VARIANT 81: note = Ancestral polymorphism is R, Derived polymorphism is C
  VARIANT 82: note = Ancestral polymorphism is I, Derived polymorphism is V
  VARIANT 85: note = Ancestral polymorphism is R, Derived polymorphism is H
  VARIANT 88: note = Ancestral polymorphism is R, Derived polymorphism is H
  VARIANT 93: note = Ancestral polymorphism is T, Derived polymorphism is I
MEDSKSPKDLPHLNSETVRAKGSHYSIYVFRFYNTILATLTNQVFMSDLDIQIPTAFDPFAEANARDSGAAAGSKDYVHVRIQQRNGRKSLTTVQGLKKEFSYSKILKDLKKEFCCNGTVVQDPELGQCYFYERMH

SEQ ID NO: 15581 - protein, 410 aa, Zea mays
  VARIANT 142: note = Ancestral polymorphism is P, Derived polymorphism is L
  VARIANT 152: note = Ancestral polymorphism is R, Derived polymorphism is S
  VARIANT 157: note = Ancestral polymorphism is D, Derived polymorphism is N
  VARIANT 159..410: note = Derived polymorphism lacks residues 159 to 410
  VARIANT 167: note = Ancestral polymorphism is S, Derived polymorphism is F
  VARIANT 171: note = Ancestral polymorphism is T, Derived polymorphism is I
  VARIANT 197: note = Ancestral polymorphism is A, Derived polymorphism is T
  VARIANT 201: note = Ancestral polymorphism is S, Derived polymorphism is L
  VARIANT 224: note = Ancestral polymorphism is Q, Derived polymorphism is R
MASTQLTCSRFQLPRSRSDTDAHHVSNAKHHSFDLGKNPPLRHRPPPLSLACSSRSMCMGLNGWNKSSSMLSVKAPVFMITFSCPVGRGLVEYQKELLGKDSADIDIALDNMTGQNFCEKVNEYSKLIGEQQKGIGVIQCNPDQSKHLETARMLILDIWIDFVNLRSETYTENSRIPTMNYIITIKTHVDSTTLATALRDSDLIFIIAGMGGGSRSGAAPVVAQISKEAGYLTVGVVTYPFSFEGPCLSIYGDQIQKHAISSSGCRPGPSPPAAPCASGGPSCSLRSVSSFSPTSTTATPTRPHASLASAVRWYPLQFFPTAAELTDMEGESSIVASPFPVPSSSKGHEMEMTKKTAAVVPEMTSSSSMPNLAVAKDGNTKVLPFEFRALEVCLESACRSLEEEGGGGLL

SEQ ID NO: 15582 - protein, 377 aa, Zea mays
  VARIANT 68: note = Ancestral polymorphism is T, Derived polymorphism is S
  VARIANT 54: note = Ancestral polymorphism is A, Derived polymorphism is S
MADGEDIQPLVCDNGTGMVKAGFAGDDAPRAVFPSIVGRPRHTGVMVGMGQKDAYVGDEAQSKRGILTLKYPIEHGIVSNWDDMEKIWHHTFYNELRVAPEEHPVLLTEAPLNPKANREKMTQIMFETFNVPAMYVAIQAVLSLYASGRTTGIVLDSGDGVSHTVPIYEGYALPHAILRLDLAGRDLTDSLMKILTERGYSFTTSAEREIVRDIKEKLAYIALDYEQELETAKNSSSVEKSYELPDGQVITIGAERFRCPEVLFQPSMIGMEAAGIHETTYNSIMKCDVDIRKDLYGNIVLSGGSTMFPGIADRMSKEITSLAPSSMKIKVVAPPERKYSVWIGGSILASLSTFQQMWISKEEYDESGPAIVHRKCF

SEQ ID NO: 15583 - protein, 385 aa, Zea mays
  VARIANT 160: note = Ancestral polymorphism is G, Derived polymorphism is D
MAAASSLEMADGEDIQPLVCDNGTGMVKAGFAGDDAPRAVFPSIVGRPRHTGVMVGMGQKDAYVGDEAQSKRGILTLKYPIEHGIVSNWDDMEKIWHHTFYNELRVAPEEHPVLLTEAPLNPKANREKMTQIMFETFNVPAMYVAIQAVLSLYASGRTTGIVLDSGDGVSHTVPIYEGYALPHAILRLDLAGRDLTDSLMKILTERGYSFTTSAEREIVRDIKEKLAYIALDYEQELETAKNSSSVEKSYELPDGQVITIGAERFRCPEVLFQPSMIGMEAAGIHETTYNSIMKCDVDIRKDLYGNIVLSGGSTMFPGIADRMSKEITSLAPSSMKIKVVAPPERKYSVWIGGSILASLSTFQQMWISKEEYDESGPAIVHRKCF

SEQ ID NO: 15584 - protein, 418 aa, Zea mays
  VARIANT 134: note = Ancestral polymorphism is M, Derived polymorphism is I
MSISVNGQSCVPPGFRFHPTEEELLNYYLRKKVASQEIDLDVIRDVDLNKLEPWDIQEKCKIGSGPQNDWYFFSHKDKKYPTGTRTNRATAAGFWKATGRDKAIYNAVKRIGMRKTLVFYKGRAPHGQKSDWIMHEYRLDDPAAAAAAGSGDAVANDDAAATAAAAAAASSDGGQEDGWVVCRVFKKKHHHKESGGGGGNKHGSSNSEHGHGGAGKASAAAAAAAHQHQHHGGLQYSSSDEALDQILQYMGRSCKQEHELVSPAPAPPGRAAASRYLRPIETVLGGHAFMKLPALESPSAAASASLTQPAQHDELYRAAGNGITDWAMMDRLVASHLNGQQAPAAADQLGGGCGFDADAGAEDADAGLAFYSAAASRLLGSGGGAGSDDDLWSFTRSSVSSTAAAAATSTERLSHVSL

SEQ ID NO: 15585 - protein, 635 aa, Zea mays
  VARIANT 570: note = Ancestral polymorphism is R, Derived polymorphism is W
  VARIANT 86..635: note = Derived polymorphism lacks residues 86 to 635
MPPATARPTHPAAQPLLPQRPPHARLFTAHPADLRYRNAHPCTPAAAAKSKCRLPLPASSARTSRLPCLLSANAPRPPREPPRKPRERRPYLASECRDLADAERWRSEILREIGAKVAEIQNEGLGEHRLRDLNDEINKLLRERGHWERRIVELSGRDYSRSSNAPLITDLDSNIVDVPNPSGLLERPRALPRSTDPAVQIAGNFASVGKKAPVRSLPVSGCIPPFISGVYERNGANPCFEPSAGHHLFDGDRMVHAERALGRAVFPKAIGELHRHSGIARLVLFYTRGLCGLVDPSRSTGDANPGLVYFNGHLLAMSKDDLPYQVCVTADDDLRTVGRYDFGGQLAGCGSMIAHPKLDPASGELFALSYDVIKRPYLRPDGGKSGDVEIPLEQPTMVHDFAITERFVVVPDHQVVFKLGEILQGGSPVVMDAGKTSRFGVLPKYERDASEMAWVDVSDCFSFHLWNAWEDADTREVVVVRSCVTDGNLQHEYSGNDCLQLKGHQTYTEVSSLLEHLKLCMFFSKKSFSAFLKFGGYKQEDILIHKARLMQPSFALVCDKRTKCLLLFIRGAISTKERLTAATSAEVPFHHIILSEGKISNVVLGKLQSDVLKDAISQIVQDAKKNRKFTETVEL

SEQ ID NO: 15586 - protein, 331 aa, Zea mays
  VARIANT 120..331: note = Derived polymorphism lacks residues 120 to 331
  VARIANT 142: note = Ancestral polymorphism is N, Derived polymorphism is K
  VARIANT 191: note = Ancestral polymorphism is A, Derived polymorphism is T
  VARIANT 292..331: note = Derived polymorphism lacks residues 292 to 331
MARWSSAASAALLGATLLYSVMALTTALAQQPGNNMQVINMDGRRNSKFTCADTKKDSKRPGCRATCPTRCPKKCLVLCPTCKTFCLCDFYPGVSCGDPRFTGADGNTFYFHGKKGQDFCILSDAGLHINAHFIGSHNSALNRDFTWIQALGIRFAHHSLYVGAARAAAWDAAADHLALAFDDDAVLLPRAVGARWSPHAAPALSVTRTADANAIVVELRGVLRVVAHVVPITAEDSRVHGYGVDAGDCLAHLDLGFKFYDLTDDVHGVLGQTYRADYVNRLNVTANMPLMGGADTFRSSGLFEADCAVARFGRNTAGTGIAMVTDGAKYL

SEQ ID NO: 15587 - protein, 248 aa, Zea mays
  VARIANT 203: note = Ancestral polymorphism is P, Derived polymorphism is L
MARWSSAASAAMLGASLLCIMIALMTASAQQPGNNMQVINMDGRHNSKFTYADTKKESKRPSDAGLHINAHFIGGHNPALNRDFTWIQALGIHFAHHILYVGAARAAADDHLVLAFDDDAVLFPCAVGARWSPHAAPALSVTRTADSNSNAVVVELRGVLRVMAHVVPIRPSPPRTRASTATASTPATASRTSTSASSSTTSLMTSTACSARPTAPTTSTGSTSPPTCPSWEAPTPSAPQDSLRLTAR

SEQ ID NO: 15588 - protein, 101 aa, Zea mays
  VARIANT 33: note = Ancestral polymorphism is A, Derived polymorphism is T
  VARIANT 3: note = Ancestral polymorphism is Q, Derived polymorphism is K
MQKIISTILSLPLLYLLNIFLTFSLILIQLVFTVFNGEAWGYLGSRKFLQELDEGAASVNGISSLMIDEVLEIGSVGKAILEEYPSFYVHTEGVRIFGSAL

SEQ ID NO: 15589 - protein, 1149 aa, Zea mays
  VARIANT 772..1149: note = Derived polymorphism lacks residues 772 to 1149
MEPVLYLTSDLFCSFTSFQCYFFYTMYFFLVSVFFCKLCFIYQHPAAMVRKKRTGPGESSGETSGAPGQGSSQRPQATQQGARGGGQHQVRGGYPGHGVPPSEHPGGGPPEYQPRGYQGRGVPPLLPGGGPPEPQPRGYQGHGGYQGRGGPPSQHPGGGPSPGSQPRGYQGRGGLRPRGGVPQPYRGGHVGGSVGPIVPSGPSRPVPELHQAPDVQHQAPVVAAPSPPGAGSSSQPGMAEVSTGQVQQLVIHDQSSASQVSQVAPASSKAVRFPLRPGKGTHGSRCIVKANHFFAELPDKDLHQYDVSITPVVPSRGVNRAVMKELVNLHRHSHLDGRLPAYDGRKSLYTAGALPFTSKTFEITLQDEENSLGGGQRHQRGQRVFQVVIKFAARADLHHLAMFLAGRQPDAPQEAIQVLDIVLREFPTARYCPVGRSFYSPNLGRRQQLGEGLETWRGFYQSIRPTQMGLSLNIDMSSTAFIEPLPVIDFVAQLLDRDISVRPLSDSDRVKIKKALRGVKVEVTHRGNMRRKYRISGLTSQATRELSFPIDDRGTVKTVVQYFLETYGFNIQHTTLPCLQVGNQQRINYLPMEVCKIVEGQRYSKRLNEKQITALLKVTCQRPQEREKAILQTVHHNAYSEDPYAQEFGIKIDERLASVEARVLPPPRLKYHDSGRERDVLPRVGQWNMMNKKMVNGGRVSSWACINFSRNVQDGAARSFCHDLALMCQVSGMDFALEPVLPPVYARPEHVERALKRLYQDAMSILRPQGRELDLLMVILPDNNGSLYGDLKRICETDLGLVSQCCLTKHVFKANKHQYLANVALKINVKVGGRNTVLVDALARRIPLVSDVATIIFGADVTHPHPGEDSSPSIAAVVASQDWPEVTKYAGLVSAQTHRQELIQDLFNVRQDPQRGAVSGGMIRELLISFWRATGQKPKRIIFYRDGVSEGQFYQVLLYELDAIRKACASLESDYQPPVTFVVVQKRHHTRLFVNNHNDQRAADRSGNILPGTVVDSKICHPTEFDFYLCSHAGIQGTSRPAHYHVLWDENKFTADGLQTLTNNLCYTYARCTRSVSIVPPAYYAHLAAFRARFYMEPDTSDSGSVASGATTSRGPPPGARNTRAGAANVAVRPLPALKENVKRVMFYC

SEQ ID NO: 15590 - protein, 328 aa, Zea mays
  VARIANT 216..328: note = Derived polymorphism lacks residues 216 to 328
  VARIANT 209: note = Ancestral polymorphism is Y, Derived polymorphism is N
MAVVEAAAADHAAPPLQEEAPGAGAGAGADAGEREMRDLEDLLSKLNPMAEEFVPPSLASPAALTPAPLSPAAYGFYPAGAGFAVASPGHGGVVGFPAVADAHAARGRKKGGAGGGFSGHGHPARRRTNSRTSMAQRDEIIRRTVYVSDIDHQVTEENLAALFINCGQVVDCRMCGDPNSVLRFAFIEFTDEEGARAALNLSGTVLGYYPVRVLPSKTAIAPVNPTFLPRSDDEREMCARTIYCTNIDKKVTQADLKLFFESICGEVFRLRLLGDYHHSTRIAFVEFVMAESATAALNCSGVILGSLPIRVSPSKTPVRPRAPRQLMH

SEQ ID NO: 15591 - protein, 251 aa, Zea mays
  VARIANT 52..251: note = Derived polymorphism lacks residues 52 to 251
  VARIANT 57: note = Ancestral polymorphism is T, Derived polymorphism is I
  VARIANT 140..251: note = Derived polymorphism lacks residues 140 to 251
  VARIANT 144: note = Ancestral polymorphism is T, Derived polymorphism is I
MGGCHEDDIASKSAPPASIDGARYGFEPLVLQSSHQVIIEGFTGRRSEHSSSIPKLTSLVNPFWCYLTNITKVILAFCYSLCALDSARAGIPHLKWFGVEGQYNVMVIDLLGPSLKGLFNYCSRKFSLKTVLMLADQMNQGFMTRNDLLLKENSIDKFIVNKMLSRREKATNFKPDYDIDIHMKVLAMSGQESSILTGYKLKIPNQLKKINNLQTDGILGAKDQHTVTSKARPRLLLQGAVQRLCASGDLE

SEQ ID NO: 15592 - protein, 74 aa, Zea mays
  VARIANT 34: note = Ancestral polymorphism is A, Derived polymorphism is V
MMNQHREEDALRGQAVKKPDGDMGQDPGNVILAAEGISTSNKLPQEPIGSRFCKHDKQIEANFEQYDGAAGGFA

SEQ ID NO: 15593 - protein, 303 aa, Zea mays
  VARIANT 211: note = Ancestral polymorphism is G, Derived polymorphism is R
MVIWSCSSCLHGFIPRAAWRRHYPLLSPRPPASPPPIHHFSSARRSTKKSAPKAPMGSSIPAAKALIDSSREPFYVIRKGDVIGVYKNLSDCQAQASKSVLHPSVTVYKGYSLRKETEEYLAARGFRNAVCSIGAADASDELFGDLVPCPFQQPDENTQSILKMSQGQEMETRSSEHPKVADLEPLPDSELSCILEFDGACKGNPGKSGAGVIIRRLDGSVIAVLREGLGIMTNNAAEYRALILGLNYASKKGFKYIRCQGDSKLVCNQEFNSDADVQANFGCQLAGIDLAFELLATKQIPDD

SEQ ID NO: 15594 - protein, 178 aa, Zea mays
  VARIANT 18: note = Ancestral polymorphism is A, Derived polymorphism is V
MKMVIVLVVCLALSAASASAMQMPCPCAGLQGLYGAGAGLTTMMGAGGLYPYAEYLRQPQCSPLAAAPYYAGCGQPSAMFQPLRQQCCQQQMRMMDVQSVAQQLQMMMQLERAAAASSSLYEPALMQQQQQLLAAQGLNPMAMMMAQNMPAMGGLYQYQLPSYRTNPCGVSAAIPPYY

SEQ ID NO: 15595 - protein, 251 aa, Zea mays
  VARIANT 199: note = Ancestral polymorphism is T, Derived polymorphism is I
MAAAAAAATSFTTLAVARSAGQRSLLASKAAPSPLLSLRGARIPSQAVSFSGGLAASPSHSRARFATSASAEPKEADLQSKITNKVYFDISIGNPVGKNVGRIVIGLYGDDVPQTAENFRALCTGEKGFGYKGSSFHRVISDFMIQGGDFDKGNGTGGKSIYGRTFKDENFKLVHTGPGVVSMANAGPNTNGSQFFICTVKTPWLDGRHVVFGQVVEGMDIVRLIESQETDRGDRPKKKVVISECGELPVV

SEQ ID NO: 15596 - protein, 203 aa, Zea mays
  VARIANT 52..203: note = Derived polymorphism lacks residues 52 to 203
MDHMTMLGAGAPHQLSRAEPMPDRRSRFWQTDVQPVPRIDIICPLPCRPSRSLLLNRPSPKPNGSGRPIGMRMLQVRSAAKHKTGPFAETVFCGCRALPLYGANPTYDIVDLILSKNDPDVDTDSSSQAAFFCGSPPARTNNPVIHDPQFGKKAPSFSPLGSSSGKMAAGRAEVGSPSCRSSSPKMRIEGFACGNKEPPHCFA

SEQ ID NO: 15597 - protein, 308 aa, Zea mays
  VARIANT 215..308: note = Derived polymorphism lacks residues 215 to 308
MTTTSRDEIVFLDVETTAPTSAGRWWLLEFGAILVCPRKLVEVGSYDTLIRPGDLSAVSRRFTDGVEAIASAPPFKDVADKIFGILDGRVWAGHNIQRFDCPRIREAFADIGRPAPEPAGVIDSLNVLAAEFGRRAGDLKMATLATYFGIGKQKHRSLDDARMNLEVLKHCATVLLLESSLPHVLCGRHQSRQADGAVVTTRRMAAQQTPPPKHEVHQHRPGVLTKLPPFTPVHDRAATATAAPAHAATPTPTTPCGKRNSLGKVVARAVTATTAPLSSSNSTSTNRRPVTATTPFHMILRHSRAILR

SEQ ID NO: 15598 - protein, 109 aa, Zea mays
  VARIANT 53: note = Ancestral polymorphism is R, Derived polymorphism is S
  VARIANT 56: note = Ancestral polymorphism is E, Derived polymorphism is D
MASGELACTYAALILSDDGIAITAEKIATIVKAANIKVESYWPALFAKLLEKRNVEDLILSVGSGGGAAPVAAAAPAGGAAAAAAPAVEEKKEEAKEESDDDMGFSLFD

SEQ ID NO: 15599 - protein, 95 aa, Zea mays
  VARIANT 38: note = Ancestral polymorphism is A, Derived polymorphism is V
MGGSLSTGGVRSSSMGGAVEHLIVSHPFSLMDMLIFKAVEEQIKKRVENKARIFEQNATDSECKVDPKVLSKLYDQWVMPQTKDVEVEYLLCFLD

SEQ ID NO: 15600 - protein, 767 aa, Zea mays
  VARIANT 73..767: note = Ancestral polymorphism lacks residues 73 to 767
MADPDDLGRRLAAVAVSESPTAAAAALESSNNNLFQVMRAVEDAEATIRQQLEENSRLKDELMLKTRELHRIKLMCCTSHLRPNQRSEATDQASSHGIRIHQDRALGAHTDTSSTAPIRTTATAAEAFEWGAGDAGINHKYLEANQANGIPRKSPSAPDSAFPSQLSTPSSRSLSPTRHHKETDYDSRLNLSGQGALPVSDLNSNVVIWKQVSTVCFDLLVKVKEQGEEIAQLRRHLSDYSVKEAQILNEKHVLEKRIAYMRMAFDQQQQDLVDAASKALSYRQDIIEENIRLTYALQAAHQERSTFVSSLLPLLSEYNLQPPVLDAQSIVSNLKVLFKHLQEKLIITEEKLKESQYQITPWHAESSNNTSAAAQSPSHPPGNALIKANLDIVPQQAYSHVHSPVSSPVQTRRDWDLLGNENRQVIRSEVATTSAEHDNVGRTSPSTSSHNMKDAPQRTDHDSRAVRFNIESKDQNPSFKDLIKSDASESLEGAEAQIPQELSAQQDSGGSPNLTSGLDDANPPYPYLPTVLEEPSSSFSEVAEDDPLPAIEGLRITGEAFPGRELQASGYSIHGTTSCNFEWVRHLDDGSINFIEGARQPTYLVSADDVDFVLAIEVQPLDDKKRKGEIVKVYANDQRKITCDPETKEHIKKILSLGHVSYEVLLPVRFLDMWEPAILAIKREGYSVKCNGQRGVVVMEKFQQAMTINIPFGRPTEFSILSADGAEYNLKPAENAPSRDAIVLILRLFRMKAVEKSKGKRKGIFFK

SEQ ID NO: 15601 - protein, 456 aa, Zea mays
  VARIANT 87: note = Ancestral polymorphism is Q, Derived polymorphism is H
  VARIANT 90: note = Ancestral polymorphism is A, Derived polymorphism is V
  VARIANT 92: note = Ancestral polymorphism is K, Derived polymorphism is Q
MSNVTVCVRFRPLSHKERKANGDNVCFKRLDSESFVLKDEREEDVVFSFDKVFYEDAQQSDVYNFLAVPIVSDAINGINGTIITYGQTGAGKTYSMEGPSILHCNEQKTGLVQRVVDELFICLGSSASTWTVKLSMVTYQPHADSESTLLVEIYLEKVRDLLDLSKDNLQIKESKTQGIYISGATEISILNSSDALENLSQGIANRAVGETQMNLASSRSHCLYIFSVQYGCTSDERVTTGKIILVDLAGSEKVEKTGAEGRVLDEAKTINKSLSALGNVINALTTGKQNHVPFRDSKLTRILQDSLAPPKLIPESVDNTKKPAVETHDQDDLRDRILSKLRLSLKEEDVDLLEELFVQEGIIFDASSVVDIDSVFRDTASEEISLLMQAVEELKETVEELTDENEKLRRSLQVAQEMTTQAQLAAAAAVAGAARSRTLLDFVPAVLFRPFGFVPE

SEQ ID NO: 15602 - protein, 314 aa, Zea mays
  VARIANT 27: note = Ancestral polymorphism is P, Derived polymorphism is L
  VARIANT 49: note = Ancestral polymorphism is G, Derived polymorphism is D
MATATTSAYHCNAVLHLPRPPQFRRLLPPLPSLVTRRAASVGLGVARLGSRARARASSVPPPPPFFETVEEEEEEEEERGWSDAEAGFSDEAEDEQEWSGGNGAARGEDLGADAGEDLSGWARQWPRPRELFVCNLPRRCDVQDLLELFTPHGTVLSVEISRDAESGISRGTASVTMRSLAEARAAIDALDGFDMDGREVFVKLASDVISNRKNVNLAHITPTKDHIFETPHKVYVGNLAWSVQPQDLRELFTQCGTVVSTRLLTDRKGGRNRVYGFLSFSSAQELEEALKLDRTVFFGRDIVVKEAHVERQTR

SEQ ID NO: 15603 - protein, 165 aa, Zea mays
  VARIANT 11..165: note = Derived polymorphism lacks residues 11 to 165
  VARIANT 33: note = Ancestral polymorphism is H, Derived polymorphism is Y
  VARIANT 34: note = Ancestral polymorphism is Q, Derived polymorphism is E
  VARIANT 39..165: note = Derived polymorphism lacks residues 39 to 165
  VARIANT 48: note = Ancestral polymorphism is A, Derived polymorphism is V
  VARIANT 57: note = Ancestral polymorphism is I, Derived polymorphism is F
  VARIANT 63: note = Ancestral polymorphism is A, Derived polymorphism is V
  VARIANT 68: note = Ancestral polymorphism is G, Derived polymorphism is D
  VARIANT 73: note = Ancestral polymorphism is D, Derived polymorphism is E
  VARIANT 78: note = Ancestral polymorphism is A, Derived polymorphism is V
  VARIANT 80: note = Ancestral polymorphism is G, Derived polymorphism is D
  VARIANT 86: note = Ancestral polymorphism is A, Derived polymorphism is V
  VARIANT 93: note = Ancestral polymorphism is L, Derived polymorphism is P
  VARIANT 96: note = Ancestral polymorphism is G, Derived polymorphism is V
  VARIANT 103: note = Ancestral polymorphism is C, Derived polymorphism is Y
  VARIANT 109: note = Ancestral polymorphism is P, Derived polymorphism is L
  VARIANT 115: note = Ancestral polymorphism is E, Derived polymorphism is D
  VARIANT 116: note = Ancestral polymorphism is A, Derived polymorphism is V
  VARIANT 118: note = Ancestral polymorphism is S, Derived polymorphism is Y
  VARIANT 120: note = Ancestral polymorphism is L, Derived polymorphism is S
  VARIANT 123: note = Ancestral polymorphism is L, Derived polymorphism is F
  VARIANT 125: note = Ancestral polymorphism is M, Derived polymorphism is K
  VARIANT 127: note = Ancestral polymorphism is T, Derived polymorphism is A
MAEEPFKLLKQIVDSVIALFRVDFSGRGELAEHQQKLAQMLSRLTKIAKEFNVVVYFTNQVIADPGGGMFITDPKKPAGGHVLAHAATIRLMLRKGKGEQCVCKIFDAPNLPEGEAISFLLCLSMFTACANGRLTFTACHNLARFPCIPNSTDSEPFLLSANCHD

SEQ ID NO: 15604 - protein, 1142 aa, Zea mays
  VARIANT 267: note = Ancestral polymorphism is R, Derived polymorphism is C
  VARIANT 903: note = Ancestral polymorphism is R, Derived polymorphism is C
MFGLQASGAAASWVVGRMGTDAHLYDDPDDASIPELLDSRFDADKVDALKRLLALIAQGVDVAHLFPQVVKNVASQSLEVKKLVYLYLLHYADKRQNEALLSINIFQKDLSDINPLVRAWALRTMAGIRLHVVAPLVLVAIKKCARDPSAYVRKCAAYALCKLCDLIPDENAALEEVLSSITHTFFSMQQLCIPYTYLKPALLMLLQIVDTLFSDNSPGVVGAAAVAFKSVCPSCLPLVSKHFRRLCETLPDIEEWTQIVLIEILLRYVIARHGLVKDSLLFASDLPTEIHGVTDSDAVASVPTQSDSIVNGVSDTISSIMLFRHYIEQCSGSSDREGNNLELSSVTANNNDDVTILLKCTSPLLWSRNSGVVLAAASVHWIMAPIGDMKKIVGPILFTLRSSPDAAYVMLGNIVVFVKTMPSLFAPFYEDFFVNTSDPYQTRALKLEILTTIATESSIPAIFEEFQDYIKDPDRKFVADTVAAIALCAQKLPSIATSCLEGLLALVFYESFISNSVHLDGEDAVLVQAILSIKAIVKMDPVSHEKVCCNVQSCIRAVIVRLVRGLDKLKEPAARSLIIWMFGEYSFMGDLTTKIVPPVLKYLAWSFVAEVVETKLQILNSSAKVIMRCTEEDMEEFKSIVAYVIELATCDLNYDVRDRARLLSRLLPCYMTHQGSSHQPQNGDIYKELANHIFNGKLQPTSHPASNYRIYLPGSLSQVVLHAAPGYAPLPKPQSMELNHNVTAAIRGKAKLSGSDSDAESGSSTYESSSVYDSESEGAGLSDRDTVESHQAQEDNQDAPLVQIYDASIQQGQAGQNTEENLADLISTDLTELMSKSALESWLDEAPAEPVVQNLTQTSSARVSFTNRNFERKPKLHTLLDPSGSNGLSVLYAFSPEVSPRSRLLVCVDLYFENVTTQQLTDITIESEEASSSVDFIDQTSEGYSGVPTIVPVEGIHSLAPQQMAKLVLQVHFHHHILPLKLSVFCNGKRHPAKLHPDIAYFVRPLPMDLNTFLCKENQLRGMFEYARRCAFKDHLQKLGHEDSAEHIDKNLQVAQSVASKILSNANIHLVSMDMPVTFSVDDASGLCWRFSGEILSTSKPCLITILAEGRASGPLDLAVKVNSEDTVFALNLLNRVVAIID

SEQ ID NO: 15605 - protein, 151 aa, Zea mays
  VARIANT 131: note = Ancestral polymorphism is R, Derived polymorphism is S
  VARIANT 117: note = Ancestral polymorphism is L, Derived polymorphism is F
  VARIANT 106: note = Ancestral polymorphism is R, Derived polymorphism is G
  VARIANT 90: note = Ancestral polymorphism is F, Derived polymorphism is L
  VARIANT 72: note = Ancestral polymorphism is L, Derived polymorphism is R
  VARIANT 63: note = Ancestral polymorphism is V, Derived polymorphism is I
MGRMHSRGKGISSSALPYKRTPPIWLKTATTEVEEMITKAAKKGQMPSQIGVLLRDQHGIPLVKSVTGSKILRILKAHGLAPEIPEDLYFLIKKAVAIRKHLERNRKDKDSKFRLILVESRIHRLARYYKRTKKLPPTWKYESTTASTLVA

SEQ ID NO: 15606 - protein, 148 aa, Zea mays
  VARIANT 118: note = Ancestral polymorphism is A, Derived polymorphism is P
  VARIANT 18: note = Ancestral polymorphism is F, Derived polymorphism is I
MGGKDLTEDQIASMREAFSLFDTDGDGRIAPSELGVLMRSLGGNPTQAQLRDIAAQEKLTAPFDFPRFLDLMRAHLKPEPFDRPLRDAFRVLDKDGSGTVAVADLRHVLTSIGEKLEAHEFDEWIREVDVAPDGTIRYDDFILRIVAK

SEQ ID NO: 15607 - protein, 332 aa, Zea mays
  VARIANT 175: note = Ancestral polymorphism is N, Derived polymorphism is K
  VARIANT 72: note = Ancestral polymorphism is K, Derived polymorphism is M
MARARDAALHLLLLAAGALLLLAVVSQATVVPPSVPAGAPEDPRCRALAPRRGALAVYPSDMEQLQFLLNAKFVEAEWFLHAALGRGVDFLDRNLSGGGPRPSGARKADLDFRTTEVAAELGYQEVGHIRAIRQAVGGFPRPPIDLGADRFAMVMDDAMGVRLDPPFDPYAGPVNFLLASYVFPHVTAAAAMGIGPSLMGYASKRLQASILAVEAGQDAVIRLLLYQRADDAVPPYQGHTVADFTRRISDWRNRMSGCGAKDEGVKVLDRRQGAERRTISNILGAGEDSLGFQRTPAEVLRILYGSRNEQIPGGFLPRGANGTIARGFFQLA

SEQ ID NO: 15608 - protein, 185 aa, Zea mays
  VARIANT 172: note = Ancestral polymorphism is C, Derived polymorphism is Y
  VARIANT 151: note = Ancestral polymorphism is P, Derived polymorphism is S
  VARIANT 107: note = Ancestral polymorphism is G, Derived polymorphism is E
  VARIANT 106: note = Ancestral polymorphism is D, Derived polymorphism is Y
  VARIANT 71: note = Ancestral polymorphism is F, Derived polymorphism is L
MRCQLDLITDQCVLQDIDPEELHAKLQDPSFLEEAQLIDVREPDEVNDIVITRLSFILLFIFVLAGLMLNFYYLHGREKASLPGFKVTAILEDGRIFEVDLLVGADGIWSKVRKTLFGHSDATYSGYTCYTGIADFVLPDIDTKTTVDFKPYIGPIYNAILGRLANHDQDQCTLIYHANLCSPKR

SEQ ID NO: 15609 - protein, 570 aa, Zea mays
  VARIANT 352..570: note = Derived polymorphism lacks residues 352 to 570
  VARIANT 203..570: note = Derived polymorphism lacks residues 203 to 570
MKCKLVVQIGSQSVVVARGQAYPPKDVVTVHGIERRDDHTKVQVDFVFDNFLEFPLPIPIAGGDMFTLGEAKNSFVLWPKSGIQLAEGSAGFATCPLLPDEIANVRERLLDFFMNESDLYTLVDGFVTRNSARTNPSNPSIELGPEFKKVGSFLGRFKSIPSIVELDSLKSLVNGANKASRRTEHGRTPSVLVLLPTRELANQVHADFEFYGATFGLSACCVYGGSPYHPQEMALRRGVDIVVGTPGRVKDFIVKGTLNLKCLKFCVLDEADEMLNMGFVDDVELILGKVEDATKVQTLLFNATLPDWVNKLSMRFLKVDRKTVDLVGNEKLKASASVKHLALPCNKAARAQVILDIIRLEVEPSSSLRRRILHHSFLCQQTRKGVWVKFEHISVPQPTDVAQSAGSEAADAIASVSDSVIPIFRQQAEQLLSSSSLSAADLLAKALAKAVVKICVLGLHGHKEKIIVIFLGGLQYTTSSNWQTDVVTWVCYNIPVIVFLRRRGHICSHWCYLQFDVGNVVMVTGGRNTERVGVIKNWEKHKGIFEVIDVLLGVFCMLCLVFSYLLYRKT

SEQ ID NO: 15610 - protein, 204 aa, Zea mays
  VARIANT 11..204: note = Derived polymorphism lacks residues 11 to 204
  VARIANT 84..204: note = Ancestral polymorphism lacks residues 84 to 204
  VARIANT 155: note = Ancestral polymorphism is T, Derived polymorphism is K
  VARIANT 158: note = Ancestral polymorphism is L, Derived polymorphism is R
MVLHGLDKVLEGGAVVKTLRDHSIPSNGDIKENWIYLFVITIFLLVHLENEKPITESGDEISYEGAKAKSLISLLSGLRRRSTLVQFGPFYLFSFLMVWSQQMELNRAHAKFLPSHHERKESIGAPIKLDVESHAHIQKHRKLQEDLTDEMVELTRRRKEISLMMVFPDLNRNLTSSKPKADELAASEMVVAYGSSNWALLVEG

SEQ ID NO: 15611 - protein, 193 aa, Zea mays
  VARIANT 61: note = Ancestral polymorphism is C, Derived polymorphism is Y
  VARIANT 108: note = Ancestral polymorphism is C, Derived polymorphism is Y
  VARIANT 185..193: note = Derived polymorphism lacks residues 185 to 193
MCSLAAIRGMSHPHRALAEHHDARSRASTTTTSSSSSSARRDDDPDPPPRSLKDPPYTLHCRHLETPPFLNDIKPRVLLVTGSSPKPCENPVGDHYLLKSIKNKMDYCRVHDIEWSLDKLDTWAPMGPKGPVRIEAGKVLTKSLKDRQVFEADDQSAMVYILATQREKWGDKVYLQNGYYLHGYWGILVDRYE

SEQ ID NO: 15612 - protein, 193 aa, Zea mays
  VARIANT 52: note = Ancestral polymorphism is A, Derived polymorphism is T
  VARIANT 54: note = Ancestral polymorphism is A, Derived polymorphism is V
  VARIANT 62: note = Ancestral polymorphism is T, Derived polymorphism is M
MATAQEGLTQRVVASASRDDGAGESAAAVSGPNKKPGGGRANSSRRGLRSLAAAVSFSVALTALSFFAAGQSPPSPKTATASTVAVVRAGSVALEAVLALAAWMAWAEGGLHARPAATLLPYAAHLGAALAWAPLVLCSHAAARAGLACCAVMAAGAVACARGFGAVNPVAGDLAKPAVAWAVILAVVNYKML

SEQ ID NO: 15613 - protein, 357 aa, Zea mays
  VARIANT 1: note = Ancestral polymorphism is T, Derived polymorphism is M
  VARIANT 70: note = Ancestral polymorphism is R, Derived polymorphism is C
  VARIANT 136: note = Ancestral polymorphism is R, Derived polymorphism is H
  VARIANT 142..357: note = Derived polymorphism lacks residues 142 to 357
  VARIANT 235..357: note = Derived polymorphism lacks residues 235 to 357
MWEDSTGHIFGLFGRHLRRDIGPTPSQASTGILAWPLDVGRLSLPSTPPPLLATILRTLPLLSPRIYQLRLHRHLPTVLELAGKDHCETCYKVPTVCILKISVHFEKDKALARRFQPVLVNEPSQEDAVKILLGLREKYETYHKCKYTLEGINAAVYLSARYIPDRYLPDKAIDLIDEAGSRAQMESFKRKKEEQCSILSKSPDEYWQEIRAVQSTHEVALANRLKYSLDENDKEDVSRFQATILAFAVSTLIWQEYKKPGLEDIKEVELFIWSWHLTRGFKLCKVRSVQFGQKGIPYLNTYDGCTICYPNPLIKANDTIKIDLETNKIMDFIKLDLSFHGLHQVIYLVRLNISTNS

SEQ ID NO: 15614 - protein, 61 aa, Zea mays
  VARIANT 24: note = Ancestral polymorphism is L, Derived polymorphism is P
  VARIANT 14: note = Ancestral polymorphism is G, Derived polymorphism is S
MLTHTYSTVWMIGGFAFIIYMGHLYIWAMVVVIQIYMARELFNLLRKSSEEKQLPGFRVLN

SEQ ID NO: 15615 - protein, 153 aa, Zea mays
  VARIANT 148: note = Ancestral polymorphism is F, Derived polymorphism is I
  VARIANT 37: note = Ancestral polymorphism is G, Derived polymorphism is R
  VARIANT 4: note = Ancestral polymorphism is P, Derived polymorphism is L
  VARIANT 1: note = Ancestral polymorphism is M, Derived polymorphism is V
MKYPMPQYKSSPPASTLPQPSSLSGYGGFGSANNIPGNFSQNQGAVAAPTTLGFDEALGTQFKHPNIMQHYSSCMRFSCSYFCFGGSFHSDIFLFPYQSDNSAMWLHGGAGSRTISAVPPGNLYGFQGQSQHGGFRQAHHPSQYGFIFFLVTF

SEQ ID NO: 15616 - protein, 93 aa, Zea mays
  VARIANT 28: note = Ancestral polymorphism is P, Derived polymorphism is H
  VARIANT 32: note = Ancestral polymorphism is S, Derived polymorphism is Y
  VARIANT 50: note = Ancestral polymorphism is T, Derived polymorphism is M
  VARIANT 59: note = Ancestral polymorphism is E, Derived polymorphism is K
MPPTPPETETEPEFAEVDPTGRYGRVMPLFPSPDHPPRLRSLATPDVVLTHSALLQYTEVLGKGAFKTVYPSIPPGRFSHQGRCASTGLSTRR

SEQ ID NO: 15617 - protein, 166 aa, Zea mays
  VARIANT 133: note = Ancestral polymorphism is R, Derived polymorphism is W
  VARIANT 128: note = Ancestral polymorphism is R, Derived polymorphism is C
  VARIANT 125..166: note = Derived polymorphism lacks residues 125 to 166
  VARIANT 69..166: note = Derived polymorphism lacks residues 69 to 166
  VARIANT 68: note = Ancestral polymorphism is S, Derived polymorphism is L
  VARIANT 43: note = Ancestral polymorphism is P, Derived polymorphism is L
  VARIANT 36: note = Ancestral polymorphism is R, Derived polymorphism is W
MRESSPPPPPPPAASTVAVKEDEWEVRPGRMLVQRRSPDADAPAGAPVPTIRVKVKFNGVYHEIYIKSQASFGELKKMLSARTGLHPEDQKLVYKDKERDSKAFLDMAGVKDCSKMVLLEEPAAQAKRLLEQRRADKAERATKSISRISLDVDKLATKARKGCEDR

SEQ ID NO: 15618 - protein, 256 aa, Zea mays
  VARIANT 218: note = Ancestral polymorphism is Q, Derived polymorphism is E
  VARIANT 213: note = Ancestral polymorphism is G, Derived polymorphism is C
  VARIANT 156..256: note = Derived polymorphism lacks residues 156 to 256
  VARIANT 147: note = Ancestral polymorphism is P, Derived polymorphism is L
  VARIANT 132..256: note = Derived polymorphism lacks residues 132 to 256
  VARIANT 78: note = Ancestral polymorphism is G, Derived polymorphism is E
  VARIANT 77: note = Ancestral polymorphism is C, Derived polymorphism is Y
  VARIANT 21: note = Ancestral polymorphism is S, Derived polymorphism is L
MGKQPFFLHQLLVVVLALFVSPTRSDDWLPATATFYGGADASDTMGGACGYGDLYEQGYGVNNAALSTALFNDGASCGQCYVIRCDSSKTGWCKPGSSNFVVVSATNFCPPNWELPNGGWCGPPRPHFDMSQPAWETIGIYSAGIIPVLYQRVKCWRSGGVRFTIAGFDHFYMVLITNVAGSGSIQSMAVKGANTDWIPMYRNWGANWHCLAGGLVGQSLSFALVSTGGQNIVFQDVVPAWWQFGQTFTTYQNFDY

SEQ ID NO: 15619 - protein, 1256 aa, Zea mays
  VARIANT 315..1256: note = Derived polymorphism lacks residues 315 to 1256
  VARIANT 839..1256: note = Derived polymorphism lacks residues 839 to 1256
MASRGAVAPAVDPSSPSSRAWGGEDETPGAGKVKLMCSYGGRIAPRPGDGALRYVGGQTRLISVPRAASFGELLRKVEAVDEASASSGGVLLRYQLPGEDLDSLISVSGPEDYDNMMEEYEKLAAAAPDGSAKLRVFLFPASGSDAAGSGSGSHLVAAVDESGQRYIDTINCVSAEAMAVAMRPKDSVASAGSSAHNSEASEYSGLVEGMSPRAVPPPASAATEYSYSGGAHYLSAFPESVGFTAVSLSSPAMGIPAQNPIFVVTEPSTLPPHQVAPAYATPHQPPQVTTYVQQQPQVTHYVQHQHPQSAAYVQQVPQSYIEPQQVQYINTQQFGGHGVPQSVNYVPVHMNQFMPSIPVTGSLATTAAQGSTFRPASAGAEPVLETTQFTRPVQAQVDHSYRVVQTPLSQLPPLSSVHQQANDAQRQRFGVQQAMISAVSMPVVTSSGTIPVVVSSATVPSLRYDDCTMCQKALPHAHSDNIIREQGNSRATGNLEAAPMFYSPHQDSGSNKSSLGASSGTPTNYVAEPRAGNTAVMTQFNSTLPARKPAVQATASPDTGVPVQPTVIPLPVSSAPAPDGVFVGHSPQAGAEDPVRYQQQLFSYSMQPAQVLVNGPQGIDASAYKDSNHPAAEPLREYAHNLLHDYARAIDVHTQAVHLGPIAPPESTVHGKPSTYGIIDHAKVGKLPLNIDGSSIYKSQAGGYHIGITNAFAAPAFNQEENISRHSEKPRYAFDIGTQNVHPDIIQQPPNLAVQSNLIAPIEPPGSNEKVTVLPSNSGAQVPSGSPVQRPKEMANHLVSIPPNGSNKFPLQSTVGIDRVEGTQEPAYADSLFSNQDPWKAVGNASLVPPRPNKLTKESVVSGGQYIDGHMPDMNMHAAIPSEEDSCFKDMHTVKLNKGPGEDSIKRQLQAVAEGVAASVLQPPFPEKTVVFSGDHIDSHGAEVDVKFQDEGNNQSDKISQGVQVLDDNDNLQIIKNSDLEELRELGSGTFGTVYHGKWRGSDVAIKRINDRCFAGKASEQERMRTDFWNEADKLASLHHPNVVAFYGVVVDGPGGSVATVTEYMANGSLRQALQRHEKIFDRRRRLLIAMDVAFGMEYLHGKNIVHFDLKSDNLLVNLRDPQRPICKVGDLGLSKVKCQTLISGGVRGTLPWMAPELLNGSSSLVSEKVDVFSFGIVMWELLTGEEPYAELHYGAIIGGIVNNTLRPPVPESCDPQWRSLMERCWSAEPSERPSFTEVGKSLRAMASPTKAQQSK

SEQ ID NO: 15620 - protein, 151 aa, Zea mays
  VARIANT 97: note = Ancestral polymorphism is T, Derived polymorphism is M
  VARIANT 96: note = Ancestral polymorphism is D, Derived polymorphism is N
  VARIANT 57: note = Ancestral polymorphism is C, Derived polymorphism is Y
  VARIANT 52: note = Ancestral polymorphism is R, Derived polymorphism is C
MKEHALHLLVLSHVFSVPSLKTVCVDQLERGFLAPDNVVDMLQLARLCDAPRLALACVRMVIEDFKTISLTDGWKVMRRANPSMEQELLESLVEADTRRQERAKKMEETKVYLQLYEAMEVTPNLYGNLVANTAAGIVGGMGIMPRGRDCS

SEQ ID NO: 15621 - protein, 230 aa, Zea mays
  VARIANT 58..230: note = Derived polymorphism lacks residues 58 to 230
  VARIANT 66: note = Ancestral polymorphism is P, Derived polymorphism is L
MPPPTSEFAQLQSLPAMPSAPSARMLSSTSSKVPRGRLLGTGERAVHDVDSRLPGEGQPPQLEVTPITKEAFEPSLSSSWDPLSIWRGIQEIRDEEMEDVIVKAVDCSKQSELEDLSEANPNADMDEMVKAIASRVTKVMPKVASFTSSQIATSSNGFDSSVMSTVATTGSSGSTVTDLGVVGRGVKRASIKPLSAEPAAKKPALDSPSLQGDNSINSEVVPATQTDESS

SEQ ID NO: 15622 - protein, 192 aa, Zea mays
  VARIANT 29..192: note = Derived polymorphism lacks residues 29 to 192
MAQVYPIKKGSQELWIKNKKREVFSRTKQALLPPTPAKLVGYLSIRGWVYRVPKDSGLRAAFFVSRVKDWNSWMENLPQYNIQPSSQAKKNKQLAVSGMVSTYKERDLDLEIFSSHNSLKDTPDPDMEIVVAHTVEFSFPFDGNGFILRGDEQKRFSVETKFFISGPPLAVNQGSIQDRAAFSSKNTSAALS

SEQ ID NO: 15623 - protein, 336 aa, Zea mays
  VARIANT 37..336: note = Derived polymorphism lacks residues 37 to 336
MGNTLGFGVGVGLGLGLAVGAAALIQMIAKNISLPLRFSFIVPVARLIFSLFVVHSTEDIDELSAEELRDAMSYVMHNPMLIQVPVLGTTKTFWRLSEEATRISRKLSLILRNHHSACKYLEAPLQVSNVWIGSTGSVKLRGVSFTGSGFFRIERVRDDYKHLSRVLELLIMISGGDINKLPPDYKEFLSLLRRKNLTRDDEFLIVNNAALLPMKNRTEVFLMLHDRIVNFLGQKNRAKKKKILSNLPYKNNWLDTATANAKINQWVVNVQNEYKRTTIDLLRLNRNVRSHLHQYNHEDDIEEILYCEWPMLLIVMEKMLHLEGELQDTGIHNKFG

SEQ ID NO: 15624 - protein, 254 aa, Zea mays
  VARIANT 57: note = Ancestral polymorphism is Y, Derived polymorphism is C
MGKRFLHQLLAVALALFVSPARSDDWLPATATFYGGADGSDTMGGACGYGDLYEQGYGVNNAALSMALFNDGASCGQCYVIRCDSSKTGWCKPGSSNFAVVSATNFCPPNWELPNGGWCGPPRPHFDMSQPAWETIGIYSAGIIPVLYQRVKCWRSGGVRFTIAGFDHFYMVLITNVAGSGSIQSMAVKGANTDWIPMYRNWGANWHCLAGGLIGQGLSFALVSTGGQNIVFQDVVPAWWQFGQTFNTYQNFDY

SEQ ID NO: 15625 - protein, 242 aa, Zea mays
  VARIANT 124: note = Ancestral polymorphism is K, Derived polymorphism is R
  VARIANT 119: note = Ancestral polymorphism is P, Derived polymorphism is R
  VARIANT 103..242: note = Derived polymorphism lacks residues 103 to 242
MEMNEERKVSLLGLADILSASIGGFSWAPLISKICKNKVKAEAWFTGLSALICRGQHGSQVQHIDGIRIAGLPFDNLKSSKDALLAGIDGGDASAAEAEGGSEKSTVEKELEQLSSILPDLEKKLEHLSEANPSAGMDEMVKEIASRVSEVMPKAASFTSSQIATSSNGFDSSVMSTAATTGSFGSTVTDLGVVGRGVKRASIKPISAEPAAKKPALDSPSLQGDSSINSEVVPATQTDESS

SEQ ID NO: 15626 - protein, 212 aa, Zea mays
  VARIANT 166: note = Ancestral polymorphism is C, Derived polymorphism is S
MGGACGYGDLYEQGYGVNNTALSTALFNDGASCGQCYVIRCDNSKTGWCKPGSSNFAVVSATNFCPPNWELPNGGWCGPPRPHFDMSQPAWETIGIYSAGIIPVLYQRVKCWRSGGVRFTIAGFDHFYMVLITNVAGSGSIQSMAVKGANTDWIPMYRNWGANWHCLAGGLIGHGLSFALVSTGGQNIVFQDVVPAWWQFGQTFNTYQNFDY

SEQ ID NO: 15627 - protein, 1345 aa, Zea mays
  VARIANT 70..1345: note = Derived polymorphism lacks residues 70 to 1345
  VARIANT 52..1345: note = Derived polymorphism lacks residues 52 to 1345
MDAAAAALHAVAGEHAGADRCHRCRKQAQGRGLPPRAHEHERRRHTGPRVRKRVDADAAPRLNGVPPPSQKRIYVGRGMHESQVSLFKYTFFWILLLCSKFSFSYFVQIQPLIKPTKDVMGVHNIHYEWHEFFPNASYNIGAIMSLWAPVLLVYLMDTQIWYAIFSTIFGGMTGALGRLGEIRTLGMLRSRFHSLPGAFNTYLVPSDKSKNRRFSLSKRFAEVSPNKRTEAAKFAQLWNEVICSFREEDLISDGEMDLLVVPYSSDPSLKLMQWPLFLLASKIPIALDMAAQFRPRDSDLWKRICADEYMKCAVLECYESFKLVLNLLVVGENEKRIIGIIIKEIEGNIGKNTFLANFRMSALPVLCKKFVELVSTLKERDASKFDNVVLLLQDMLEVITRDMMVNEIRELAEFGHGNKDSVPRRQLFAGSGTKPAIVFPPPVSAQWEEQIKRLYLLLTVKESAMDVPTNLEARRRIAFFTNSLFMDMPRAPRVRKMLSFSVMTPYYSEETVYSKSDLDLENEDGVSIIFYLQKIFPDEWNNFMERNNCKRESEVWGNDENVLQLRHWASLRGQTLCRTVRGMMYYRRALKLQAFLDMASESEILEGYKAVADPAEEEKKSQRSLSSQLEAVADMKFTYVATCQIYGNQKQSGDRRATDILNLMVNYPGLRVAYIDEVEEREGDKVQKVFYSVLVKALDNHDQEIYRIKLPGPAKLGEGKPENQNHAIIFTRGEALQTIDMNQDNYLEEALKMRNLLEEFNENHGVRQPTILGVREHIFTGSVSSLAWFMSNQETSFVTIGQRVLANPLKVRFHYGHPDVFDRIFHITRGGISKASCGINLSEDIFAGFNSTLRRGNVTHHEYIQVGKGRDVGLNQISLFEAKVACGNGEQILSRDIYRLGHRFDFFRMLSCYFTTVGFYISSMMVVIIVYVFLYGRLYLALSGLEFAIMKQARMRGNRALQAAMGSQSIVQLGLLMALPMFMEIGLERGFRSALGDFIIMQLQLCSVFFTFSLGTKSHYFGRTILHGGAKYRATGRGFVVRHVRFAENYRMYSRSHFVKGLELMLLLVVYQLYGDVATDSTAYILLTSSMWFLVITWLFAPFLFNPSGFEWQKIVDDWDDWAKWISSRGGIGVPANKAWESWWEEEQEHLLSTGLLGRFWEIILSLRFFIFQYGIIYHLNISAGNKSISVYGLSWLVIVAVVMVLKVVSMGRKKFSADFQLMFRLLKLFLFIGSVGTLAVLFTVLHLTVGDIFASFLAFAPTGWAILQISQASKPVIKAFGLWGSVKALSRGYEYLMGIVIFVPVAVLAWFPFVSEFQTRLLFNQAFSRGLQISRILAGGKKQR

SEQ ID NO: 15628 - protein, 117 aa, Zea mays
  VARIANT 16: note = Ancestral polymorphism is S, Derived polymorphism is I
  VARIANT 17: note = Ancestral polymorphism is R, Derived polymorphism is Q
  VARIANT 35: note = Ancestral polymorphism is R, Derived polymorphism is K
  VARIANT 66: note = Ancestral polymorphism is E, Derived polymorphism is K
  VARIANT 68: note = Ancestral polymorphism is P, Derived polymorphism is L
  VARIANT 70: note = Ancestral polymorphism is D, Derived polymorphism is N
  VARIANT 80: note = Ancestral polymorphism is P, Derived polymorphism is A
  VARIANT 95..117: note = Derived polymorphism lacks residues 95 to 117
MAAPREEGATEINQEIRWPILDEIEANDYDNFTRRAYVLKMKKLMALPKAYLRSLVVVEDFCGKTEIPDNGDGGDWLSIPLGDVKVLMNEITSVRSKRILHEVPMDTVTRLLDVIDR

SEQ ID NO: 15629 - protein, 225 aa, Zea mays
  VARIANT 45: note = Ancestral polymorphism is D, Derived polymorphism is N
MNVEKLTRKMSRAIFSLNKYRLYLKRLSVVASQQASIVAAFGGRDPLFLHMGAFEGLQGYQPFAPCAALSSFSPHGLLGRTSAATFRVPELAPAMTVQSATNSGIISRCAGDANNFQLPGLQEDQQAHLGQGSATSLGLPQLQQKWIQQENNDMSVVFSGSALANTLSGELQRLMSSSLPCHHRNWWNKVFALVNMPVCPSGSLTASSSNNKDGGASYCSSVARS

SEQ ID NO: 15630 - protein, 1036 aa, Zea mays
  VARIANT 478..1036: note = Derived polymorphism lacks residues 478 to 1036
  VARIANT 468..1036: note = Derived polymorphism lacks residues 468 to 1036
  VARIANT 461..1036: note = Derived polymorphism lacks residues 461 to 1036
MQAVAGVVTVPSLVMLLLSLRETARTKDDVNVESMGLALRHVAGNLQPLLEANRSAAAIADAMRNPASSNESSPASISQVRPKMFMAFAMQPLLAQVSYAGADGHAFAFYRTEHGEARALFTDSQKRWCTQAVDPATGRLVGSAAVAASKDAALVASKNASPASLRAGWARPDVRMLFFSAPVGDAAGVVSAAIAVHDVFEAAAARIGVQDGLNVYYAVGDKVASAATTNYKPLSLGYQYGTAEDTAEEKLSFSRLTCAASAIDDATPELGQLVPGGPKYRRYKAACTTFDVSGVQVALRLVLRPSIQGHMLQALCVSVVFLACVLVLAAAVSCALAVRALRWAAAREMALNVDLARQKEALRQAEFKSNAFASASHDIRSALSAIAGLVDMSRPEVQSVPGIMENLDQMGVCTNKLFDILNSVLDTSKVGAGKMQLEEAEFTMADVLQESVDMANVTGVQRGVEVVWDPCDFSVLRCTAVIGDSKRLKQILDNLLGNALKFTDEGHVVLRCWATRPIVGSNVRAPSRFMHPRHASGGSFGCFFRAQEDPSHQDHLQNDPNLVEFYFEVVDTGIGIPKENRMSVFENYVQVNNGQGGTGLGLGIVQSFVRLMGGEISIKDKEPGERGTCFAFNVLLKISEMQQPQDIEEGPSVPSGTLNLASAFQEANNFKGVHCILYVRGYETRRIMQTWMESIGVKVWLVPQAKFIGSTLEKVRSNSTTIIAMDYNNADRCFSFKEKVNQLRNNTGIRRVSLGGIPSGILIVIDVSGGETEEIFQEMAKLARIKHQAPCKVVLLKDIKTPSNDLRKLKDLGCDLVLRKPVHGSRLFTLLMTLRDLQVSNAQAQSSHVVGPGIAGNSQQHGLPDVVVPCVQETNASTELASCLAQEQKPEDDKPLSGMQILLAEDTLVLQTIQKKVLNQLGALVTVAQNGAVAVNLLREALEQANASKEDIVSLPYHVILMDCQMPEMDGYEATKLIREEEQRYGIHTPIIALTAHDMEEDLQKAFDAGMDLHLTKPILQKKIVEAICSVYKGQN

SEQ ID NO: 15631 - protein, 145 aa, Zea mays
  VARIANT 15: note = Ancestral polymorphism is A, Derived polymorphism is T
  VARIANT 16..145: note = Derived polymorphism lacks residues 16 to 145
  VARIANT 24: note = Ancestral polymorphism is A, Derived polymorphism is D
  VARIANT 29: note = Ancestral polymorphism is R, Derived polymorphism is C
  VARIANT 33: note = Ancestral polymorphism is E, Derived polymorphism is K
  VARIANT 42: note = Ancestral polymorphism is G, Derived polymorphism is S
  VARIANT 66: note = Ancestral polymorphism is A, Derived polymorphism is S
  VARIANT 68: note = Ancestral polymorphism is D, Derived polymorphism is N
  VARIANT 97..145: note = Derived polymorphism lacks residues 97 to 145
MELCEGGKLFDRIVAWGHYTERAAANVTRTIVEVVQLCHRHGVIHRDLKPENFLFANKKENSPLKAIDFGLSIFFKPVGGNLTLELRVAKCTSFFLQSIKNVVITSSATRKQLGGSFIGNWLLLADIGSAGLFLPYYRAFWFDEE

SEQ ID NO: 15632 - protein, 254 aa, Zea mays
  VARIANT 222: note = Ancestral polymorphism is L, Derived polymorphism is F
  VARIANT 217: note = Ancestral polymorphism is G, Derived polymorphism is D
  VARIANT 184..254: note = Derived polymorphism lacks residues 184 to 254
  VARIANT 177: note = Ancestral polymorphism is V, Derived polymorphism is I
  VARIANT 164: note = Ancestral polymorphism is A, Derived polymorphism is T
  VARIANT 157: note = Ancestral polymorphism is G, Derived polymorphism is S
  VARIANT 109: note = Ancestral polymorphism is P, Derived polymorphism is S
  VARIANT 75: note = Ancestral polymorphism is C, Derived polymorphism is Y
  VARIANT 72: note = Ancestral polymorphism is G, Derived polymorphism is R
MGKHFLHQLLAVALALFVSPTRSDDWLPATATFYGGADGSDTMGGACGYGDLYEQGYGVNNAALSTALFNDGASCGQCYVIRCDSSKTGWCKPGSSNFAVVSATNFCPPNWELPNGGWCGPPRPHFDMSQPAWETIGIYSAGIIPVLYQRVKCWRSGGVRFTIAGFDHFYMVLITNVAGSGSIQSMAVKGANTDWIPMYRNWGANWHCLAGGLIGQGLSFALVSTGGQNIVFQDVVPAWWQFGQTFNTYQNFDY

SEQ ID NO: 15633 - protein, 619 aa, Zea mays
  VARIANT 292..619: note = Derived polymorphism lacks residues 292 to 619
MGSGLFKPCVHPDFRVVFSKMSFGDKIGFLFVHAFDKRNLWHKMPVLIGLLYLNTRRTLLEKYNLLAVGSSHGALIDPKDQFMYRTGDGKYNDPDNAEAGSQYTFFGRNMKPVDQEYELMSPDPFVVATKLLARREYKDTGKQFNILAAAWIQFMVHDWMDHMEDTKQIEITAPNEVANKCPLKSFKFYATKELPTNSDGTIKTGYYNVRTAWWDGSAIYGNNDKKAEKLRTYVDGKLVIGDDGLLLHEENGVALLGDVRNSWVGVSILQALFVKEHNAVCDAIKEEHPNLSDEELYRYARLVTSAVIAKVHTIDWTVELLKTKTMRAGMRANWYGLLGKKIKDTFGHIGGPALGGLVGLKKPINHGVPYSLTEEFTSVYRMHSLLPSTLKLRDPTGQPDANNSPPYLKDVDIGELVGLKGEGQLSKIGFEMEILSMGYQACGALELWNYPSFFRDLIPQNLDGTNRSDRIDLAALEVYRDRERSVPRYNEFRRRLFLIPIKCWEDLTSDKDAIEAIRAIYGDDVEKLDLLVGLMAEKKIKGFAISETAFNIFILMASRRLEADRFFTSNFNEKTYTKKGMQWVKTTEGLRDVINRHYPEISAKWMKSSSAFSVWDADY

SEQ ID NO: 15634 - protein, 254 aa, Zea mays
  VARIANT 222: note = Ancestral polymorphism is L, Derived polymorphism is F
  VARIANT 214: note = Ancestral polymorphism is V, Derived polymorphism is I
  VARIANT 164: note = Ancestral polymorphism is A, Derived polymorphism is T
  VARIANT 154..254: note = Derived polymorphism lacks residues 154 to 254
  VARIANT 140: note = Ancestral polymorphism is S, Derived polymorphism is N
  VARIANT 76: note = Ancestral polymorphism is G, Derived polymorphism is R
  VARIANT 72: note = Ancestral polymorphism is G, Derived polymorphism is D
MGKHFLHQLLAVALALFVSPTRSDDWLPATATFYGGADGSDTMGGACGYGDLYEQGYGVNNAALSTALFNDGASCGQCYVIRCDSSKTGWCKPGSSNFAVVSATNFCPPNWELPNGGWCGPPRPHFDMSQPAWETIGIYSAGIIPVLYQRVKCWRSGGVRFTIAGFDHFYMVLITNVAGSGSIHSMAVKGANTDWIPMYRNWGANWHCLAGGLIGQGLSFALVSTGGQNIVFQDVIPAWWQFSQTFNTYQNFDY

SEQ ID NO: 15635 - protein, 155 aa, Zea mays
  VARIANT 36: note = Ancestral polymorphism is G, Derived polymorphism is R
MASLSSAAVTAPSFAAPAPARAVVRRRSFTVRASLRKATGTAAVAMAASALLAGGAMAQEVLLGAGDGGLVFEPSQFTVKAGDTITFKNNAGFPHNVVFDEDEVPSGVDATKISQEEYLNAPGETYSVTLTVPGTYGFYCEPHQGAGMVGKITVN

SEQ ID NO: 15636 - protein, 254 aa, Zea mays
  VARIANT 2: note = Ancestral polymorphism is G, Derived polymorphism is E
  VARIANT 4: note = Ancestral polymorphism is R, Derived polymorphism is S
  VARIANT 47: note = Ancestral polymorphism is C, Derived polymorphism is F
  VARIANT 75: note = Ancestral polymorphism is C, Derived polymorphism is Y
  VARIANT 108: note = Ancestral polymorphism is P, Derived polymorphism is L
  VARIANT 133..254: note = Derived polymorphism lacks residues 133 to 254
  VARIANT 154..254: note = Derived polymorphism lacks residues 154 to 254
  VARIANT 206..254: note = Derived polymorphism lacks residues 206 to 254
MGKRFLHQLLVVVLALFVSPARSDDWLPATATFYGGADGSDTMGGACGYGDLYEQGYGVNNAALSTALFNDGASCGQCYVIRCDSSKTGWCKPGTSNFIVVSATNFCPPNWELPNGGWCGPPRPHFDMSQPAWENIGIYNAGIIPVLYQRVKCWRSGGVRFTIAGFDHFYMVLITNVAGSGSIQSMAVKGANTDWIPMYRNWGANWHCLAGGLVDQGLSFALVSTGGQNIVFQNVVPAWWQFGQTFTTYQNFDY

SEQ ID NO: 15637 - protein, 986 aa, Zea mays
  VARIANT 550..986: note = Derived polymorphism lacks residues 550 to 986
MTMPASSPSVGSACDPPPPPPPPPPRAMKRELAFALQSLSEISASHGRTRSGRPISSLPDPSASASLKRRKRSDPPAPAPAPAPAPAADLVSPPTPPIDAEPPNQPLRDIIQPLHGSNPPTASDHRFDSNADQEVLAMEVIAKPNLPAEEDIAADDSAMEVTAKSNVAAADGVSKPNVSAEDTASKSNVAATVAVAPTLLETAIAAGNDQCDTSNSNGENLQQQAVENVLVSTTMLAEDTVTPAAAAGLKPARRFTRSLLKNNKPDKEESASCESQATPDGSKDASVGFTLLLEKPQRRFTRSLLKTKVESSLVGSDDVLDSASDSPPSVKKMEMKMSKKVACLTKHPGNIRELLNTGMLEGMPVMYIIPHSKKAVLKGVITGCNIRCFCLSCNGAKAISAYYFEQHAGSTKKHPADYIYLGNGNSLRDVLRASDRSPLEALEETIRSSIDPVVKRSRINCLNCNELVLPSSHENVLCQVCLESKQPQDPLTASYTCNGSSSLSRSSKEALLRNISSGKKGGSAGKVTNKDNRLHKLVFNVLLDGTEVAYYVDGQRKVDGYIKDHRIYCNHCNRVVSPSAFEAHAGEGSRRKPYDNIFTSNGVSLHELAMKISKDMELSERETDDLCRECGQGGDIFPCKICPRSFHPACVGLSKVPAEWYCDSCRNLVQKEKALAKNKNAKAAGRQAGVDSIEQIMKRAIRIVPISDDLGGCALCKQKDFNNAVFDERTVILCDQCEKEYHVGCLQSQWQVELKELPEEEWFCCSSCSETRSSLDKIISDGAQLLADPDLEIIKKKHETRGLCMDTSKDLKWQLLSGKRATEDGSILLSAAVPIFHQSFDPIREALTGRDLIPEMVNGRGPKEGMPGQDYSGMYCALLTVGSTVVSAALLRVMGGDVAELPLVATSQDVQGLGYFQALFSCIERVLVSLKIKHFVLPAAHEAEGIWMNKFGFSRISPEELEAYLNGAHLTIFHGTSYMYKAVPVS

SEQ ID NO: 15638 - protein, 108 aa, Zea mays
  VARIANT 8..108: note = Derived polymorphism lacks residues 8 to 108
  VARIANT 18: note = Ancestral polymorphism is C, Derived polymorphism is W
  VARIANT 78..108: note = Derived polymorphism lacks residues 78 to 108
MKISKDMELSERETDDLWKECGQGGDIFPCKICPRSFHPAWVGLSKVPTEWYCNSCRNLVQKEKALAKNKNAKAAGRQAGVDSIEQIMKRAIRNVPISDDLGGCALCK

SEQ ID NO: 15639 - protein, 31 aa, Zea mays
  VARIANT 4..31: note = Derived polymorphism lacks residues 4 to 31
MKLESISLLLLLSGPVDFTFLPLLLEAGQVD

SEQ ID NO: 15640 - protein, 204 aa, Zea mays
  VARIANT 9: note = Ancestral polymorphism is L, Derived polymorphism is P
  VARIANT 50: note = Ancestral polymorphism is V, Derived polymorphism is I
  VARIANT 52: note = Ancestral polymorphism is S, Derived polymorphism is F
  VARIANT 53: note = Ancestral polymorphism is A, Derived polymorphism is V
  VARIANT 61: note = Ancestral polymorphism is W, Derived polymorphism is R
  VARIANT 79: note = Ancestral polymorphism is S, Derived polymorphism is F
  VARIANT 83..204: note = Derived polymorphism lacks residues 83 to 204
  VARIANT 99..204: note = Derived polymorphism lacks residues 99 to 204
  VARIANT 100: note = Ancestral polymorphism is R, Derived polymorphism is H
  VARIANT 104..204: note = Derived polymorphism lacks residues 104 to 204
  VARIANT 145..204: note = Derived polymorphism lacks residues 145 to 204
MGKRFLHQLLAVALALFVSPARSDDWLPATATCDSSKTGWCKPGNSNFVVVSATNFCPPNWELPNGGWCGPPRPHFDMSQPAWENIGIYSAGIIPVLYQRVKCWRSGGVRFTIAGFDHFYMVLVTNVAGSGSIQSMAVKGANTDWIPMYRNWGANWHCLAGGLVSQGLSFALVSTGGQNIVFQDVVPAWWQFGQTFTTYQNFDY

SEQ ID NO: 15641 - protein, 69 aa, Zea mays
  VARIANT 62: note = Ancestral polymorphism is C, Derived polymorphism is Y
  VARIANT 43: note = Ancestral polymorphism is G, Derived polymorphism is D
  VARIANT 40: note = Ancestral polymorphism is Q, Derived polymorphism is K
  VARIANT 22: note = Ancestral polymorphism is A, Derived polymorphism is E
MEEASSNNVDGGGDVRSVELQATPVMPFSKPYPTNPSNSKAIGFALGAPGYQEEGRGAEEWCRSTFVFA

SEQ ID NO: 15642 - protein, 286 aa, Zea mays
  VARIANT 229: note = Ancestral polymorphism is V, Derived polymorphism is M
  VARIANT 216: note = Ancestral polymorphism is R, Derived polymorphism is W
  VARIANT 209: note = Ancestral polymorphism is E, Derived polymorphism is K
  VARIANT 199: note = Ancestral polymorphism is S, Derived polymorphism is F
  VARIANT 191..286: note = Derived polymorphism lacks residues 191 to 286
  VARIANT 181: note = Ancestral polymorphism is P, Derived polymorphism is L
  VARIANT 170: note = Ancestral polymorphism is S, Derived polymorphism is F
  VARIANT 164: note = Ancestral polymorphism is G, Derived polymorphism is D
  VARIANT 158: note = Ancestral polymorphism is R, Derived polymorphism is C
  VARIANT 155: note = Ancestral polymorphism is A, Derived polymorphism is V
  VARIANT 154: note = Ancestral polymorphism is P, Derived polymorphism is L
MAGAPAPKLSSFPGPVAQVGGGFASALKPNAKAGNNEAAAAVDQLAEAGDAFGAREILARLNYRLPAVPMAGTPLLRSAFYFKEALRVALSPTGEALAPPRGVDVAVLDKLDVFLQFAAYNEDALDPAELVAITSSDAVAVHLPVGSAHVAAMPVVLRLVKRLGAKVVVFVDRGCDRTELPFATHLLQAFQSCVSLLDSVDAVGGANAEAVGKIERFMDKPPPLPWRTMLVSAGFVPVQASTFAESQVEALLKRIALMEFCVEKRGGMLCFYWQRGELVFVSAWQC

SEQ ID NO: 15643 - protein, 835 aa, Zea mays
  VARIANT 782..835: note = Derived polymorphism lacks residues 782 to 835
MMEVERPMWELKEEEEEPPQLLMEAEEDDYEEEEDTSALLYTRERESMRKKMTTTMADLDLEMESSDSDSNAAASAAVEEEAAAAAQQSIFLDPTQGLWKCRHCDWTHQRLSGPCTAEIILHSQQGHCKIASNVDSLVQHQPLYSSPHKASDHATGLGAENQVEKQDNVSAQQTNHSSSNGNLENGSHSNGVHEISSSSETVTTIADGLKLITTIREGRQHILPSWSGSLDHVSGGSTSTSQVHEIEVEKEVSKGDVKVEEYDLEKILDEQETHDLYCPNCKSCITRRVILKKRKRTVRQETGKEPPKRPQLVEPPANAPSQTINQDSPEVFRCLSCFTFFIPTGCGFNIFRIFERRDVDQQVQSQHSSASVENCGSWLLSCFRTIDSPKPLHNADSLEEPLVSDSQRTDNITSVEENTPLHSDNTIGKAEQSNKPSPTGSQTTAATYEVKESFSQFHASSKDVTGSTQKEAGHVVTVQRNGARQEQIPLSRPAVDTKTDTSHLGHKEEFTQTEAGHVVTVQRNGARQEQIPLSQPSGDTANDSMHLGHKQDILEDIMAPSDNSTFFSPSFVKPVLTIPIKVLPGEDNQTVEKPTSVIRQPAEPEAPPHRVLAVPEAEALVPAPSAERDEWDILKAVVYGGLVESITSLSVVSAAAASGAKTLDIFILGIANLIGGLPVLYHNIADLRNTGDIAESSEQVGHYWLELGRRSKYQLHMVIAILSYILFGLLPPVIYGLSFRTSDNRENKVLVVAAASLLCIALLAIGKAHVKRHRTYLTTLLYYLSIGFSSSGLSYVAGVLLAKVLAHFGIIDQGGASAPAPPGLSFPEAAAWASY

SEQ ID NO: 15644 - protein, 188 aa, Zea mays
  VARIANT 108: note = Ancestral polymorphism is E, Derived polymorphism is K
  VARIANT 64: note = Ancestral polymorphism is R, Derived polymorphism is G
  VARIANT 39..188: note = Derived polymorphism lacks residues 39 to 188
MDARVSTWKERIESALEEHDKNQPFDIGSYGEKILDTLSSRTNNARIASFSEIVSGKPKYEIARTFSAILQLVTGRSVDLEKGQATNELVSYTTENPFHVRIIGSQPEARSGGTLCPKDGQVPTTKCRKDNESSVAQHECPKKSLRKNGKIPVKASTRLTNRACWSAMQSYNLLKWHKKAHIATVKAR

SEQ ID NO: 15645 - protein, 745 aa, Zea mays
  VARIANT 458: note = Ancestral polymorphism is G, Derived polymorphism is V
  VARIANT 245: note = Ancestral polymorphism is R, Derived polymorphism is C
MLLLRANALAAVPVSFSITPAASYSCFPWPSSSTTAASCSVGSSARLDAAVQYDPLRPGSDAWAHPDGMVTAEGDEEKQRYDTEGESNDWEGEGPQGSSDPEGINVPRQRYIAVPKEALLDAVLSQFASDDDDAADFKRCARCLDAILHAEHKRMLEEMRTSYMLTQRHRDEEEEQDDTDTASGSDYVNGKAGSGFFGITQLDGTLFLTRSVDLRTLLGLTPDPDSQTRVAFATQFQRSFMTLLRNAQFEELSAQDLLLTYALNNDYLLTLPIYVDWKKAAQSNAIIFRRGYATERQKGLLLVEKLDYLQSKLLQNVFFSLSKPLKKPGKWLNEFYYYASQYIAFSSWQALKRSTDNQGFQIWIDKLRLWLKEQTYADNSLLLIESSSWDKLSSDQLPDADVPIWIAAQRAVSRYEGILSPVGPRGRLLRRLLKWTGLIPSLPEATIKSNNETKHLEGHVRPNFLPRITLANIWEPASRESCNNNIWEMVKASFRILFGRSTLQEPAFQELILLYTDEVVPSETKDEMVPLQLKIYERIPIPDLPVVFPHKKLSFRILDTVRLDIATVIGLLAYVVNYKFESLASSPSAFLLDIVAGTALVILVFRVALGYKQTRDRYQLLVNKTLYEKTLASGFGSVYFLLDASEQQQYKEALLAYAMLLCRKKYEVSSRASIRDACEQFMHEKFEAKIEMPIDKAMETLLRLGLVIELPTDGGSSVIGLPCSEAYRILKSRWDGLLEQDTEQG

SEQ ID NO: 15646 - protein, 269 aa, Zea mays
  VARIANT 23: note = Ancestral polymorphism is V, Derived polymorphism is A
  VARIANT 37: note = Ancestral polymorphism is L, Derived polymorphism is M
  VARIANT 42: note = Ancestral polymorphism is R, Derived polymorphism is C
  VARIANT 71: note = Ancestral polymorphism is R, Derived polymorphism is C
  VARIANT 183: note = Ancestral polymorphism is H, Derived polymorphism is Y
  VARIANT 187: note = Ancestral polymorphism is K, Derived polymorphism is N
  VARIANT 213: note = Ancestral polymorphism is S, Derived polymorphism is L
  VARIANT 252: note = Ancestral polymorphism is P, Derived polymorphism is H
MSGGTPAASSSLRTSLSYYVRQVRAYDYHHYLCLLHLAPAVRKAAFTFRTFNIETARAMDVVFDPRAGLMRLLWWKEGVDKIFGNKLVEHPVAQALSSIIADHKVSKHWLKRSVEARINDANREEGTIPRTSAKLERYVEDTQSTILYMTLQAGGIQSTVADHAASHIGKASGLLLLLKALPHHVNNQGTVHYIPASVAEECGLLITREGGRSEVRAGERLLDVVFKVASVAEAHLHKARELAPSVPKEAIPMLLPALPAQVLLDTLRR

SEQ ID NO: 15647 - protein, 192 aa, Zea mays
  VARIANT 125: note = Ancestral polymorphism is G, Derived polymorphism is V
  VARIANT 113: note = Ancestral polymorphism is G, Derived polymorphism is R
  VARIANT 101: note = Ancestral polymorphism is R, Derived polymorphism is C
  VARIANT 96: note = Ancestral polymorphism is T, Derived polymorphism is M
  VARIANT 89: note = Ancestral polymorphism is A, Derived polymorphism is T
  VARIANT 81: note = Ancestral polymorphism is I, Derived polymorphism is T
  VARIANT 80: note = Ancestral polymorphism is M, Derived polymorphism is I
  VARIANT 77: note = Ancestral polymorphism is R, Derived polymorphism is W
  VARIANT 68: note = Ancestral polymorphism is R, Derived polymorphism is W
  VARIANT 49..192: note = Derived polymorphism lacks residues 49 to 192
  VARIANT 46: note = Ancestral polymorphism is T, Derived polymorphism is M
  VARIANT 41: note = Ancestral polymorphism is P, Derived polymorphism is L
  VARIANT 36: note = Ancestral polymorphism is K, Derived polymorphism is N
  VARIANT 26: note = Ancestral polymorphism is D, Derived polymorphism is H
MKHPLSLSSKPRSPILASDAVFALCDVGTPWRSQWKLFSCPLAMLTGGWALVERATWGDVFEVLKRPRLLAGAGGRRVLMIGGLRSSFAMDAPCSTVLILRLDLAIMEWEEAGRMPPNMYRYFTGLCEATSKRGSIPAAAAEGNNKVKVFGGDGKVWFAGKRVRGKLAMWEEDEMGSSGKWDWWMVFLAMVM

SEQ ID NO: 15648 - protein, 304 aa, Zea mays
  VARIANT 23: note = Ancestral polymorphism is V, Derived polymorphism is A
  VARIANT 37: note = Ancestral polymorphism is L, Derived polymorphism is M
  VARIANT 58: note = Ancestral polymorphism is A, Derived polymorphism is S
  VARIANT 115..304: note = Derived polymorphism lacks residues 115 to 304
  VARIANT 173: note = Ancestral polymorphism is G, Derived polymorphism is R
  VARIANT 200: note = Ancestral polymorphism is E, Derived polymorphism is K
  VARIANT 213: note = Ancestral polymorphism is S, Derived polymorphism is L
MSGGTPAASSSLRTALSYCVRQVRAYDYHHYLCLLHLAPAVRKAAFTFRAFNIETARAMDVVSDPRTGLMRLLWWKEAVDKVFGNKLVEHPVAQALSSVIADHKVSKHWLKRSVEARINDANREEGTIPGTSAELERYAEDTQSTILYMTLQAGGIQSTVADHAASHIGKASGLLLLLKALPHHVNKQGTVHYIPASVAEECGLLITREGGRSEVRAGERLPDAVFKVASVAEAHLHKARELAPSVPKEAIPVLLPALPAQVLLDTLRRCEFNVFDPRLSRGVHGVSPLWYQLKLNWNAWRSRY

SEQ ID NO: 15649 - protein, 96 aa, Zea mays
  VARIANT 50: note = Ancestral polymorphism is R, Derived polymorphism is H
  VARIANT 45: note = Ancestral polymorphism is Y, Derived polymorphism is C
MNRCLVLGHVCYHIIAARLNGYMSTVTNLKNPVNKWRCGATPISYYYFIRLIGRKASHVALECALQSHPNMVILGQEVAASKLTIFDITKLICDVV

SEQ ID NO: 15650 - protein, 220 aa, Zea mays
  VARIANT 31..220: note = Derived polymorphism lacks residues 31 to 220
MDHASSAGTGERRRLPRPGRTGGHRPEERPQRGLPSVVDPPAADDRHDHQLPALAPRLFSVAEGKEALVEEPAHGGQLTRRRWDWELQTRSAMEEDGGAGESEDGGSEVGGGDRRSQLCASREIDRGGKDRERDWGEWRRSVAAANVEGEHEIGGRGSRLSARRWNGGAICTCAMALRPRLAPAGEFGVGGERGGPEGRDATDAWESRGGEHRGRRIGRG

SEQ ID NO: 15651 - protein, 851 aa, Zea mays
  VARIANT 412..851: note = Derived polymorphism lacks residues 412 to 851
MSASEFRIPYQQVSPSQPAENVNQFKTCRCGEGDPNSTSETGDSPPASCPNCQVLKSGHLLLSSKGIGWTSWKKRWFVLTRASLVFFRSDPNVPPPRGAEPIVTLGGIDLNNSGSVVIKEERKLLTVFFPDGHGERTFTLKAETTGDLNEWRNALESAIAQAPSIANTMGQNPIFSTDVEAESAESPAEHSEDRSVIGRPAKFALVDADGSPSFLEKALKFIEDHGIKVEGILRQSADVEEVKRRIRDYEKGKNEFSPEEDAHVIGDCIKYVLREMPSSPVPASCCTALVKAYRSDKARRLDEINRVINEVFPEPNRQLLQRTLKMMQVVESHKAVNRMSQSALAACMAPLLLRPLLLGECDIDNEFSMGGDSSFQLLQAAAAANHAQAIVIIMMEEFDQIFDDSEEGSCSSDAYTESEDDVDKEYSTDNDTHDDDGSYDSGEDDIEEDLDYSDDSEHDSKINANIKDGKVKNNISETAEVAQAEDTSPMDINSQSNQKQESCGPNGSKDRILRSTSRSSSSREKTMEKSCSSAHKGKRTLWGRTSARKDLSTEEIECCSDDEALVEKLESNKIDLQSKIAKEAKENAILWSSLEKRKEELHERRLALEKEVENLRDQLKRVMNLRRGQVSSPSTIDSKVRGQQLCCESCNQRLLNTDRLSGPESSSVEASPTVGSDPAFDMVRRQNPFRSAFIISGRKVCYQVKKKRTFQGDIEQSRKQAAQHSPSSRDKPSHEAVGGITQRAPQRGHSIAREGQDGSSSLSSSNSKWNLAQKQYSNSPLIRGLHVSSRLEDFGGSISPAASSALAKLTNRLNFLKERRALLASEMQSLDLGRPPTVKSPTPKGHESKNS

SEQ ID NO: 15652 - protein, 133 aa, Zea mays
  VARIANT 18: note = Ancestral polymorphism is C, Derived polymorphism is R
MAARRSSCSSTTAVPLLCASALLLFILLSAGVAPAAACGGHPCPIPDGKCPVNAVKLGVCADVLDGLIHAVVGGPPKEPCCSLISGLADLDAAVCVCLAINANILGVNLDVAVDLSLLVNYCGRRVPAGFKCA

SEQ ID NO: 15653 - protein, 228 aa, Zea mays
  VARIANT 134: note = Ancestral polymorphism is R, Derived polymorphism is C
  VARIANT 99..228: note = Derived polymorphism lacks residues 99 to 228
  VARIANT 89: note = Ancestral polymorphism is W, Derived polymorphism is R
  VARIANT 88: note = Ancestral polymorphism is D, Derived polymorphism is Y
  VARIANT 30: note = Ancestral polymorphism is P, Derived polymorphism is S
  VARIANT 15: note = Ancestral polymorphism is G, Derived polymorphism is D
MECEPEELQFLGVVGIYGFSAEILRGPHRSLFARIATAFALPLSALFLLHVAISHVLFTHIDFDDTTLDASSPGTDTQRRLLSRLASYWLALLLFKSAYLLALLLLSLLSVVASVYSAKRNTLTFLRMLSVVPRVWWRLAAMFLAAFALLFAYHSFVVLVFVGLLVAMDNGSSLAGLLPFLVVVAYLLGLVYLGRRKGKPKSKSKPKDTCSWFDGGRKAMIQLAGELF

SEQ ID NO: 15654 - protein, 52 aa, Zea mays
  VARIANT 44: note = Ancestral polymorphism is S, Derived polymorphism is L
  VARIANT 40: note = Ancestral polymorphism is S, Derived polymorphism is L
  VARIANT 37: note = Ancestral polymorphism is M, Derived polymorphism is I
  VARIANT 31: note = Ancestral polymorphism is A, Derived polymorphism is T
  VARIANT 24: note = Ancestral polymorphism is T, Derived polymorphism is I
  VARIANT 14..52: note = Derived polymorphism lacks residues 14 to 52
MDKLEALLRPKEGQSNPAGHKRGTNDKDITAKIKRAMDLSEDLSAKIKENQG

SEQ ID NO: 15655 - protein, 190 aa, Zea mays
  VARIANT 55: note = Ancestral polymorphism is K, Derived polymorphism is Q
  VARIANT 48: note = Ancestral polymorphism is Q, Derived polymorphism is L
MKTILASETMDIPEGVTVTVAAKLVTVEGPRGKLTRNFKHLNLDFQLQEGGRKLKVDAWFGTRRTMAAIRTAISHVQNLIKGVTKGYRYKMRFVYAHFPINASITNSNTAIEIRNFLGEKKVRKVDMLDGVTILRSEKVKDELILDGNDVELVSRSAALINQKCHVKKKDIRKFLDGIYVSDKGVIEEEQ

SEQ ID NO: 15656 - protein, 190 aa, Zea mays; identical to SEQ ID NO: 15655
  VARIANT 55: note = Ancestral polymorphism is K, Derived polymorphism is Q
  VARIANT 48: note = Ancestral polymorphism is Q, Derived polymorphism is L

SEQ ID NO: 15657 - protein, 615 aa, Zea mays
  VARIANT 225..615: note = Derived polymorphism lacks residues 225 to 615
MHGERERERESLLLLPDRSAGAMEGGGEHHHPLSVFLRDARLAFRWDELGQEIMRIAVPGALALMADPVASLVDTAFIGHIGPVELGAVGVSIAVFNQVSRIAVFPLVSVTTSFVAEEDAMSNGRDNDKIHQQNERNVSVSEMDELIPPEGASASTSISSFETDSCEVSVEQKRKNIPSVSTALLLGGVLGLLETLLLVLSAKPILGYMGVKPDSAMMKPALQYLVLRSLGAPAVLLSLAIQGVFRGFKDTKTPLYATVAGDAINIVLDPIFMFVFQYGVSGAAIAHVISQYVHTFCLFPIEMEGIYIQKFMILVLLSFVIVYGGTFCRYFIASILLWRLRLHVDLLPPSFKHLQFGRFLKNGFLLLARVIAATCCVTLSASMAARLGSTPMAAFQICLQTWLACSLLADGLAFAGQAILASAFARKDYPKATATASRILQLALVLGLLLSILLGVGLRIGSRLFTSDQGVLHHIYIGIPAHIISFIHIISACKPFRESLSALLNQSTLWLLFLMVSITEHQISDMLPTQWQADRLLLVTHILLINLVPYNFFTEPCMYRQVLVAVVSIICILTLESYGGFIGIWIALVIYMSLRMFAGFWRIGTAQGPWAYLRG

SEQ ID NO: 15658 - protein, 224 aa, Zea mays
  VARIANT 106: note = Ancestral polymorphism is K, Derived polymorphism is M
  VARIANT 77: note = Ancestral polymorphism is G, Derived polymorphism is D
  VARIANT 42: note = Ancestral polymorphism is R, Derived polymorphism is W
  VARIANT 20: note = Ancestral polymorphism is S, Derived polymorphism is N
MALTTLTLELESAAGDYSHSHSRRERMFEKVVTPSDVGKLNRLVVPKQFAERHLPLRGAAARSRGMVLCFHDDARGGEAWRFRYSYWSSSQSYVITKGWSRYVRDKRLAAGDTVAFCRDGARLFIDCQRRRRTTTRRSGSEGAVVLPAPAIGAAVPPMCQLQMTVVFPAGQHQQAAVAMKKETAAAQQEDDNEVQRRRGRCLRLFGVNLLDELRTEPLLLDLQL

SEQ ID NO: 15659 - protein, 124 aa, Zea mays
  VARIANT 78: note = Ancestral polymorphism is C, Derived polymorphism is Y
  VARIANT 70: note = Ancestral polymorphism is E, Derived polymorphism is V
  VARIANT 55: note = Ancestral polymorphism is R, Derived polymorphism is H
  VARIANT 52: note = Ancestral polymorphism is G, Derived polymorphism is R
  VARIANT 45: note = Ancestral polymorphism is F, Derived polymorphism is I
  VARIANT 15: note = Ancestral polymorphism is G, Derived polymorphism is R
  VARIANT 8: note = Ancestral polymorphism is E, Derived polymorphism is K
  VARIANT 7: note = Ancestral polymorphism is H, Derived polymorphism is R
MVGSGSHERDWSGSGSFYGNLDSGGECGVLAQNMFYVPAENREQFWYSTDYRMFHFCVANTELHWRPGMVQYRFIEHCLSSVDRHKQPWLIFLVYRVLGYSLATFYTDLGTTEEPMGREFLQPL

SEQ ID NO: 15660 - protein, 498 aa, Zea mays
  VARIANT 222: note = Ancestral polymorphism is A, Derived polymorphism is S
  VARIANT 266: note = Ancestral polymorphism is R, Derived polymorphism is L
MAIHHPHLLDFSPPPNTVAMEEAPPPPHFDHGLLGLHVDGMPHRVLADDAPVAAWAPQAVVSHSLYGYDNTAAGASSLFGHHEASEAQFSVLPPAASSFALLPNHHHQQQLPTTTAASSMQQPFQLRSSKYLGPAQELLAEFCSLEGDLLHATNKQGASGAAAGNSRWDDVETSSSSSAGLWGHLSLSSMDLLELERRKARLLSMVEEVDRRYRRYREQMRSVEVSFEAVAGAGASQVYTRLALRAMSRHFRCLRDALVAQVRALRKAMGERDGGPAGAAAGATKGDTPRLKVLDQCLRQQRAFQHPGTIDNYPWRPQRGLPERAVAVLRAWLFEHFLHPYPNDVDKHILARQTGLSRSQVSNWFINARVRLWKPMIEEMYTEEVNPKPADDTSQNPSAGGGVGVGVAIKPEQQVSTAAAGATIGGGGGDHLFGPSYPSMYGSHGGAVSLTLGLQQQPFASTMMHQRRPLMTFQGDEQEPALPYRDLMGSQLLHHFAG

SEQ ID NO: 15661 - protein, 101 aa, Zea mays
  VARIANT 79: note = Ancestral polymorphism is G, Derived polymorphism is R
  VARIANT 53..101: note = Derived polymorphism lacks residues 53 to 101
  VARIANT 22: note = Ancestral polymorphism is R, Derived polymorphism is W
  VARIANT 14: note = Ancestral polymorphism is S, Derived polymorphism is Y
MKPRRTQKDLKFVSSSPHEAFRWVNSFANQQCYVNLLPHPMASSKKHSSELIQFDAMFDPYVKCRSPPKILVILNPRSRHGRSSKVFHGKVEPIFKVCLAE

SEQ ID NO: 15662 - protein, 174 aa, Zea mays
  VARIANT 12: note = Ancestral polymorphism is M, Derived polymorphism is T
  VARIANT 29: note = Ancestral polymorphism is A, Derived polymorphism is V
  VARIANT 30: note = Ancestral polymorphism is P, Derived polymorphism is S
  VARIANT 34..174: note = Derived polymorphism lacks residues 34 to 174
  VARIANT 40: note = Ancestral polymorphism is E, Derived polymorphism is K
  VARIANT 44: note = Ancestral polymorphism is R, Derived polymorphism is W
  VARIANT 67: note = Ancestral polymorphism is R, Derived polymorphism is C
MGSSSVTVTTPTTLCAAALLLLVLGTAVAPCSAQAVVTIEEACRMAASGSGGVAYDHCVASLASDARSRDAADLHRLAALAARIAVEHAAATEAKIEGLGEVEESPPRARAYATASTSTAPPPTSCATRSTTSTRASTARHPSSCPPRWAPPRAARTSGRARSTSLSPPTIGSV

SEQ ID NO: 15663 - protein, 733 aa, Zea mays
  VARIANT 270..733: note = Derived polymorphism lacks residues 270 to 733
  VARIANT 332..733: note = Derived polymorphism lacks residues 332 to 733
MAKRPRHAGNGAGRSQLASFERKLHDLILNGGLAGPGASAEDIANTLRIHHPKFRRLKHGPFFASVRRALTSIPIPSSSDDDGSSASRCRHDAHTTSSASVSDAAAHPSPPAPAFDVTKSTLFSHYAAQTRKRNQNQQLEIEVTAEKPRRLITAEGGGGGDAKPEAVPAAEGFCREDKGPRFADLGGMEAVIEELMMEVVVPLCHPKLPHRLGVRPVAGLLLHGPPGCGKTTLAHAIAIETGVLFYKISAPEVVSGVSGASEENIRGLFQKAYRTAPSIVFIDEIDAIASKRENLQREMERRIKPGYVIVIGATNRPDAVDQALRRPGRFDREISLGVPDENARKQILKMLTQHLRLEGEFDLFKIARATQGFVGADLKALVDKAGNLAMKRIIDKRRIHYRREHDGNSKHDWWRQPWDESEVEGLHITMDDFEEATKMVQPSLRREGFSSVPDVTWDDVGGLDSLRKEFDRCIIRCIKNPEDYEVFGVNMQAGFLLFGPPGCGKTLIAKAVAHEAGANFIHIKGPELLNKYVGESESEVRKIFTRARTNSPCILFFDEVDALTTKRGKEGGWVVERLLNQLLIELDGADQRQGVYVIGATNRIDVIDDAVLRPGRFGKKHYVPLPGAHERVSILKAHARSKPISTDVHLDALARRAECNNLTGADLASLVNEAAMAALEERLEFIENGTSSMGSSCLIKLSHFERALSKIKPSVSEQQIKYYEALSKRYSSN

SEQ ID NO: 15664 - protein, 361 aa, Zea mays
  VARIANT 89..361: note = Derived polymorphism lacks residues 89 to 361
  VARIANT 29..361: note = Derived polymorphism lacks residues 29 to 361
MGRSPCCDQDAGVKKGPWTPEEDKLLVDYINEHGHGSWRRLPKLAGLNRCGKSCRLRWTNYLRPDIKRGRFTDDEEDLIVHLHSLLGNKWSSIATKLPGRTDNEIKNYWNTHLRKKLLSMGIDPVTHQRRTDLNLLAAGFPSLLAAANFAAAAGAPAPTATGPLAAAHVSSWDINALRLQADAAKYQLLEGLVRVLTAPAAAPTVGLMTLLAAANGGAPSGHQQSTRVVQQCDGMLSLPALTSVPPVTTPPGTSSAAYSLSGLLFGGAGTTTTAPAAGDGLSSTDQLGHSGATTGSNITAAAMPPPLSSAAAEGCNGAGKGCGRSTPSTCDETPASSPFDSLDSLTLDFDHNSDSWRELLE

SEQ ID NO: 15665 - protein, 346 aa, Zea mays
  VARIANT 140..346: note = Derived polymorphism lacks residues 140 to 346
MSATAVKFPVEAPLGAASLAAPLGLGFALDLGDWSVACSYGRTHDRPSCSNLLRDTAANRGAEHARVAVLGQLGLPNRMLWDRCSVLLQPRTVKVTNVSLSATVQDIKEFFSFSGDIEHVEMQSGDEWSQIAYVTFKDAQGAETALLLSGATIVDLSVIIGPAPEYQPPPIASAPPMSGTRVPVGGDNNVVHKAEDVVSTMLAKGFVLGKDAVGKAKAFDEKHGFTSTAGAKVASIDKKIGLSNKITTGTSLVSGKVKEMDQKFQVSDKTKSAFAAAEQKVSSAGSAIMKNRYVFTGASWVTGAFNKVAKAATDVGTMTKEKMAAEEQQKGFSGPSSRSHSYTPIR

SEQ ID NO: 15666 - protein, 190 aa, Zea mays
  VARIANT 101: note = Ancestral polymorphism is R, Derived polymorphism is Q
  VARIANT 54: note = Ancestral polymorphism is I, Derived polymorphism is L
MEVRGSAPSMKPKVEPPLEASHDWEVTPLSGDNPFFTSVMRKSQVQNPFQLVHIFFSFLFPQSGTHARRSTPYCLFQVIPVRFHRHLPEARAPAVLLCRDRSWTVSYAGVGKWKRLQGAWRDFARDNGLRLGDACVFELLVPSTDATQGDGDGSKDQGEVVFRVQVLRGGLPAEITSRGATSDDPLVIVD

SEQ ID NO: 15667 - protein, 291 aa, Zea mays
  VARIANT 6: note = Ancestral polymorphism is L, Derived polymorphism is P
  VARIANT 47..291: note = Derived polymorphism lacks residues 47 to 291
  VARIANT 67: note = Ancestral polymorphism is D, Derived polymorphism is V
  VARIANT 237: note = Ancestral polymorphism is A, Derived polymorphism is S
MSGFVPRHFVDLIGNGVKTNKGFKKIDLNSVAKNVSEFCGQEVTGQQVYNHLRKWRSRWVKVCKLKDISGALWDEDTFVISLEEGHYAAYIKDHPKDVDYLNRPIENYMPMQIIFGSGVATCRFAMGSNEPLGKSSDIVDILDDGIEVTSEFVDASNLTGKGKTVDKGTPGDSNDNKPMSNLGKRKRYMTDEDVADFNGMKEAISDVATAVHESIHAEAAPGIYNVVINYHKFSREALMYALNHMMEHKATSLVFLDMTPDDRDLWLKTFLAKHYHILFDLSCLSFILFKN

SEQ ID NO: 15668 - protein, 502 aa, Zea mays
  VARIANT 45: note = Ancestral polymorphism is K, Derived polymorphism is I
MVHGLRAAGCGLRRPTGPEEMALTRIGLAGLAVMGQNLALNIAEKGFPISVYNRTTSKVDETVQRAKAEGNLPVYGFHDPASFVKSIQKPRVVIMLVKAGAPVDQTIATLAAHLEQGDCIIDGGNEWYENTERREKAMEERGLLYLGMGVSGGEEGARNGPSLMPGGSFEAYKYVEDIVLKVAAQVPDSGPCVTYIGKGGSGNFVKMVHNGIEYGDMQLISEAYDVLKSVGKLTNSELHQVFSEWNKGELLSFLIEITADIFGIKDEHGDGYLVDKVLDKTGMKGTGKWTVQQAAELSVAAPTIEASLDSRFLSGLKDERVEASKIFQGDYYSTGSPVDKAQLVEDVRQALYASKICSYAQGMNIIKAKSAEKGWGLNLGELARIWKGGCIIRAIFLDRIKKAYDRNPGLASLLVDPEFAQEIMDRQAAWRRVVCLAINNGVSTPGMSASLAYFDSYRRDRLPANLVQAQRDYFGAHTYERVDMPGSFHTEWFKIARNISNN

SEQ ID NO: 15669 - protein, 112 aa, Zea mays
  VARIANT 46: note = Ancestral polymorphism is R, Derived polymorphism is W
  VARIANT 36: note = Ancestral polymorphism is V, Derived polymorphism is I
  VARIANT 3: note = Ancestral polymorphism is T, Derived polymorphism is M
MATPRKPIKLTLPSHKTTIGKFLTHSGTFTDGDLRVNKDGLRIVSRREGGEDTMEALVTETRIEGKESKTSIEAIAQVLASSRYLQNVLVAAIKRSGNGGDATCVEVEMLVL

SEQ ID NO: 15670 - protein, 239 aa, Zea mays
  VARIANT 99: note = Ancestral polymorphism is V, Derived polymorphism is M
  VARIANT 110: note = Ancestral polymorphism is G, Derived polymorphism is R
  VARIANT 153: note = Ancestral polymorphism is A, Derived polymorphism is V
  VARIANT 157: note = Ancestral polymorphism is T, Derived polymorphism is I
  VARIANT 169: note = Ancestral polymorphism is G, Derived polymorphism is R
  VARIANT 203: note = Ancestral polymorphism is R, Derived polymorphism is S
MRRHLQLGRADGRSAPLRQIGCARKSAATPANPPSMEGPWPCAPKSHGSATSSVTDQASNSKVVKVQSEEAWDLFTDQASNEGRPVDVVVLLALHVHAVYLFRRVVAHFRASWCVMSLSMNYKFEELVQTHPEVLFLYVDVDDVQLDVAIVIALALTNSYSSATTQLKGRRSCSYYLLSAFLSFTVLFIRIGQGTYSNVYRASDLEKKIVALKKVHFDSLELESVKLKAREILILKIVA

SEQ ID NO: 15671 - protein, 593 aa, Zea mays
  VARIANT 64..593: note = Derived polymorphism lacks residues 64 to 593
  VARIANT 4..593: note = Derived polymorphism lacks residues 4 to 593
MSEQQQPLPQPRSSMREALEKEDKEKAAAAAAAKEKAAVPKNGNGNGGKNGGGAGSGNGGAPPQSGEETAREIQVVREAYRRETAAPAYVIPEEPPAVVELVGWYIYGFCSYFITHLLLPVLFPAIITQVAFPNSDFTPDPKYTLKGVTCSVHEMSMYQRLTKHSIVIDGSRMSPLGWSGLSWAIGILIVAPLLTQTAHHLDRGQYQSLILIAATSFGSFFCLLTGFFKTVWVFLFYILFIAGSIIVAEAVHTRNLGLMIRGLAAHDSGKHLVLRRRAAASQLSLYCTAIGGIGAALMAAFMYHMLRRTDQLTGLWVVSIFCGLIWFIGICHGLFTNRPSSSSPTTAFEPNFFTKLSYSMTLLRYPQAIGSLVAVFLSSFATMCIFTSGTLYAIGGVCIKPVLVLALWILYFLFPLISLPLLHPIQIIIRADAVRMQLLGFIICLFVSGAGFYFKSHRWRAAHIIVIALVQSTANGILYAFGRILLLDASPPGKEGAFSVWYAFVRVTGAMIGFAASSAGPGRAGGSFAAAFLGSFLGIIVLIFGNVSNIGALKAAGHLKGMDDEKRMGGLGMEKGEGMGSAVADSGESRGRV

SEQ ID NO: 15672 - protein, 157 aa, Zea mays
  VARIANT 93: note = Ancestral polymorphism is S, Derived polymorphism is L
MEAGWLTSQGLDADLSDSSFHVGRVAGKSRKATSKWTKIKPVIKLEGRGLAISKIYRRVCIVQRDQLFELSPVAAVEVGIDIDDGSTLLKLASKVDSIIESLENDKQKVGVGAEISREALNHLLNLISKKMIVLTAVLSVNLAYLLVDGCGLAVYKI

SEQ ID NO: 15673 - protein, 443 aa, Zea mays
  VARIANT 370: note = Ancestral polymorphism is A, Derived polymorphism is V
MEWLDEYEKLVIRMNTPRVVIDNAVCPTATLVQVDSARKRGLLLEAVQVLADLDLSINKAYISSDGRWFMDVFHVTDRLGRKLTDASVIAYIQQSLGTWVEPAAAAPPEGLTALELTGPGRAGLLSEVFAVLADMQCGVADARAWAHRGRLACVAHLRADDPADGDGDGRVSRILARLSHLLRGDGVVAPGAVAAVPASGVAHADRRLHQLMSADLHRAAPVPVPVPALAPAVSVQSWAERGYSVVTVQCGDRPKLLFDVACTLHDMDYVVFHGTVDTAAGRARQEFYIRRADGSPIRSEAEREMLTHHLQAAIERRSLEGVRLELCAPDRAGLLSEVTRTFRENGLLVAQAEVSTKGDQACNVFYVTDAAGKAPDRGAIDAVRERVGADRLVVSEEPRPPQQQLYPDASGPGSGGGGGLGLVYLGNLVRRNLYNLGLIKSCS

SEQ ID NO: 15674 - protein, 156 aa, Zea mays
  VARIANT 84: note = Ancestral polymorphism is R, Derived polymorphism is L
MATRAALVAGRRAAGQDGLALLSSGCRREGARPSSPHKSSSATEREGHGDATAAQVEAALNRKNADVVDVDRSGSATLVPADARRGAGDEWVPDQETGVFVPADEESSGPGDGGVADVGGARGQAPSVLDQAVFVREEHMEDVERPAVGVDDAGAA

SEQ ID NO: 15675 - protein, 450 aa, Zea mays
  VARIANT 86: note = Ancestral polymorphism is A, Derived polymorphism is V
  VARIANT 149..450: note = Derived polymorphism lacks residues 149 to 450
  VARIANT 208..450: note = Derived polymorphism lacks residues 208 to 450
MSTGLSQLSGGVGGDRGSSSSAGPHHQHSHHPPPPPPPKILLAKPPLPHASSSGADDDGGTGVAGGRARQAPQPGSLSLVSDAWEAHTDKILPYLTENNDFMVIGVIGPPGVGKSTIMNELYGYDASSPGMLPPFPTQTEETRLMGKHCTTGIDIRISNERVILLDAQPVYSPSVLIDMMRPDGSSTIPVLNGEPLSADLAHELMGIQIGVFLASVCNIVLVVSEGMNDLSMWELMLTVSFLIYNLYFLRLNGRRLNGCSNTFMQVDLLKHGIPDPSVLTSSASQDKENKNEDQTGCEDYISDLCFVHTRLQGQDFSPSKFMLLRRTLEKHFNSSTFRVGSSNATGHASDSLVPSSTKVEDLTSSRQDIFLLPLRGHDDSTKFEYGTYSCMLGMIRDQILSWPARSFSKNLSERDWLRSSARIWDMVKKSPVISEYCKALQSSGWFRKQP

SEQ ID NO: 15676 - protein, 724 aa, Zea mays
  VARIANT 4: note = Ancestral polymorphism is L, Derived polymorphism is H
  VARIANT 11: note = Ancestral polymorphism is L, Derived polymorphism is P
MGSHLLLPFLLLLSSPYVQAQQRITLGSSLTTQGPNSFWLSPSGDFAFGFRSIEGNTSSYLLAVWFNKISDKTVAWYAKTADPDPALVQVSSGSCLELTSSGALSLQDPTGKEVWNPEVVSATYASMLDTGNFVLAAADGSSKWGTFDNPADTILLTQVLTPETKLHSRTIATDYSNGRFHLNLQNNGVFFYATAVQSDPQHEYNWSMPGNATNLVFNATGMIYITLDNGTQVKITSGKTSSIADYYHRATLDPDGVFRQYMYPKKFSNHLYTQAWSVVDFKAPNIYIPRRSIAETQVSSGTCGFNSYSKVDVINNQTTCVCVPQYTFKGGSKGCTPDFQQPSCDLDEAGATKQFQLVTMSNVDWPQCDYEQHDNIPNNQCQQLCLTDCLCAVAVFRDSDNTCWKKKLPLTNNVVGDSVQRTVYIKVPKNNSQQPELLDSNRWKKDKKHWILGSSLFLGSSILLNIVLISVILFGTYCTITINESPSVQSSNNLGLPLKAFNYTELEKATSGFTEVLGTGASGIVYKGQLQDDLCTYIAVKKIDKLEHETEKEFTVEVQTIGRTHHKNLVRLLGFCNEGKERLLVYEFMTNGSLNRFLFGDIRLEWNLRAQLALEVARGLLYLHEECSTQIIHCDIKPQNILLDGNFTAKISDFGCGRVDFLVEGDEEAISNLKVVERFVAVALLCVQEDPTMRPTMLKVTRMLDGVAAIPTPADPSSFISSLR

SEQ ID NO: 15677 - protein, 371 aa, Zea mays
  VARIANT 191: note = Ancestral polymorphism is P, Derived polymorphism is R
  VARIANT 177: note = Ancestral polymorphism is K, Derived polymorphism is N
  VARIANT 12: note = Ancestral polymorphism is C, Derived polymorphism is R
MSKKHAIQCKYCDKVIHGGITRVKYHLANIGGFNVTKCKKVPAPVNQEMEALLTKKTSEKEQRKKEKQRERDEIDLDKSDGSNEEDNEHENDVIVLKSTSVSNNSSSSRPSTNGGSGTIDNFYKPQTIEEMDSDVPAMGFFHGCMLEAKKEIATRFDNNESKYRAAWDIIDKRWDNKLKTPLHLAEYYLNPYFYYPNKSSIELDGSFRAAVISCITKMFDDEDTQDSIIEELNIYQDQQGAFGHDIAVRQRRNKTFNPAKWWMNHGTTTPHLRILATRILNLTCSSSGYENVYQDEDHEGAHDEPSQEPSISKAQLPAKRKRHGHPRKKKLRSLKSLLSSDLERATCASSSESEDNESMQIEASNSDSGDE

SEQ ID NO: 15678 - protein, 124 aa, Zea mays
  VARIANT 85..124: note = Derived polymorphism lacks residues 85 to 124
  VARIANT 21..124: note = Derived polymorphism lacks residues 21 to 124
  VARIANT 4: note = Ancestral polymorphism is Y, Derived polymorphism is C
MFCYTFFYCLQYFLPFEIMLYSYKLNMYLCDNLVFQKQFSSLFQNMIWYFVKFFVCLLVQTLMNLSIDERCRKNNLSTSMIALSQVSFAAGLNLEDGPTHSASTSSSPEQTTDVDGSTTGDVTF

SEQ ID NO: 15679 - protein, 340 aa, Zea mays
  VARIANT 9: note = Ancestral polymorphism is R, Derived polymorphism is C
MLLLPLEERLKKWFTEVSGVNRFDALKDLAPTCSEVEILKMLPECAYLVRGLWVCKSSLLFDGVYSGPMDRILLEFTKRDPVPSNILEPFINLIGNRAMRDWILSPLCKRRQILKDHKFISADLSFIKRYPHIVNEQECAWSARETTLRESLEMSTTLAKKTMNSTRPNVASKGPHSNMSKGRDGPSQGSDDLARSVLGTVFTANKVRSMQAVVRDLRQLAAKYASNRKDGSKLQALCNAAKNCASLPHDELNRKIHLVAVPVHSVFVAKHEDKRALRNIFILLFRHKEPNGTLTKQEVVAAAAKHIKREITDREYHQVVTEICISTEDGHLLLKNGDEP

SEQ ID NO: 15680 - protein, 54 aa, Zea mays
  VARIANT 26: note = Ancestral polymorphism is G, Derived polymorphism is V
  VARIANT 18: note = Ancestral polymorphism is G, Derived polymorphism is S
MAFMEKLLGSAKGYRWMGPARYDFSVTMVFLKHRSYGCFSGDSIHSFTYIVSKG

SEQ ID NO: 15681 - protein, 295 aa, Zea mays
  VARIANT 9: note = Ancestral polymorphism is A, Derived polymorphism is E
  VARIANT 74: note = Ancestral polymorphism is R, Derived polymorphism is C
  VARIANT 88: note = Ancestral polymorphism is E, Derived polymorphism is V
  VARIANT 107: note = Ancestral polymorphism is P, Derived polymorphism is L
MAALLRLAAARSALPRRALAPHRRLAAAAAAAMEEWWSDWEQDGEEEARASAPAAGLDPAGGGPGGVQWVVMGRPGPQKHAHAARLAEVLAVPYISMGALLRQELNPSSQLYRKIANSVNEGRLVPEDIIFGLLTKRLEDGYNKGENGFILDGIPRTRMQAEILDEIVDVDLVLNFKCADGCFMKKQSRGNICAHCGQLFDVSNSASTNCSPSLGSYTWHSQAEPAGVLGLEASRMERMRTYAEQTKQLEDYYKKQRKIVELKTSARPVETWQGLVAALHLQHLDSPPTPHKLTA

SEQ ID NO: 15682 - protein, 1199 aa, Zea mays
  VARIANT 274: note = Ancestral polymorphism is D, Derived polymorphism is Y
  VARIANT 338..1199: note = Derived polymorphism lacks residues 338 to 1199
  VARIANT 383..1199: note = Derived polymorphism lacks residues 383 to 1199
MTVPTKDDSQSGTVADTVPLPTYRSLAAPVRKPVDKFALLPAFLKVRGLVKEHIDSFNYFVNKGIKKIVEANNRIEARNDPSIYLRYLGVHVGMPSVHVEYNIENITPHFCRLTDRTYSAPIKVHIEYTVGKQHEVRRKNNFIIGYMPIMLRSHACILYEKDEAELAKYGECPLDPGGYFVVKGTEKVILIQEQLAKNRIIVDTDSKGRVIASVTSSTHAIKSKTVIFMDKGKIYLQLNQFNKPIPIIVVMKAMGMESDQETVQMVGRDPRYGDLLFPSIQECASERIYTRQRALQYMDEKVTYPGATNQKEGRSYSILRDVFIAHVPVCNGQDTSFWKDQWISDELLSSQLPSLHSHLLRGVSIEVMSSRLATQLKPHLSRQNHSHCNINLRKKNVLDMNTCDICGLAGEDTNNIIFMCPFARAFWMRIGVNPNMIAAVQELWTSTAPLGVPMETLSTTLLLGTVWELWKHGDMDYVGNKRFELSGQLISLLFELIMQDSITFGLERAISTGNWDIKRFRMHRKGVSQVLSRLSYMASLGYMTRITPQFEKTRKTSGPRALQPSQWGMLCPCDTPEGEACGLTKNLALLSHVTTDQEEGPLIYLCYSLGVEDLLSLSSEEIHTPGSFLVMFNGLILGKHKDPQRLVIDLRNLRRSNVIGEFVSIFINEKQLKWFGHVQRGPSEAPMRSAILRYHSNEKRDRGRPKLTWKEIVKGDLHCVHIASDGGRVCRPLIIADMGISRIDETHMEKLRLVCHQHGTCGFDDFLRDGLIEYLDVNEENNALCAMGKQAMGNIAYNQVGYDKLGAGQNATVAVMGYSGYDIEDAIVMNKSSLDRGFGRCIALKKYTVLKDNYGDGVSDMIVEPQRDNGVLIKQNMRALDEDGIAGPGQIIRNHDIYVNKRTPKNTSKGIGRALRESDYKDSPALYKGVDGETTVVDRVMLCSDTNDKLSIKCIIRHTRRPEVGDKFSSRHGQKGVCGWLTLIFLASRMTIGKMIELLGGKAGVSCGRFHYGSAFGEPSGNADKVADISSTLIKHGFSYNGKDFLYSGILGQPLEAYIFMGPIYYQKLKHMVLDKMHARASGPRVLLTRQPTEGRSRDGGLRLGEMERDCLIAYGASMLIFERLLLSSDPYQVQKMWLVRLLQSQTEDFILFNVQEWGKHGQDEAAIRLQASIPGVACNECSTTLEVNRSMTDAGTVQ

SEQ ID NO: 15683 - protein, 1265 aa, Zea mays
  VARIANT 606..1265: note = Derived polymorphism lacks residues 606 to 1265
MAVSASAFGGHVVGALKGLLLNGPLPRKAGAELHEKLKQEVRYAADAENRVLEDDRARRWLAELRRVLYRADDRILQAYDAQEQQRTTASVLSLPIMRRFTMDMYIKREISSLLKDIDLLSENRPPALTSSDTATYQHDGRSSSCDGLDDDLVRHGSSLVEAEKIEMRILPLVDKLTEHHEPPREFLIFAIYGPGGVGKTTVARKIFDDQRTQSAFSARAWVSISRASTVAQILQATCAAIGVLQGPKTKADALQTQLADRIEGRRVFLVFNVHNGGGPSSHHHQGGSTGAEIFGNLVEVLKLFRAAQGSRALVTTTDENVGNEIRSAQIQKGAAEGFGLQTDRLWQLPVEDGWALLLRAAGLEPAKVTPELKKVGVAIVQRCNCLPLAIEAVGGLLRRKGYAQEEWERVRDSEAFELKDPATGTQGGAGSSVYLSYQHAPPRLKQCFHYLSLFPADVEIERRRVTQLWISEGLVDPGSSEEGSSTSSRSRRHHNNNTQETAAGEQQSGASQEGSSRSSRHNNNNNNTQSGASTEIAAAAAADDDDREDSTSSSQGPPRELPRLSSSRHHSPRTSLPDTMPSHRSDQEEVADCYLTELAGTGLLQRTNRRGQYKMHDQVRKIAESLTENEVCAGDPRYAATTTLPENLIRLSFLNKGLAALPENVARMTGLRTLLLSGNPLGETDVDTVCKNLGGSLRVLDLSETEIRSVPKSLGNLARLRHLDLSRTKITAVHESVGRLRRLRFLGLRGCGDLTSLPRSIHKLAKLEYLDFRDSGVANSTRSLHSLRHLTLLHGFVVDSVSSSNAVLLEDLKHMSRLSDLQINITKTVAGKNADDKMLKEKGSLRNLELRWCPVSSAVDPKTLETMLTQLHPHQCLVSLKIDGYHGAAYPEWLCSSDLPNLQRLSLENCWSWERLPPIWHLQKLRSLRMANLPKLQRIDMPQPPAEAAAAAFPNVEEMEVEGMEVLECWSDFQPGDLLQLRKLALRRCPKLCSLPGLEHCKVISTMELKDAELVHELANIPVQELVVEAMPSLTRVSNLPLMKVFTVVGCPQLERLSGVDSLQHVHVRDDEHQLQRLPAWLGGQQHFPRIETLDVEGGEELLARCERGNEDWHIVREIPRVYAYRSPGRLPYFSYARGSDFFCRHKAPQGADAPRKGRPLRSPESAASSSSSPSRPGGGNDAAAAEAAPADEARRRFWSRGPRPVDETYKKFLSVMSLFVVIVLWMITSLTDSHRNLLEDIALFFFYVCTVCYFIFLVTKRRNV

SEQ ID NO: 15684 - protein, 470 aa, Zea mays
  VARIANT 60: note = Ancestral polymorphism is P, Derived polymorphism is L
MERYTIINEVGDGTFGSVWRATNKESGEVVAIKKMKKKYYSWEECINLREVKSLRRMNHPNIVKLKEVIRESDTLFFVFEYMECSLYQLMKSRGKPFSETEIRNWCFQIFQALSHMHQRGYFHRDLKPENLLVTKELIKIADFGLAREISSEPPYTEYVSTRWYRAPEVLLQATVYNAAVDMWAMGAIIAELFSLRPLFPGSSEPDELYKICSIIGTPNQRTWPEGLQLAASMGFQFPQCESVHLSEVVPLASKDAINLISWLCSWDPRRRPTAVEVLQHPFFQPCFYVPPSLRFKSTGYASTPPSAGAKGAVDQKNIRRYYMGTVPNARPTVNYSYLRNNAPARAVGAQRKLELDYQLPETNNHNKVTKAEAMNQSWSRPAAVRSNAGNHLANDLNPRVPDLAEKLSQLSMGPNRVSGLGSERFVRTHENAAKRPLPVGSRAWHGPADPFRRPYEMPGDRTLLPRNLVR

SEQ ID NO: 15685 - protein, 129 aa, Zea mays
  VARIANT 112: note = Ancestral polymorphism is S, Derived polymorphism is N
MGLLGYIFSRSTISLVLGIAPGLATLVLGTLNMKFWRSGRSSFLLILAQAAISAFLAWKYSHAYFLTNRLLPWGFYTSLRSFSLYRTSPSKAFFPFGQRSDGLSCLKIMQHSNGLFLRLCATCGRKSRK

SEQ ID NO: 15686 - protein, 1056 aa, Zea mays
  VARIANT 279..1056: note = Ancestral polymorphism lacks residues 279 to 1056
MIPESALASMASSLSMFVANLVLAEISEHRAVKGDVNRLKKNYERVALMMASAERRVALDDQAATYWLKRVTDHMYQVQIVVDQWVIKNEKMHREGSLKRTISCGDHSGVMKLAAAMKELNADFDSILELSAETNKTRQPAAVRSYGKTAPGYNADIVGDYVDSDARGIIELLHSSKRRSCRLIAIVGPVGIGKTTLARRIYHSVDAQRFETKLWIRFSNDLSSLIIWPEPGWSSDRYKEGPTKSHWPDSDSRSSDRRKEGPTRSHWPDSECWSSDRRWEGPTKSQLMHLGAEIASKRFLLVVDSVWTEDVWEALLEGPLQQGDLEGSRVIVTTRNKHVARRIGAGLIHHVRRMSNADALRLLFRRASVSESDEAELQDVGRRIVEKCDGLPLAVRSVGRTLRGQEPTRHDWETACRAAFQDLSPEEQYTIGLSFRNLPPHMRQCFLYCSVFPEGFFIEKQYVEQQWISEGFILNKRRVTMEEAAERCFDELVGRGLLRLAVGSDGATGARMPIVIRSFAKDVSDHVNFCTESVSAANNLFEVRRLSIVENNEADDRIGDGDDSGNGEIAGGGDGNGSMEDEHGNRGEARIAGEDVPLHGLGRMKCLRTLVLRKSTVSQKSIRAVRQLNLLRVLDLRGVQGISALPIAVGSLEHLRYLNISETEIERVPGSISYLTMLQYLLLRNCSKVKTLPTGIQQLRYLRCLDIAGTGIKAVDWSFSAMEELVSMQGFPVTRGDGVVGSLRALNLKFPKKLAALRLDMLQEILEPLPRDRWPVREYQQLRDLELCYANADSPLVQGGTIENRMLVLDRFVPEKRLVRLKIENYLGKQYPSWIAAATLPNLQRLHLQSCAWCEELPPLGELPQLKLLAVTGFDSLRSLGAEFRGGNGPPVRTTAFRRLQQLFIGDMKALHTWSGLQSQDLPQLQVLRLLGCINLVAIPLVLQESATLTRLEVDTRTKTVIEDKLRGFTGGIVVNVDNTWEQEPPQHEADVAPQDAQPPGPGQDEAVEAEVEETVGALQKEVPKAFELGAVKLVLTIFAITAICSVLYLLFVPRC

SEQ ID NO: 15687 - protein, 114 aa, Zea mays
  VARIANT 47: note = Ancestral polymorphism is P, Derived polymorphism is L
MRLLPFLTEMRRLRPADISSSQPSIEIEMAILRWYTHFYFYKPRKEPRIAIDVRSRREGRDLRKVGFYDPIKNQTCLNVPAILYFLEKGAQPTRTVYDILRKAEFFKDKERTLS

SEQ ID NO: 15688 - protein, 203 aa, Zea mays
  VARIANT 89: note = Ancestral polymorphism is N, Derived polymorphism is H
MAPPRTGLKALNLKHYILAALMAILAVAVVVTVFSVLLSPARIFFSVTNPRSHLLVGNGGANLTFTLAANNTSQRAAVWYNTILVDVLNSTVVTPASIWTKADLKKNATSLMAGWQTRGSVATVDATVSVSRGSMAMAFINGADVNSSAFTVTVTAVARFKVGIAKTQLYDINVMCTPVIFLLQNRSGISVAASGANVDCGPY

SEQ ID NO: 15689 - protein, 481 aa, Zea mays
  VARIANT 16: note = Ancestral polymorphism is S, Derived polymorphism is Y
MPLVLLVLLLLLSCSSPVALLAAAHEHDEYTLVAKSSLKPKATCTGYRVSPPQNITWVPLNAPHGPCSPLPGSAAPSLAALLLHDQLRVDGIERRLSDNPHDSKLVPAGGEDFQTNGNLLQVNYGNSGQPMSSEAQQSGVVNASAAGGGSRSKLPGVIQTVVLDSASDVPWVQCVPCPIPPCHPQVDSFYDPSRSPSSAPFSCSSPTCTALGPYANGCANNQCQYLVRYPDGSSTSGAYIADLLTLDAGNAVSGFKFGCSHAEQGSFDARAAGIMALGGGPESLLSQTASRYGNAFSYCIPATASDSGFFTLGVPRRASSRYVVTPMVRFRQAATFYGVLLRTITVGGQRLGVAPAVFAAGSVLDSRTAITRLPPTAYQALRSAFRSSMTMYRSAPPKGYLDTCYDFTGVVNIRLPKISLVFDRNAVLPLDPSGILFNDCLAFTSNADDRMPGVLGSVQQQTIEVLYDVGGGAVGFRQGAC

SEQ ID NO: 15690 - protein, 88 aa, Zea mays
  VARIANT 18: note = Ancestral polymorphism is V, Derived polymorphism is M
  VARIANT 25: note = Ancestral polymorphism is V, Derived polymorphism is G
  VARIANT 28: note = Ancestral polymorphism is S, Derived polymorphism is N
  VARIANT 43: note = Ancestral polymorphism is A, Derived polymorphism is V
  VARIANT 74: note = Ancestral polymorphism is Y, Derived polymorphism is C
MPSRASEGVAAAASAGDVGKLNWLVTPSDVGKLNRLVIPKQHAAKYFPLEAAANEKGLLLRFEDRAGKLWRFRYSYWNSSQSYVMTKG

SEQ ID NO: 15691 - protein, 195 aa, Zea mays
  VARIANT 3..195: note = Derived polymorphism lacks residues 3 to 195
  VARIANT 7: note = Ancestral polymorphism is P, Derived polymorphism is S
  VARIANT 20: note = Ancestral polymorphism is G, Derived polymorphism is D
  VARIANT 36: note = Ancestral polymorphism is G, Derived polymorphism is D
  VARIANT 65: note = Ancestral polymorphism is S, Derived polymorphism is C
  VARIANT 68: note = Ancestral polymorphism is R, Derived polymorphism is G
  VARIANT 77: note = Ancestral polymorphism is P, Derived polymorphism is L
  VARIANT 82: note = Ancestral polymorphism is D, Derived polymorphism is Y
  VARIANT 88: note = Ancestral polymorphism is P, Derived polymorphism is L
  VARIANT 92: note = Ancestral polymorphism is G, Derived polymorphism is D
  VARIANT 95: note = Ancestral polymorphism is F, Derived polymorphism is S
MDQAVEPRSRDRVSRMFRTGAEMGLTVCRSWAFNDDTYNALQVSPGHFDERIFKEWLVAVKVISSWSGSVIMLMFDPYLNTDASTMSPFEHDEVSVLDNGAFTHFTFLGIKDIKIVHSSYDVGVILQTHSMKICSQVDLCNFDGLMVSSEDCVLVGQGYGLTETCAGAAFIEWDDTTSLLLCEGLFYKFDVCWIC

SEQ ID NO: 15692 - protein, 413 aa, Zea mays
  VARIANT 176: note = Ancestral polymorphism is A, Derived polymorphism is S
  VARIANT 155: note = Ancestral polymorphism is L, Derived polymorphism is S
  VARIANT 138: note = Ancestral polymorphism is G, Derived polymorphism is W
  VARIANT 126: note = Ancestral polymorphism is E, Derived polymorphism is K
  VARIANT 97: note = Ancestral polymorphism is R, Derived polymorphism is W
  VARIANT 59: note = Ancestral polymorphism is R, Derived polymorphism is C
  VARIANT 56..413: note = Derived polymorphism lacks residues 56 to 413
MISGAAGSSLSIEQAILGLTEALMIVLNDKENLSALGKHKNENHSGGSESTEHILQMLRQLPTKNISDKISHAEITDDSISNVNNSFADRKALHVKRTKKWLEETTSNVDKLLCATFPHLAIHSSEKVRKAVVSGVKGLLSSCSSTLKRTKMLLLECLCVLSCDDAAAMSEAAQDALDHLFNQGHNLVTENEISDTFTRFVPLPVLKQLKLMMACDNKVLTVLYIISRLVERLPQVVLGSEETTALSHARMLLALTFYAGPQFLINHLHRSPVSSLSLGCSRHFFHRYMVIAARFFDCLGLCIGHSSQFSGSMDKLIVSKPLSIGYLYSVAELKSGAYSKDTTNISLHATSTSAASKISVIHDNALPNALLGTVEYKLPHVPPWFFHAGSQKLYGVLAGIIRLVGLSTMSGTL

SEQ ID NO: 15693 - protein, 133 aa, Zea mays
  VARIANT 94: note = Ancestral polymorphism is P, Derived polymorphism is R
MGACATKPKTLEGQAPAEAAVSTPKVAPEATPISVEVAADEQVAEKVVVEEPAAAADVEHQKANEVVAPEAAVAEPDHKEEEAVEKTVVEEEKPAAAANAEEKVATAAETTTTVEAKKKDVEEARKEKQAQQS

SEQ ID NO: 15694 - protein, 466 aa, Zea mays
  VARIANT 37: note = Ancestral polymorphism is R, Derived polymorphism is L
  VARIANT 38: note = Ancestral polymorphism is A, Derived polymorphism is D
  VARIANT 303: note = Ancestral polymorphism is S, Derived polymorphism is C
MESLEALVAHIQGLSGSPEELAHLHSLLKQADGEPLRAHAAALVPFLAHLSPETHSLGYIYLLDACAASASNLSDFGGGDFLVTIAGFLTACSADQIRLAPDKCACCFFFDPQIDSNRNALYPVTIGCRRCNLTNFDLAVRCRAVLHVCKVLKDQVMQLNMPIRGIAPLRAAVRKIQSSPEQLTPVHADYLLLCLLAKQYKAGLSVLEDDIFEVDQPKDLFLYCYYGGMIYIGLKKFPKALELLHNAVTAPMSTLNAIAVEAYKKYILVSLIVNGQVPSFPKYTSISAQRSMKNHAQIYFELSTSYSNGRYTDLETFVESNSAAFQSDNNLGLVKQVLSSMYKRNIQRLTQTYLTLSLEDIARSVQLETPEDAEMHVLRMIEDGEIHATINQKDGMVSFHEDPEQYKSVEMVEHIDSSIQRLTALSKKLASIDENMSCDPSYLLKTGRDRGRFDYDDFDSVPHKYF

SEQ ID NO: 15695 - protein, 218 aa, Zea mays
  VARIANT 20: note = Ancestral polymorphism is G, Derived polymorphism is V
  VARIANT 41..218: note = Derived polymorphism lacks residues 41 to 218
MPPVKAEDLVVHAVKEQFAGLDYCITSPPPPWITTVLVGFQHYLVMLGTTVLIATIIVHFGTRLPAVMSGSYTYIYPVVAIILSQRYALLIDPLERFVFTMRSLQGVLIIVGVFQAVVGFFGIWRVFIRFLSPLTAVPFVTLTGLGLFFSAFPGVTKCIEVGLPALVLLVIFAEYASHVFAKGSFVFSRCPVLVTVVIIWIYAEILTAAGAYNQLGIT

SEQ ID NO: 15696 - protein, 336 aa, Zea mays
  VARIANT 221: note = Ancestral polymorphism is V, Derived polymorphism is I
  VARIANT 47: note = Ancestral polymorphism is P, Derived polymorphism is L
MASGSDSRTAADPSYPPFPLLEQDDEGGGHVHEQEQEARRGGALELPTVDLEAPGEALAAACRELGVFRLANHGVPAALSARLFALARAALAGAPFRDKRAQPGYFWGTPALSLRVRDVNWVEGFHVALGEAQQQQQHAPVPPPPLGDLLGLARAEYGAHMTRVARTLFDALAPALGLGAAQAASYLAERDGFLRVYRYPRCPEPGRLGMEAHTDSSVLSVINQEEGAGGLQVLHGGAWRDVAPAAGASTLLVNLGDMARAISGDAYRSVRHRVAASQAAERLSLCYFAFPRDDAVITCGAGRYRPFTYAEFREQVQADIKATGSKVGLERFLLHH

SEQ ID NO: 15697 - protein, 141 aa, Zea mays
  VARIANT 5..141: note = Derived polymorphism lacks residues 5 to 141
  VARIANT 12: note = Ancestral polymorphism is E, Derived polymorphism is A
  VARIANT 16..141: note = Derived polymorphism lacks residues 16 to 141
  VARIANT 26: note = Ancestral polymorphism is E, Derived polymorphism is V
  VARIANT 29: note = Ancestral polymorphism is P, Derived polymorphism is S
  VARIANT 32: note = Ancestral polymorphism is R, Derived polymorphism is H
  VARIANT 55..141: note = Derived polymorphism lacks residues 55 to 141
  VARIANT 56..141: note = Derived polymorphism lacks residues 56 to 141
  VARIANT 60: note = Ancestral polymorphism is G, Derived polymorphism is S
  VARIANT 75: note = Ancestral polymorphism is L, Derived polymorphism is P
  VARIANT 84: note = Ancestral polymorphism is G, Derived polymorphism is R
  VARIANT 87: note = Ancestral polymorphism is E, Derived polymorphism is K
  VARIANT 90: note = Ancestral polymorphism is A, Derived polymorphism is V
  VARIANT 99: note = Ancestral polymorphism is R, Derived polymorphism is W
  VARIANT 111: note = Ancestral polymorphism is T, Derived polymorphism is M
  VARIANT 120: note = Ancestral polymorphism is V, Derived polymorphism is L
  VARIANT 131..141: note = Ancestral polymorphism lacks residues 131 to 141
MWSPQEKNMRLENMTWRIWNLARKKEIDSRHRYGHNLHLYYDIWCANSSCEPFFYWLDVGKGRDLHHQKCPRSKLNSQLIMYLGPNERAAYEVVVEEGRLLYKQSGDLVNTNEESKWIFVLSTSRSLYVRSQSECSVQLAF

SEQ ID NO: 15698 - protein, 58 aa, Zea mays
  VARIANT 9: note = Ancestral polymorphism is D, Derived polymorphism is N
MSSPAHISDASSRTGPRRTTRTITPRVRRRCLKEMVQTSLNLSRNPIQMKDGIFRIML

SEQ ID NO: 15699 - protein, 167 aa, Zea mays
  VARIANT 157..167: note = Derived polymorphism lacks residues 157 to 167
MQSLVPFSTASSARPMASGPARRCARGSRARRAPSTSLAPPAAVDWSTPSVILTVSRSLRRLAPPTTGGRYVPRFLWILRLVDDGCAILYSCMSIWSLVAGQGTYILFLFDKSCCRRDNLKALPIFLDIMFHHVLGVILSLSFVLVFGEGSCLGSHWGSCRSASSSW

SEQ ID NO: 15700 - protein, 492 aa, Zea mays
  VARIANT 62..492: note = Derived polymorphism lacks residues 62 to 492
  VARIANT 37: note = Ancestral polymorphism is G, Derived polymorphism is C
MASGGSSRYSSYKAPGLRGALLEAAHVSCLEDRYALGPQLGWGQFGVIRSCSDLVTGEALACKSIAKGRLVSPDDVRGVRLEIDVMARLAGHPNVVGLKAVYEDRDSVHLVMELCAGGELFHRLHERGCFPEREAAALFRHLMEVVAHCHAKGIVHRDLKPENILLVSRSPQSPIKLADFGLATYTQPGRSLSGMVGSPFYIAPEVLSGGYNEAADVWSAGVILYILLSGIPPFWGKTKSKIFDCIRSMELRFPSDPWDRVSDSAKELVTGMLRRDPRLRLTAKQVLEHPWMQEHADPQDSCGQCHETGLQREGAGSCSFSTPLASRSRDVSFDTRGPIAWRGGGEDEATCCSPTFAAVCRSSFSAFITDPAPPPCSASSALGGSGFSFGEPCEPLDGGGGGGFPMPMASMPSFSFFCARDSSEPAEPQPVAASSTPRTARGSTPRGVNGRRNHTIGGGGREHLDVAVESVIRWASCTNFSTAPSLRASLVC

SEQ ID NO: 15701 - protein, 406 aa, Zea mays
  VARIANT 10: note = Ancestral polymorphism is S, Derived polymorphism is L
MAAAALLRRSPAARALLSPALSSRLVASKPHSSSPTQPPPEAKGASSTKTFSIYRWDPDSPSTKPHLRDYQVDLSDCGPMVLDALLKIKNEQDPSLTFRRSCREGICGSCAMNIDGDNGLACLTKISSASSASTVSPLPHMFVIKDLVVDMTNFYNQYKSVEPWLKRKDPPPQLGKEVPQTKADRAKLDGMYECILCACCSTSCPSYWWNPEEYLGPAALLHANRLPLWGTLMKPKPNMFMHLQARGYHGVSEKRNLRDHKRRLLAEKFELRGKLYKAVCRDPDLPLDMREKFRYKLSKLPRNSSMTRLRNRCIFTGRSRAVYKKFRMSRIVFRTLANKGELMGVKKASWWIQDSRDQFTKERLDAINDEFKLYRCHTIKNCTHACPKGLNPAKQIDTIKKLQLDA

SEQ ID NO: 15702 - protein, 409 aa, Zea mays
  VARIANT 233: note = Ancestral polymorphism is D, Derived polymorphism is V
MGNALGCAGLGERLAASARNGDAAEVRRLLEENPGLARCAAVGSSLNSPLHLAAAKGHHEIAALLLENGAEVNARNLSGETALMQACRFGHWEVVQTLLVFGCNVSKVDSLSGQTALHLAAAGGHATCVRLLLAGAGAGRNKLVNRAASGGVTALHLAALHGHADCVHLLVDERADVAAPTLPCTAAPMAAIGAGSAPLHYAAAGGEVRCCQILVARGADRAAANCNGWIPLDVARTWGCQWLEHVLSPESHLRIPRFPPSAYLSSPLASALALARDCRLLLNTAQLDSGGADACAVCLERPCDVAAEAVCGHELCAKCALDLCSVVKSYDVPGIAGTIPCPLCRSAIASFRMRAAADEPEPDVNDAGGGRRGAGDRQAAPSSPEKKRSTDSEQDVVLPFYCAPLAVPS

SEQ ID NO: 15703 - protein, 101 aa, Zea mays
  VARIANT 1: note = Ancestral polymorphism is T, Derived polymorphism is M
  VARIANT 19: note = Ancestral polymorphism is M, Derived polymorphism is I
  VARIANT 21: note = Ancestral polymorphism is V, Derived polymorphism is F
  VARIANT 26: note = Ancestral polymorphism is R, Derived polymorphism is H
  VARIANT 27: note = Ancestral polymorphism is R, Derived polymorphism is H
  VARIANT 28..101: note = Derived polymorphism lacks residues 28 to 101
  VARIANT 32..101: note = Derived polymorphism lacks residues 32 to 101
  VARIANT 33: note = Ancestral polymorphism is T, Derived polymorphism is M
  VARIANT 34: note = Ancestral polymorphism is P, Derived polymorphism is L
  VARIANT 43: note = Ancestral polymorphism is T, Derived polymorphism is M
  VARIANT 47: note = Ancestral polymorphism is D, Derived polymorphism is V
  VARIANT 70: note = Ancestral polymorphism is C, Derived polymorphism is Y
  VARIANT 72: note = Ancestral polymorphism is R, Derived polymorphism is C
  VARIANT 86: note = Ancestral polymorphism is V, Derived polymorphism is G
MMPDAPTSSPLSQISHAKIGVTGYLRRWTQAQTPLGPKLEAVTGYNDDDVKCKACESEESVAELMLCDDCDRGFHIFFLCPILLCVPVGYFLNGATRVAMP

SEQ ID NO: 15704 - protein, 176 aa, Zea mays
  VARIANT 39: note = Ancestral polymorphism is R, Derived polymorphism is M
  VARIANT 56: note = Ancestral polymorphism is E, Derived polymorphism is D
MSFLRSLANSFSSLLFSSGGETAPMDAAGSAPSPAAVVRERVAVKLRGYFDLAKEEMDKAVRAEEWGLPDDATAHYRNAMRVMLEAQAARVPDAVSSSGWCPAELERLAARGGRSGCTRRRSPSGRRRSRSGSECLVREVLKDNLLYSHCSLCYPLESATAAVVPKKVIVCGLLAA

SEQ ID NO: 15705 - protein, 151 aa, Zea mays
  VARIANT 49: note = Ancestral polymorphism is A, Derived polymorphism is S
MGILDHMSHVCSITETKEALKLRKKRPLQTVNIKVKMDCEGCERRVKSAVKSMRGVTSVTVNAKQSKCTVTGYVEPAKVLERVKATGKNAEMWPYVPYTLTTYPYVGGAYDKKAPAGFVRSAPQAMADPSAPEVKYMSMFSDENVNACTIM

SEQ ID NO: 15706 - protein, 587 aa, Zea mays
  VARIANT 492: note = Ancestral polymorphism is R, Derived polymorphism is C
MAMIDEPLYPIAVLIDELKNEDIQLRLNSIRRLSTIARALGEERTRKELIPFLSENNDDEDEVLLAMAEELGVFIPYVGGVEHAHVLLPPLETLCTVEETCVRDKAVESLCRIGAQMKETDIVDWFIPVVKRLAAGEWFTARVSSCGLFHIAYPSASDQLKTELRTIYGQLCQDDMPMVRRAAASNLGKFAATVEQNHLKTEIMSIFDDLTQDDQDSVRLLAVEGCAALGKLLEPQDCVAHILPVIVNFSQDKSWRVRYMVANQLYELCEAVGPEPTRADLVPAYVRLLRDNEAEVRIAAAGKVTKFCRILNPQLSVQHILPCVKELSSDSSQHVRSALASVIMGMAPVLGKDATIEQLVPIFLSLLKDEFPDVRLNIISKLDQVNQVIGIDLLSQSLLPAIVELAEDRHWRVRLAIIEYIPLLASQLGVGFFDDKLGALCMQWLEDKVFSIRDAAANNLKRLAEEFGPEWAMQHIIPQVLEKINNPHYLYRMTILQAISLLAPVMGAEITCQKLLPVVINSSKDRVPNIKFNVAKVLQSLVPILDQSVVEKTVKPCLVELSEDPDVDVRYYANQALQACDQMMVSS

SEQ ID NO: 15707 - protein, 160 aa, Zea mays
  VARIANT 47: note = Ancestral polymorphism is K, Derived polymorphism is N
MSVTLHTNLGDIKCEVFCDQVPRTAENFLALCGSGYYDGTVFHRNIKGFMVQGGDPTGTGKGGSSIWGAKFADELRESLKHNARGIMSMANSGPNTNGSQFFITYAKQPHLNGHYTVFAKVIHGFEVLDLMEKAQTGPGDRPLAEIRLNRVTIHANPLAV

SEQ ID NO: 15708 - protein, 136 aa, Zea mays; identical to SEQ ID NO: 2804
  VARIANT 87: note = Ancestral polymorphism is S, Derived polymorphism is C
  VARIANT 57..136: note = Derived polymorphism lacks residues 57 to 136

SEQ ID NO: 15709 - protein, 576 aa, Zea mays
  VARIANT 246..576: note = Derived polymorphism lacks residues 246 to 576
  VARIANT 3: note = Ancestral polymorphism is H, Derived polymorphism is R
MARCNLLVLVATAAFVTLALAVVRAEASGGIGFNLHHRFSPVVRQWMEARGHAPAGSSWSLPEEAVPQGSPEYYSALLRHDDRALSARRRRGLANADGRQSTLTFADGNATHLDTYEYLHYAEVEVGTPSSKFLVALDTGSDLFWLPCECKQCAETGNATTDRTYSPSQSSTSKTVPCGHPLCERPDACAAAGTGSNSSSSCPYEAKYVSANTGSSGVLVEDVLHLTGGGGKAVQAPIVFGCGQVQTGEFLRGAASGGLMGLGMDKVSVPSALASSGLVASDSFSMCFSRDGVGRINFGDDGGAGQAETPFIAAGSLQTAYYNISVGAITVDSKVMAVEFTAVVDSGTSFTYLNDPAYTLLTTNFNSRVSEVRDTYGSGYEKFEYCYRLSPGQTSMRRLPAVSLRTKGGAVFLVTWPVIPVLASSNGGPYHPIGYCLGVIKNSIISGAEDATIGQNFMTGLKVVFDRRRSVLGWEKFDCYKDAKMQDGGSPDTSLGSPAGDSAPGSPDDGVPFVPLPWENSTTDGMYPGSGRVPVPWPARSWSGSGSGSSCSSEASFGGLLSLILVHALVVICVAW

SEQ ID NO: 15710 - protein, 109 aa, Zea mays
  VARIANT 69..109: note = Derived polymorphism lacks residues 69 to 109
MLATGTGIAPFCLFLWNMFFEKHDHYKEEILQDMHSRLDPSTHLCVLFHVVAVGDLIVLGSSSTRCVRQGSSSSAHPWRTSSSSPAIRPGMPSQNGTFNLVLLQRLEVL

SEQ ID NO: 15711 - protein, 506 aa, Zea mays
  VARIANT 416: note = Ancestral polymorphism is D, Derived polymorphism is G
  VARIANT 391: note = Ancestral polymorphism is F, Derived polymorphism is S
  VARIANT 216: note = Ancestral polymorphism is K, Derived polymorphism is E
  VARIANT 204: note = Ancestral polymorphism is F, Derived polymorphism is L
  VARIANT 118: note = Ancestral polymorphism is A, Derived polymorphism is V
  VARIANT 62..506: note = Derived polymorphism lacks residues 62 to 506
MIKQILGRLPKKPTKAGEKELAGAGPSLPSPTSDARTTTDLTASSRLVSPSNYASAATNPGQSYAPRAAGLGAGASNGFAGSAAGYEALPSFRDVPASEKPGLLLGKLAMCCVVFDFADPTKDVREKEVKRQTLLELVDYITSATSKFPEPVVQEVVRMVSVNLFRVPTPAPRENKALESFDMEEEEPVMDPAWSHLQIVYELFLRFIQSPETDAKLAKRYIDHGFIIRLLDLFDSEDPREREYLKTILHRIYGKFMVHRPFIRKAINNIFYRFIFETEKHNGIAELLEILGSIINGFALPLKEEHKLFLVRALIPLHKPKCVAMYHQQLSYCVTQFVEKDCKLADTVIRGLLKYWPITNSSKEVMFLGELEEVLEATQPAEFQRCMVPLFRQIARCLSSSHFQVAERALFLWNNDHIEGLIKQNNKVILPIIFPALERNTKGHWNQAVQSLSLNVRKIFMDHDPALFEECHKKFEEEEAQEAGVRSRREARWRRLEEIASSKSPQ

SEQ ID NO: 15712 - protein, 445 aa, Zea mays
  VARIANT 228..445: note = Derived polymorphism lacks residues 228 to 445
MNVCTNCADGTSFISSKEMSDVSHTSEVIFKLVDKAIEDIGPDDVVQVVTDNASNHMGAKKLLHVKRPHIFWTSCATHTINLMLQGIGNMPRFKKVIDQAKAFTIFVYGHTRTLECMRYFTEGKEIVRLGVTRFASNYLTLDSIQEKKDQLRKMVVHSRWDSLKDVKSKKGKNATTTILNPTFWKDVKLTLAVFAPLFKVLRLVDGDVKPSMGFVYGEILKAKRHVKEALGNVETRFKDVVAVIDKKMAGRLDSPLHLTAYLLNPHYSYADPSIFDVPKITKASWWRLYGTETPALPLTASSSGCERNWSGFDGVHTKKRNRLTTYRLNKLVYIQFNNRLINKRAKIKSKKITDVLLSSGTTEAQGFLQENGDDCALVSFRDDEDEEEVMEGTGIPWSVLGDEVGAEEQLELRRSARVRELNEEEFESEEEEFDEDEDEMDETGV

SEQ ID NO: 15713 - protein, 258 aa, Zea mays
  VARIANT 121: note = Ancestral polymorphism is R, Derived polymorphism is C
  VARIANT 43..258: note = Derived polymorphism lacks residues 43 to 258
  VARIANT 33: note = Ancestral polymorphism is R, Derived polymorphism is W
MTGALSTPCSPTEFGLRSLAHACDFVSYSESCWRRMRGGASAQKRSPSGKFGGIVGGEGAQWRRMSLPAMLLDETVQVSQFARGIVTTAGAMNREPPRTPKPAPRTRKPAAGEPTPLHARRAREKQSHRGGTTTRGAGTATPPSRSRVRSRIQFKPVSSVAVSRPSVSANRVSPKNRPWAKKAVMFQNPMFHASTSAAIDPCATSSPSKKQKRLYKTRSPVVAQQIPHKFLVKVATERARIQSQDAREGPARETRRRS

SEQ ID NO: 15714 - protein, 160 aa, Zea mays
  VARIANT 8: note = Ancestral polymorphism is Q, Derived polymorphism is R
  VARIANT 41: note = Ancestral polymorphism is P, Derived polymorphism is S
MAMSIEMQCCLLIHLRLQSSLITFMVWPAPRLLLMEAATWPAVGVMPGSELEKPAMQWELSASWEERKKSRSVWASSARLSSGAWLGPGSQVQQQGEPNNMAIIVGPIVRWCLKVESSVGLLSNDALIVVSDLTDGVARDLPHARVKAGFHGFGQTECTP

SEQ ID NO: 15715 - protein, 259 aa, Zea mays
  VARIANT 242..259: note = Derived polymorphism lacks residues 242 to 259
  VARIANT 236: note = Ancestral polymorphism is G, Derived polymorphism is V
  VARIANT 234: note = Ancestral polymorphism is Q, Derived polymorphism is H
  VARIANT 199: note = Ancestral polymorphism is L, Derived polymorphism is M
  VARIANT 198: note = Ancestral polymorphism is A, Derived polymorphism is T
  VARIANT 191: note = Ancestral polymorphism is A, Derived polymorphism is T
  VARIANT 24: note = Ancestral polymorphism is S, Derived polymorphism is L
  VARIANT 7: note = Ancestral polymorphism is S, Derived polymorphism is P
MAPRARSALYFFLSVSTRFLHWMSRRRNERVNRCGGGDGGDEAGVVNRRRERGWSARGEERRAVGHDDRDAARGGAVQMHGCCLDPRVGRGRFDRDTKPARDYRISDSLAQARASIVRACTVAVTPSELGAPNCTPNPYPFILTVNRRRHGRHDRAHGGVQILLLLLPWILHEVPMDIVTRLLDVLKVFSALESSHTTMAIMTHHDNKQLANRRMRGPWPPPSGHRLPQRRAWQLVEWVLRRCRRCLPHVLHLMLLLLR

SEQ ID NO: 15716 - protein, 367 aa, Zea mays
  VARIANT 44: note = Ancestral polymorphism is R, Derived polymorphism is G
MSISVNGQSVVPPGFRFHPTEEELLTYYLKKKVASERIDLDVIRDVDLNKLEPWDIQDKCRVGSSSGPQNDWYFFSHKDRKYPTGTRTNRATAAGFWKATGRDKAIYAAGGAARRIGMRKTLVFYQGRAPHGHKSDWIMHEYRLDAADADHHHPCCYPSPPPLPTAIVRGAAGPGDQVPQEQEGWVICRVFKKKNLVHHGAAQSSGGGGTAAAASKMESSPTSTTIIGDHASDDALDHILQYMGGGDTKPALLNHNQHLAAAADATTTTTAACPAAATSAGLYGNNKFMKLPPLEHAGGWLPPSPGPCEYGASGIADWDALDRLAAYELNGLSDASKNMAAFFDGDLWSMARSVSALHAADLAMNNA

SEQ ID NO: 15717 - protein, 496 aa, Zea mays
  VARIANT 87..496: note = Derived polymorphism lacks residues 87 to 496
MDGQVRGTVIVEVAGKVASKVIDTIGKRQSVDEKLQRLEMLVIKLRGTVEVSERLGAETASLLQWRDKLTEAASEGSQVLLGFQQRRAADGDTAAAAAAAQGTDEEHQDGGGRPVVLVKNILLALDRGVRKAAAALLSYSGCAASYTRHTLVGMARGVRSATAALLSCSEGVVKLNSTVDRLEQACADIGQFISLHHAAEAQTSRANNGVVSTRTPESMERVVVDGNGKKDENNTKKINQRRGEPAPAVMRKGSLEEPAAAKSAAAQRLQDALVEISRTVAVADRQGLKNLEWLSDLADVLREDRRAGGEILGTGREIIAATQESAQQLRASDATGSEEEIEPGVNEKLQRLEMLVVKLRSTVEVSMRHGANKATSLLRWRDKLSEAASRGHRVLLNFKRRVMRAGTAATDATTDEGKSGCTVFFVRKALQGMARGVQKSSTATTTLLLAADEGGAVELNNSVSRLEKVCAEDVDDFIRLLQAETSSQVQKAMKQE

SEQ ID NO: 15718 - protein, 646 aa, Zea mays
  VARIANT 89..646: note = Derived polymorphism lacks residues 89 to 646
MAPPRPPTGPILFLPLVFLFLFTTAAASAAAPEDEKFTEELLLRPLPDRKALAHFHFRSSAPPAASVGRHHHLFPKAISQLVKKYHISELELSFTQGRWNYEQWGGFDPMSTNNAKPPGVELWAVFDLPLSEIDATWKNLTHTLSGLFCASINFLESSTAFSAPRWGFKLNEGNLRYGALPREAVCTENLTPWLKLLPCRDKAGIASLLYRPSIYKGYYHSQKLKLRSSQSLGIILDQTLTVVLQPNNVHGEQLHSNHGQLQPNWSMRHLFNRKLSGKCLVSKSSRVFIEVDKGIADEVNISGSVHSWSNEFFVLSNSPDKLIKGQNHLEMQSSFLYVYDASNYSEEQPLDLGITWKLPLIWTCTPSPFHASRFLMGSGNERGSIALSFMSTNLHKKISGSANDCSIKAVIFQVVPWYVKVYYHSLEIFIDGSRKTVSEVVDKIHVIPSEDKLLPGTLEMLLRFPCSMQSGTLTLDFDKGFLHIDEYPPDANQGFDIPSALVSFPEFSSARSYPEIDPVLGSPLLENFQEDSVVKSYTEVLLVPLTTPDFSMPYNVITFTCTVLALYFGSLLNALRRRIGEEERELKKRATRHGLISRLLAKLRGQKVDPSESGSSFESTGSKKLLFKVVFVAVAAVLFHYFSNNS

SEQ ID NO: 15719 - protein, 88 aa, Zea mays
  VARIANT 23: note = Ancestral polymorphism is P, Derived polymorphism is S
  VARIANT 24..88: note = Derived polymorphism lacks residues 24 to 88
  VARIANT 32: note = Ancestral polymorphism is S, Derived polymorphism is F
  VARIANT 57: note = Ancestral polymorphism is R, Derived polymorphism is G
MTWHKHKRTNIKGIKNYMLDKGSQFRLPKCCSQSSHHGQAKWTVCFSLVKSLIFICGTSVSSSSIHFGKGHLSSVYFAPSNSISFHFF

SEQ ID NO: 15720 - protein, 250 aa, Zea mays
  VARIANT 172: note = Ancestral polymorphism is I, Derived polymorphism is T
  VARIANT 171: note = Ancestral polymorphism is T, Derived polymorphism is I
  VARIANT 155: note = Ancestral polymorphism is I, Derived polymorphism is T
  VARIANT 91: note = Ancestral polymorphism is A, Derived polymorphism is S
MADYHFVYKDVEGASTEWDDIQRRLGNLPPKPEPFKPPPFAPKVDADEQPKSKEWLDVREPEELEELEDDLDDDRFLEKYRKMRLAELREAAKAARFGTILPITGSDFVREVSQAQSDVWVVVFLYKDGIPECGLLQNCLEELATRYPATKFVKIISTDCIPNYPDRNVPTILVYNNSAVKGTYVGLQKFGGKRCTPESVALALCQSDPVLNDGHGGSDSSRGNVFEGVRRKFIEKVVAQHEEREEEDSD

SEQ ID NO: 15721 - protein, 49 aa, Zea mays
  VARIANT 2: note = Ancestral polymorphism is D, Derived polymorphism is V
  VARIANT 5: note = Ancestral polymorphism is T, Derived polymorphism is I
  VARIANT 6: note = Ancestral polymorphism is A, Derived polymorphism is T
  VARIANT 7: note = Ancestral polymorphism is E, Derived polymorphism is K
  VARIANT 22: note = Ancestral polymorphism is R, Derived polymorphism is I
  VARIANT 27: note = Ancestral polymorphism is T, Derived polymorphism is A
  VARIANT 37..49: note = Derived polymorphism lacks residues 37 to 49
MDGLTAKDKSYALVLFESAINREVFLATIEHDVTEIWLKRKIKLLRSSV

SEQ ID NO: 15722 - protein, 174 aa, Zea mays
  VARIANT 47..174: note = Derived polymorphism lacks residues 47 to 174
  VARIANT 46: note = Ancestral polymorphism is Q, Derived polymorphism is R
  VARIANT 40: note = Ancestral polymorphism is D, Derived polymorphism is N
  VARIANT 27: note = Ancestral polymorphism is A, Derived polymorphism is V
  VARIANT 17: note = Ancestral polymorphism is F, Derived polymorphism is C
  VARIANT 11: note = Ancestral polymorphism is N, Derived polymorphism is K
  VARIANT 2..174: note = Derived polymorphism lacks residues 2 to 174
MRDKVIYSSPNFDPKVFLSWVHKDMSAADLEAGALTLKTDLKGRTQQKKLLVKENFDCFVSCKTTIDDIESKLRQIEEDPEGAGTAHLYSVTLKISGVANRCGIRSSQDLGDEQPRDNPLTVSCQQPHPRPVSSHTLSPTCGCPSTAKHPAPTVALSSVFFLLQQAFVLKLYCL

SEQ ID NO: 15723 - protein, 161 aa, Zea mays
  VARIANT 56: note = Ancestral polymorphism is R, Derived polymorphism is M
  VARIANT 53: note = Ancestral polymorphism is T, Derived polymorphism is I
  VARIANT 47: note = Ancestral polymorphism is G, Derived polymorphism is S
  VARIANT 46..161: note = Derived polymorphism lacks residues 46 to 161
  VARIANT 33: note = Ancestral polymorphism is V, Derived polymorphism is I
  VARIANT 29: note = Ancestral polymorphism is V, Derived polymorphism is L
  VARIANT 24: note = Ancestral polymorphism is E, Derived polymorphism is D
  VARIANT 21: note = Ancestral polymorphism is M, Derived polymorphism is L
  VARIANT 12: note = Ancestral polymorphism is F, Derived polymorphism is I
  VARIANT 11: note = Ancestral polymorphism is M, Derived polymorphism is I
  VARIANT 9: note = Ancestral polymorphism is T, Derived polymorphism is K
  VARIANT 7: note = Ancestral polymorphism is P, Derived polymorphism is L
MILPFQPLTMMFHKINYFVNMPKEFIEEVMALVELDQLRYALVGKQGSTGLSTEQRKCLTNFSNFVAYCSRLPELPYFFLAKELFCLLLNLNLGGILLQLSAYDTIKCFSKILVLHTRPFLSDTNIVSSNAGNFNLLEDRAFLLDFVFNYPCKGCVQVELS

SEQ ID NO: 15724 - protein, 665 aa, Zea mays
  VARIANT 369..665: note = Derived polymorphism lacks residues 369 to 665
  VARIANT 330: note = Ancestral polymorphism is G, Derived polymorphism is E
MGIGIDGASTTESSSICGVGVSAHGGDSVGKHDGGTGVAGGGDRRGHAWWRETSLLIGSCSKQKKMEMLALVLTLLLSLSAATGAAAETVKVTTTPVFSHIPRLQASKDFQVLVRVEAPPALQQHRRVPVDLAVVLDVGASTGAGTARLDAVKKAVKFIIRQIHDDDRLAVVGPSNYRLLPGFLNTRDARWNAEKSVDQLEPRGEFTSGAGLEEAIKILEELPATASRSSRARFVILVTDRAVAEGSSRLFNKLPRESLSLPPVHTLGLGAAHDPRELLHIARESQGTYSFVDDQNTDGITGAIAVCLSGLKNVVAVGARVRLEAPVGSGVTIERIQSGGYTYSRTRPITTRDDKTYVEVAVGAIYAGEVKSFLVHLSVPALLPSTSTVVADGCYRQQLLTASVVGHYTNSDEEHAAAPASPSPTVTQAILYVQRPPPEALDVACGGTLHRVPVPVVMNHIARFGVLEMVATFVDTDIGRHSTVTAEMATKLRVQWEKFVQARQFWSGLDLGVLDDEVSRMVNILEEAASRSGSSTSLSAATAYVLSWLSSYQMQRPTAMGSPGSVAAAFVTVNMQLTLLQVRNDFDRFDTLLPRAPPQSPICVDPMPPPLFEMSGRGDDTYRVVNTAYPPGVLALVQASNLRRCDAAGVEVPLRTPLSRAGAFA

SEQ ID NO: 15725 - protein, 551 aa, Zea mays
  VARIANT 163: note = Ancestral polymorphism is G, Derived polymorphism is R
  VARIANT 16..551: note = Derived polymorphism lacks residues 16 to 551
MAPILTMNHLRIHVPQATAAAETVRVITTPVFPHIPRLQASKDFQVLVRIEAPPAAQPHRRVPVDIAVVLDVGGSTGTGTGTGTGTTRLDAVKKAVKFIIRQIHDDDRLAVVGPSNYRLVTGFLNTHDARRNVEKSVDQLEPRGEFTSGSGAGLEEAIKILERLPTSASRSSRARFVILVTDTAVAESGSRFISKLPRDFMLPVHTFGLGAAHDPRALFYIASESHGTYSFVDDQNTDGITGAIAVCLSGLKDVVAVGTRVRVEAPVGSGVTIEGIQSGGYSRTRDDKTYGEVALGVLYAGEVKSFIVHLSVPALSSTSAVVAGGCDEQQLLTASFVGHYTASAAAPDPPSPMVTQAILYVQRPPPEAFDVASGGALQRVPVPVVLNHIARFDVLEMVATFVDTDIIWRLSSIVTSEVATKLRIQWDKFLQARQFWSGLDLGVLNAEVRKMVSILEAAGSSGSSTSQSTATAYMLSWLSSYQMQRPTAMGSPGSVASAFVTVNMQLTLQQTTIVPTAAPLCICHEISNFYILELVVSLACLFVFVLVVASG

SEQ ID NO: 15726 - protein, 342 aa, Zea mays
  VARIANT 5: note = Ancestral polymorphism is G, Derived polymorphism is S
  VARIANT 44..342: note = Derived polymorphism lacks residues 44 to 342
  VARIANT 109..342: note = Derived polymorphism lacks residues 109 to 342
  VARIANT 147: note = Ancestral polymorphism is S, Derived polymorphism is I
  VARIANT 279: note = Ancestral polymorphism is C, Derived polymorphism is Y
  VARIANT 307: note = Ancestral polymorphism is L, Derived polymorphism is P
MWSIGCIFAEILTGKPLFPGKNVVHQLDLMTDLLGTPSTDTISQIRNEKTRRYLSSMRRKQPIPFSEKFPNADHSALKLLQRLLAFDPKDRPTAEEKLTKEDVKELIFQEILQYHPQLLKDYKKGLKRRVFYIPVRAVDRFRRQFASLEENGERNVALDRKHVSLPRTTTVHSTPIPAKEGPAATSQVAQRIPAARPKRVYSPAIDMWSIGCIFAEILTRKPLFPGKNVVHQLDLMTDLLGTPSADTISQIRNEKARRYLSSMRRKQPIPVSDRCGCNCCNVHINWLILDATLQDKIGWLFAPLVLLQFILTGSVELVNMHKYNSYVLKGYNPVYTFRYLRR

SEQ ID NO: 15727 - protein, 630 aa, Zea mays
  VARIANT 11: note = Ancestral polymorphism is L, Derived polymorphism is R
METWLVLTALLLSLSLVYFFLPFISCPWIDGTYGDDESSTHTHVPQAAAAGTETVKVITTPVFPHIPRLQASKDFQVLVRVEAPPALQQHRRVPVDLAVVLDVGASTGTGTGVPRLDAVKKAVKFIISQVHDNDRLAVVGPSNYRLVTGFKDTYDARHNAQKSVEQLQHRGEFTSGAGLEEAIKILEELPATASRSSRARFVILVTDRAVAEGSSRFSKLPRESLPPVHTFGLGEAHDPRELLHIARESQGTYSFVDDQNTDGITGAIAVCLSGLKNVVAVGARVRLETPVGSGVTIERIQSGGYTYSRTRPITTRDDKTYVEVALGALYAGEVKSFLVHLSVPALLASTSTVVADGCYRQQLLTASLVGHYTTSDEEYAAAPASPSPTVTQAILYVQRPPPEALDVFCGGALQTVPVPVVMNHIARFGVLEMVATFVDTDIGRHSTVTAEVATKLRAQWEKFVQARQFWSGLDLGVLEDEVSWMVNILEKAASRSGSSAATAYMLSWLSSYQMQRPTAMGSPDSVAAAFVTVNMQLTLLEVRKGIVTLPPPQPPIVCVDPLPPPLFKPSGRNDDTYRVVNTAYPPSVLVDAINEAMKQMHLALVQASKLQRCDGAGVDAMMPRAAGAFA

SEQ ID NO: 15728 - protein, 499 aa, Zea mays
  VARIANT 96: note = Ancestral polymorphism is W, Derived polymorphism is C
  VARIANT 78: note = Ancestral polymorphism is V, Derived polymorphism is G
  VARIANT 25: note = Ancestral polymorphism is F, Derived polymorphism is S
METVFKWRARTGGGVSLIHLLVRCFAVSAAILLLADGRHADAVDPAAPVEIQQTGSSSEVADEQQWRMVRTRGNQFVVGDDDDHRPFYVNGFNTYWLMILAVDPSTRGKVTEVFQQAAAAGLTVCRTWAFNDGGWRALQKSPSVYDQDVFKALDFVVSEARKYRIRLILSLINNWDSYGGKAQYVKWAGDDAAADGGRLNITASVDDDFFSDQTVKVYFKNHVKNMLTRVNTYTSVMYKDDPTIFAWELMNEPRCTSDPAGNKLQVRVRVDPRDGVPCEVHRPGPPAGSWRLGAEGFYGPSSPSRLPANPNAYAGQVGTDFIRNHRVLGVDFASVHIYPDTWMPGATLEARLWFVDSWMEAHIADADGTLGMPVVFTEFGASTTKARSGCFNATTRDQFIQAVYARLLNSTRRGGAGAGALLWQMLPLGTDYMDDGYGVVLPRAAATARIISAHSRDLAIFNSRCAWSCRWGCRRRGHKSEDPDVDDDLPLVEDKQREA

SEQ ID NO: 15729 - protein, 67 aa, Zea mays
  VARIANT 8: note = Ancestral polymorphism is M, Derived polymorphism is I
  VARIANT 30: note = Ancestral polymorphism is L, Derived polymorphism is R
MAAIKARILRCSEAKADHHNQGRRFKRGYLAPGCGAVDSAVFYLACLVCTPPRPSSSAVSIILASRN

SEQ ID NO: 15730 - protein, 288 aa, Zea mays
  VARIANT 78: note = Ancestral polymorphism is Y, Derived polymorphism is H
  VARIANT 54: note = Ancestral polymorphism is Q, Derived polymorphism is E
  VARIANT 27: note = Ancestral polymorphism is L, Derived polymorphism is F
MVNTFFLFCGCVDQASVAVVEKWGRFLRLADPGLHFFNPLAGECVAGSLTTRVQSLDVRVETKTKDNVFVQLICTIQYRVVKENADDAFYELQNPQQQIQAYVFDVVRAIVPRMNLDDLFEQKNDVAKAVLEELEKVMADYGYSIEHILMVDIIPDAAVRKAMNDINAAQRLQLASVYKGEAEKILMVKKAEAEAEAKYLSGVGIAKQRQAITDGLRENILNFSHSVSGTSAKEVMDLIMVTQYFDTIKELGDGSKNTTIFIPHGPGHVKDISEQIRDGMMQASSSNV

SEQ ID NO: 15731 - protein, 171 aa, Zea mays
  VARIANT 153: note = Ancestral polymorphism is T, Derived polymorphism is M
  VARIANT 128: note = Ancestral polymorphism is S, Derived polymorphism is N
  VARIANT 108..171: note = Derived polymorphism lacks residues 108 to 171
  VARIANT 90..171: note = Derived polymorphism lacks residues 90 to 171
  VARIANT 41: note = Ancestral polymorphism is V, Derived polymorphism is F
MGFSFLYHYVFMCTSREYNFLHVGDEMLQSKSLDRDSYVFVRFYCPLTECFALLVDDPEHGEALITNVEVTNVEVTNVECPHCCRMFCAQCKVPWHTGVTCAEFKFQRPRKDEQDREDLLPRKVKQESKWQRCPECKIYVERIGDCVFIIYRTLLASRSEEYMLLFWLPLD

SEQ ID NO: 15732 - protein, 225 aa, Zea mays
  VARIANT 23: note = Ancestral polymorphism is V, Derived polymorphism is A
  VARIANT 78: note = Ancestral polymorphism is A, Derived polymorphism is G
  VARIANT 180: note = Ancestral polymorphism is P, Derived polymorphism is L
  VARIANT 199: note = Ancestral polymorphism is R, Derived polymorphism is W
MSGGTPAASSSLRAALSYCVRQVRAYDYHHYLCLLHLAPAMRKAAFTFRAFNIETARAMDVVSDPRTCLMRLLWWKEAVDKVFGNKLVEHPVAQALSSVIADHKVSKHWLKRSVEARINDANREEGTIPGTSAELERAGKRLPDAVFKVASVAEAHLHKARELASSVPKEAIPVLLPALPAQVLLDTLRRCEFNVFDPRLSRGVHGVSPLWYQLKLNWNAWRSRY

SEQ ID NO: 15733 - protein, 404 aa, Zea mays
  VARIANT 298..404: note = Derived polymorphism lacks residues 298 to 404
  VARIANT 292..404: note = Derived polymorphism lacks residues 292 to 404
  VARIANT 186..404: note = Derived polymorphism lacks residues 186 to 404
  VARIANT 43..404: note = Derived polymorphism lacks residues 43 to 404
MVLCMFSAVPCFGNFIKLLTKSAHIFSLHFSLGRTKLVGPVVKLLLLIAATAVLIIWLIIGIPGSIFAGLVYGFLAPIMATFDVVGEGKEKPFVHCFVDGTWSTITGSCTVVRDVKDLFFHSYFSLMDDLRLQKPPDGEPSKVCILLLDIPGALIAAAFEFLLDGIMFTLIAFYKCPVMLFKGWKRLIQDMIGREGPFLETACVPFASLAILLWPFAVVGAVLASVLSSVPLGAYAAVVAYQESSLILGIAYVFSAVSIFDEYTNYVLDMAPDLNIGRAKMSLHTDTVSIIQTSLIQQGEARRERPLSRVTSFKNNIDDFNPFKLQGITKSISRYPTSKSRFDVLVKALLSELERTMGQSGNGSQSQAHRLQNSVAWMLSQKSMGKTANIREKRKRRNYLWRMI

SEQ ID NO: 15734 - protein, 242 aa, Zea mays
  VARIANT 100..242: note = Derived polymorphism lacks residues 100 to 242
  VARIANT 90: note = Ancestral polymorphism is R, Derived polymorphism is W
  VARIANT 54..242: note = Derived polymorphism lacks residues 54 to 242
  VARIANT 31: note = Ancestral polymorphism is P, Derived polymorphism is L
  VARIANT 8: note = Ancestral polymorphism is P, Derived polymorphism is S
  VARIANT 5: note = Ancestral polymorphism is L, Derived polymorphism is F
MAGRLDSPLHLTAYLLNPHYSYADPSIFDVPKITEGFINCVETFYYHDDEMQEQAANIELQKFQNREGPFSKKLARTFENFDYNPASWWRLYGTETPALQKMATKILSLTASSSGCERNWSGFDGVHTKKRNRLTTDRLNKLVYIQFNNRLINKRAKIKSKKITDVLLSSGTTEAQGFQSPDFTSPVHSQFQSRVPDTRESSSSKFRTSPTADPDLSSTVQTLQKSRFFRRHEFIFWRYSFV

SEQ ID NO: 15735 - protein, 221 aa, Zea mays
  VARIANT 3..221: note = Derived polymorphism lacks residues 3 to 221
MQWRIKSSSHLLVNNSNNILETVLNIAIICESVNNRLTEERSRGGGTYRPSLPGKNQGSSLSLSAKNRGEEKQAAGQRMCSRAESAKNRREEASKQGASLASKQAGASRQGSSLAAGASLAAGASLAAAGASLAPDREGSREGVSGDRAIRLFPSRAICLSLPRRSLIPSRARSISLPRAFPLARYFSPAVPRVPARARAPSLASATTWHLGDEESPRNPR

SEQ ID NO: 15736 - protein, 349 aa, Zea mays
  VARIANT 1: note = Ancestral polymorphism is M, Derived polymorphism is L
MVQKIPLYQHIANLAGNKTLVLPVPAFNVINGGSHAGNKLAMQEFMILPTGASFKEAMKMGVEVYHHLKEYAAGTLMFLYAEHNQEELKKYGQDATNVGDEGGFAPNIQENKKGLELLKAAIEKAGYTGKVFIGMDVAASEFFSEKDKTYDLNFKEENNDGSNKISGDSLKDLYKSFVSEYPIVSIEDPFDQDDWTTYAKLTGEIGQQVQIVGDDLLVTNPTRVAKAINEKTCNALLLKVNQIGSVTESIEAVRMSKRAGWGVMASHRSGETEDTFISDLSVGLATGQIKTGAPCRSERLAKYNQLRLGSRKSSVLPQSTPERSSEHQWSPTEPRVPRAWRKKMRMFPH

SEQ ID NO: 15737 - protein, 994 aa, Zea mays
  VARIANT 57..994: note = Derived polymorphism lacks residues 57 to 994
MPRSCHPKSSTSLATMAQANGSSAAISNLENTDTVLNNNAADNKGPKTRVLTKQKCQGGVCSMPPGEEGSTHGNIADGDAPRRRQRRRRIFRRSTERKNPENLEFERQVAAFEARQEQQRQDQMTDAFIGSLSFKVYFPHLKILSDDVQDGDSTQPAGKGRLLKDSAKPPDDTDFLEGTFIKINSDKQKATRNKKSGKNNKKKKKGKSKGKGKGRKQSHASEMQTGSPTQQPSSTCANATGGETSASSSSRVAVRVPLLEYSSSSSSCRVTAKLVITSAVNSASSGNEKELSASSSSDDFKSFESTTSYTTAASRSSANDYYTGGNAWNCTMGDYAGSLSDARSEPSLSASDYSTDSRGFRRKTTSGEGNRPNVHHQSFSLLAVGPGCSQEALLCSGYSSNGGDFQEVVSRKAAQKMKRMQRSTPATTSSSTMAASGPIVARAHFPRAPFREVITIGHYINDDTFYARKPNQKKGKYQKARSFSNMSSKTGYTTDHGDNVSAGSNRMLLITTVHQAKPRSGHHVTLEAIEETSSPSCLPNPKAGELKAMAPVGDGIIKDTDSKTPSSSDKLSSLLGHLDNSSCVDSREGQKKAMAAPVDGDTEDARAPPSSDKTSSLDNLDNPSYVGKEEQEEVVAPVGVGTEADRDSTAPTSDKTSLLGYMVNSSCVDRDEEQQNKAKFSTDASSSELDKIIEAVNNAYGVQQAASDVYMISAGIHADIENFLHAATPVIGQTSCTKGNMSLQDLRLWNVWSWYEEPECCGIEVQMQGKTNSSWPELSTYFVPLLSAVQLFGQPAGKSQSHGSGLVFEYFESENPFSRPPIFTKIKQLRHGVNLSAGNPIFGDPKQLESVKLSDLHPASWFCVAWYPICQIPAAAGSCQASFLTYHSLGKLVPQICSTDNKADAYDRMICPIVGLLAYKDQGEKWFQLREQQLRIKPRPPSGTDHAELLNKRLRALRQCASIMSKAVVPRAPSGEAMNYHSDYEFFLSRSSLQ

SEQ ID NO: 15738 - protein, 280 aa, Zea mays
  VARIANT 124: note = Ancestral polymorphism is A, Derived polymorphism is G
MAVLVAVTLLSVDASRFYADGMETRHPRYLYPEKKRSDNYATATSRGGRRLAPVPGAGGPPPAGPPRGVQPSKNKPKPPVIITRDSASALRAHVLEVAAGCDVVGSVAAFARRRQVGVCVLSGAGSVANVRIRNQPGAVVTTTLAGRFEVLSLCGSFLPPLAATGLTVYLSAGQGQVVGGAVAGPLVASGPVVIVAACFGNAAFDRLPLEDDEPLPQPQQNQHLQPHPQQGPGCVLPGAAGGLQPSSPPLPLPGQHPLADQLPHTLMNGLPLPADAYGWC

SEQ ID NO: 15739 - protein, 377 aa, Zea mays
  VARIANT 67: note = Ancestral polymorphism is S, Derived polymorphism is A
  VARIANT 257: note = Ancestral polymorphism is R, Derived polymorphism is S
MAHSNGAAATATAGGGDMDDETAPVPRALAPARKVALITGITGQDGSYLTELLLSKGYEVHGLIRRSSNFNTQRLDHIYHDPHAVPSAPRPPMRLHYADLSDSSSLRRALDAISPDEVYNLAAQSHVAVSFEIPDYTADVTATGALRLLEAVRLSRKPMRYYQAGSSEMFGSTPPPQREDTPFHPRSPYAAAKVAAHWYTVNYREAYGVFACNGVLFNHESPRRGENFVTRKITRAVGRIKVGLQTRVFLGNLSAARDWGFAGDYVEAMWLMLQQEQPGDYVVATEESHTVEEFLQAAFGYAGLSWKDHVVIDKKYFRPAEVDSLKGDATKARKVLKWKPKVGFQELVEMMVDHDIELAKKEKVLVDAGYRDPKQQP

SEQ ID NO: 15740 - protein, 365 aa, Zea mays
  VARIANT 53: note = Ancestral polymorphism is G, Derived polymorphism is C
  VARIANT 254: note = Ancestral polymorphism is R, Derived polymorphism is P
  VARIANT 327: note = Ancestral polymorphism is A, Derived polymorphism is P
  VARIANT 330..365: note = Derived polymorphism lacks residues 330 to 365
MTPANGAPARAAEAGPHEVESEADAFRRQVDDLVSKTDVLERRVKEVADFYDGKKHGSGGRKGGGGGRYGASSRGMPDLMRQFGVLLKEVTLSVLAWFVLFCWVAKHAITSHKDAWPFLEPVDVVTLQLPDYHNIITQPMDFSTIQKKMERKDGTCYTNVREICSDVRLIFANAMKYNDDQNVIHLMAKSLLEKFEEKWLHFLPKVESEEKRQKEEESKGVAATNTSREVAIVKLAKDTDDELNQINKKLEELRKMVVHRCRKMTTDEKRKLGAGICHLSPDDLSKALEIVAQDNPSFQTKAEEVDLDMDAQSETTLWRLKFFVREALERQANVASGKMDENAKRKREICNALAKTTSRRIKKQP

SEQ ID NO: 15741 - protein, 271 aa, Zea mays
  VARIANT 226: note = Ancestral polymorphism is M, Derived polymorphism is T
  VARIANT 221: note = Ancestral polymorphism is M, Derived polymorphism is T
  VARIANT 204: note = Ancestral polymorphism is V, Derived polymorphism is L
MENRHSPAAPPNAKGGSGSGCPENKDVAAPNLSSAAEEVAATVATSDDDGLCKGNKNVAADSKKLKPHIVAERKRRDRMRDYFGELLALIPQIPAKSDKGTIVGHAVDYIQSLEKTKAMLEKRKQELAHARQAAAAAEGAASSSSAPPQSVRAMAAVSSDIPQPQLLQLPLSIAVPAPPPQVPTAARRQVGFQTWSWPNLVLNVSDDKAYISVCAPRHLGMQNMVTVLSVLNKHGIDVATAQVDSDAVRSMFNIYAHVSSLLSAMVFLNGS

SEQ ID NO: 15742 - protein, 258 aa, Zea mays
  VARIANT 48..258: note = Derived polymorphism lacks residues 48 to 258
  VARIANT 64: note = Ancestral polymorphism is S, Derived polymorphism is Y
  VARIANT 80: note = Ancestral polymorphism is A, Derived polymorphism is T
  VARIANT 81: note = Ancestral polymorphism is H, Derived polymorphism is R
  VARIANT 107: note = Ancestral polymorphism is A, Derived polymorphism is G
  VARIANT 113: note = Ancestral polymorphism is T, Derived polymorphism is M
  VARIANT 135: note = Ancestral polymorphism is N, Derived polymorphism is Y
MRKGPREGSFVFDPRKTRECLVKWCISAEVTFNKFDDPLFAPWMMRQELRNELQSLNSRICLTSDLWTSNKKLGYLCLTAHYIDANFILIKKTIAFKDVKYPHTGLAIEEVITKCLIEWGIKEKVFTIILDNASNNQSSCDLLRESGHSDMLFGGEHLHVRCCAHILNLLVQDGMAIAHGTIDKIHDLVRHIISSPSHIQAFNEIAERSGLPSKAGLILDVPNRWNSTHNMIMVAIEYKVVLKRYAEEQLEHSPEDEE

SEQ ID NO: 15743 - protein, 625 aa, Zea mays
  VARIANT 216: note = Ancestral polymorphism is S, Derived polymorphism is I
MAAGVLFIILGFLLVLPSATAIGQVCGNAGNYTANSTYQSNLASLAAALPANTSTSPQLFATATAGQSPDAVYALALCRGDTASSSNLTGCAACVKNSFAYAQRTCPHAKAASVYDDDCLLGFSSSDILIPANNMSTLFQYWNPASIPGGDASMVSADVKDLLTQTARAAASSPRRFATAFMDASGSSIPTLYSLAQCTPDLSAGDCLACLQRLVSLLNATTSVRLGGRVLVLRCNFRFENMMFYDGAPTTRVTTPSSSGPPAPPFPAPTTTDKRAAGTKPWVVAVSVLCSTSSSGSSSTLLRLVLPLAKQKVHKSSRGGDEVDWEMEAHLSEFWVFDLHQILEATDNFSEENKLGEGGFGPVYKGQLPEGVEIAVKRLASHSGQGFVEFKNEVQLIAKLQHRNLVRHLGCCSQEEEKILVYEYLPNKSLDLFIFADEDRRSLLDWNNRLAIIEGTAEGLLYLHKHSRLRVIHRDLKPSNILLDSEMNPKISDFGLAKIFSSNDVSSEGGTTTRRVVGTYGYMAPEYASEGLFSVKSDVFSFGVLVLEIISGKRNSGIHECGDFINILGYENAADRPTMLDVVAMLSTKTKVLDKPNHPAYFNVRVGNEEASTTATTMSCSVSMR

SEQ ID NO: 15744 - protein, 119 aa, Zea mays
  VARIANT 77: note = Ancestral polymorphism is R, Derived polymorphism is Q
  VARIANT 68: note = Ancestral polymorphism is P, Derived polymorphism is L
MEYRHSPAAPPNAKGGSGSGCCPENKDVAAPNLSSAAEEVSATVATSDDDGLCKGNKNVAAASKKLKPHIVAERKRRDRMRDYFGELLALMPQIPAKVIEDSHSKLGLGIDIQSLTCAW

SEQ ID NO: 15745 - protein, 113 aa, Zea mays
  VARIANT 14..113: note = Derived polymorphism lacks residues 14 to 113
MEANPNHCLCRLASALSHGPRLPTPPPPLLFPRLALSSSVPSTGPPPSLDAVRKGEGEEAAEARASEADAEAGKEEEHEDDGGAHVNKATCEVGSVSNAQQLPAMVLSDIKNK

SEQ ID NO: 15746 - protein, 122 aa, Zea mays
  VARIANT 7..122: note = Derived polymorphism lacks residues 7 to 122
  VARIANT 8..122: note = Derived polymorphism lacks residues 8 to 122
  VARIANT 14: note = Ancestral polymorphism is Y, Derived polymorphism is H
  VARIANT 30: note = Ancestral polymorphism is D, Derived polymorphism is H
  VARIANT 36: note = Ancestral polymorphism is E, Derived polymorphism is Q
  VARIANT 38: note = Ancestral polymorphism is S, Derived polymorphism is C
  VARIANT 62: note = Ancestral polymorphism is W, Derived polymorphism is C
  VARIANT 65: note = Ancestral polymorphism is M, Derived polymorphism is I
  VARIANT 73: note = Ancestral polymorphism is N, Derived polymorphism is S
MQWGKKEWWFYKRYCVQCFFMFSLVKQRADWNPDLERSLVNILHEFEDSGYRGDNGWNSEGWNRMVKEFHVRNKYVSFTKAQIQDKEGHLAEGTWSCTSLEAPQDEELNEQLQDAEDGLQGF

SEQ ID NO: 15747 - protein, 299 aa, Zea mays
  VARIANT 149: note = Ancestral polymorphism is A, Derived polymorphism is V
MARGGIARLLATLLLFLLLATPLADGASEAEAGLAQGASEAAAPDAGADAQQQHLLPRPLVIELPSSRAEDEDEPGADAVPPDVRCASWRLAAEANNLAPWRAVPPECAPHVRDYVTGVAYRSDLDLVARESAAYARAAAPLGADGRDAWVFDVDETLLSNLPYYAEHGYGAELFDHHKFDEWVERGEAAAIPSSLKLYNEVRELGFKTFLLTGRSEGHRGVTVDNLNKQGFHDWEKLVLRAAGDRKKTATVYKSEKRKEMEQEGYRILGNSGDQWSDLLGSSMGARSFKLPNPMYYIP

SEQ ID NO: 15748 - protein, 248 aa, Zea mays
  VARIANT 87: note = Ancestral polymorphism is R, Derived polymorphism is H
MDVSHAGSSVAGEAPTTGEHRMGTTIVGVCYEGGVVLGADSRTSTGMYVANRASDKITQLTDNVYVCRSGSVSAIAADTQVISDYVRYFLHQHTIQLGQPATVKVAANLIRLLAYQNKNMLQAGMIVGGWDKYEGGQIFSVPLGGTILKQPFAIGGSGSSYLYALLDHEWKEGMSQEEAEKFVVKVVSLAMARDGASGGVVRTVTINADGVKRNFYPGDKLPLWHDELEPQNSLLDILAAGNPDPMVQ

SEQ ID NO: 15749 - protein, 358 aa, Zea mays
  VARIANT 329: note = Ancestral polymorphism is R, Derived polymorphism is W
  VARIANT 309: note = Ancestral polymorphism is T, Derived polymorphism is A
  VARIANT 304: note = Ancestral polymorphism is R, Derived polymorphism is C
MEASVAAAGGGGGSAATRSSPAAVQATNDDAAASKLSCVNKGYMKDDYVRFFVRRPTRRAPIINRGYYARWSVLRTLLHQFLNAGKNSNNDKPKQILSLGAGFDTTFFQLQDEGMAPHCYVELDFKEVTSKKAAIINHYSEMKEKLGSEASISIACAITYPSISEKGEVISTHYKLFSADIRDIPKLDSVIRMAEMDPSLPTFIIAECVLIYLDPTATGAIVSWASQKFSTAVFFLYEQIHPDDAFGEQMIRNLESRGCPLLGINATPTLSHKEKLFLGNGWQRAVAWDMLKIYNDFIDSQERRSLCYAAPFHDVTADKAARNGCRIERLELFDEFEEWYMMQEHYCVAYGINDAEVI

SEQ ID NO: 15750 - protein, 586 aa, Zea mays
  VARIANT 363..586: note = Derived polymorphism lacks residues 363 to 586
  VARIANT 327..586: note = Derived polymorphism lacks residues 327 to 586
  VARIANT 162..586: note = Derived polymorphism lacks residues 162 to 586
  VARIANT 40: note = Ancestral polymorphism is E, Derived polymorphism is K
MGPTSDTISLDHGYKTARSRSRKPPGHIVMSARKYPSGSEKRKRKKRTDEFIETQRRAMDKFFSSNSTTSKNQNEMAIVSIEEQPGNNPEDQGFTPEENIDTDRNDNNVSDHEPMVNSPPTENASVDEQPVFTEDIYDPRNWDNLDNKSRDILVEKGPIRDENIEFPLDTNGRHFSYTHYSRKMSNGEVYYRKWLVYSKRVDRVFCFSCKLFNTENCKSSLGHEGFRDWRHINERLKEHEGSIQHIISMNSWNELRVRLVNKVSKQLQSSSMCIDATLMRIEDTVNYFQNYRNNGFASSLIIAKEIASELGVEPSFPVKRHAKRKKQYDETDCEEADLEAEKAFEVNYFLVMVDIAISSLKSRFEELQSFKDIFGFLMDSITLKVKYHLASIGGFNVTKCKKVLAPVKQEMEALLTKKTGENEQRKKEKQRERDEIDLDKSDGSNEEDNEHENDVIVLKSTRVSNNSSSSRPSTNGGSGTIDNFYKPQSVEESAHKNKIQTKLSTQKREDRRDRACEYICQFLYEAGIAHNTVTLPSFGHMLEAIGAFGRGLRGPSAYEMSGPFLKRAKQKVLDRFKNHQESWQLT

SEQ ID NO: 15751 - protein, 142 aa, Zea mays
  VARIANT 23: note = Ancestral polymorphism is P, Derived polymorphism is L
  VARIANT 7: note = Ancestral polymorphism is R, Derived polymorphism is W
MRGGASRRSPNWRRAAAPYRPMPGATYRRLLVVAPLSPPAAPPGPCQAPAASLPEPPRRAFHCSTAPLGFRSTPASWAGPCPREGEGEAVDTGAEKGLEIARLGTSPRIVEKLAARGITRLFPIQVLPPSWRLQFFGSDFGS

SEQ ID NO: 15752 - protein, 261 aa, Zea mays
  VARIANT 79: note = Ancestral polymorphism is G, Derived polymorphism is W
  VARIANT 109: note = Ancestral polymorphism is Q, Derived polymorphism is H
  VARIANT 134: note = Ancestral polymorphism is R, Derived polymorphism is G
  VARIANT 136: note = Ancestral polymorphism is K, Derived polymorphism is N
  VARIANT 146: note = Ancestral polymorphism is Y, Derived polymorphism is H
  VARIANT 150: note = Ancestral polymorphism is W, Derived polymorphism is G
  VARIANT 168: note = Ancestral polymorphism is L, Derived polymorphism is I
MAPQSLDLGLSLGLGVAAFQPSFCHPAGNDAAEREASPTADERERRCSPAGSPTSSGSGKRVAAERSAGSGSGDEDDDGGARKKLRLSKDQAAVLEECFKTHHTLTPKQKAALASRLGLRARQVEVWFQNRRARTKLKQTEVDCEYLRRWCEQLAEENRRLGKEVAELRALSAAPAPAAPLTALTMCLSCRRVSSSSCSSSPPNTHAHAAAAGTGRSVAAAAATTLPAHRQFLCGFRDGGAAAAAVYGTSSALAKALRAAR

SEQ ID NO: 15753 - protein, 142 aa, Zea mays
  VARIANT 26: note = Ancestral polymorphism is T, Derived polymorphism is M
  VARIANT 37: note = Ancestral polymorphism is G, Derived polymorphism is S
  VARIANT 39: note = Ancestral polymorphism is A, Derived polymorphism is V
  VARIANT 44: note = Ancestral polymorphism is T, Derived polymorphism is I
MLGSPKVFFASSTSRRSRSLRRLLSMPAFSAACLLFGLAGFLATVLALSRSPSVTHSRCPDSSRPLSVSIAWDRSPGDGSASGSAELPASLATGSRGRHKVMAFVGIFTGFGSIGRRRALRQTWLPADRQGLLRAVAGITAC

SEQ ID NO: 15754 - protein, 155 aa, Zea mays
  VARIANT 58: note = Ancestral polymorphism is V, Derived polymorphism is I
  VARIANT 97: note = Ancestral polymorphism is G, Derived polymorphism is R
MGALWWSYQHLDKQVRRCFSYCSIFPRRHWLDPEYLVRLWVAEGFVTSHNTGEELEAVGRGYFDELVSASFLQPVDGDKERYTIHDLLHDLVSKVARSECFRADNGWEGEFPQDVRHLWVENCKLDLIGHKIPVQVHLGFRNVWVEVPCTCYRGT

SEQ ID NO: 15755 - protein, 496 aa, Zea mays
  VARIANT 336: note = Ancestral polymorphism is N, Derived polymorphism is I
MKSNRNLSRAEGKRLGNVALIAFMLGSLLLLSLARAKFSPIGKTGDTIKAEEQQAMAKASGEMATAHDAAAEEEEEETRSKPTDSDISGAAIAVGDDHAERARRPVCYESSRRSDTCEAAGDVRVVGRAQTVLVGALDREWKVKPYCRKHDAFALSHVKEWTLRPLVGGSDGDEAPRCTVNSSATAFVLSTGGFTGNLFHDYTDVLIPAFITARRYGGDVQLLVSSHKPWWAAKYMPVLQQLSRHELVDADADGEVRCYPRVVVGPTFHRELGVGAETKAPGGEEEGVSMPEFRAMLRRALGLERAAAAPSGDRWDVRRRPRLLIISRRQSRRLLNERAMADMATSLGFDVRVGDPEASTDVARFARLVNSADVMVGVHGDGLTNMVFLPAGAVLVQVVPYGGLEWLARGMFRDPAAGMQVHYLEYVVRAGETTLSEEYGEDDPVIRDPAAVHRKGWDALKAVYLDKQDVRPHLGRLRNTLLQALKLLPHGRQSTD

SEQ ID NO: 15756 - protein, 160 aa, Zea mays
  VARIANT 41: note = Ancestral polymorphism is N, Derived polymorphism is D
MQSPPPASPASHLLPPSALLRATKLALSRDRIRITMPSTVNSASLDQNLELAKQCSREAALAGFKAAAVATVASAVPTVSVLHLSQHLVSVRMLPWAKANINPAGQALIVSTVAGMAYFIAADKKILSLARQHSYENAPEHLKDTSFQGTGRPHPGFFRP

SEQ ID NO: 15757 - protein, 364 aa, Zea mays
  VARIANT 73..364: note = Derived polymorphism lacks residues 73 to 364
  VARIANT 76..364: note = Derived polymorphism lacks residues 76 to 364
  VARIANT 131..364: note = Derived polymorphism lacks residues 131 to 364
  VARIANT 155: note = Ancestral polymorphism is W, Derived polymorphism is L
MMRSQLWMHHLKLWMEKSVNQNLSQVSQHLMNGLISVIILLRGCIIDIELGLITKDMNQSESSSVARGRGKNKRIWTYYEDEELIKSLYEISLDPKWKSEGGFKNGYCFVLENELKARLPGCGLSAIPHIESRVRHFRTKYGAIEAMLAKSGFNWDDNRKMVQCEKQQYEAHCKDNPDAKGLYGIAFPHFDTLAAIYGKDIATGEGAEGLGEAVTNMENEIAMGEDCPVVEEDMVSMDTPQRSMDNRNSDHSTSSSSKRRKKHKDNMSSDPFLDLASGIRGNLNKASQHFGRMAEVMEMEAKKDQMQELQEKSVVELTRLGFGGSELLKAVAVFVKVPNQTMMLFALPETLRREFILNMIAGNN

SEQ ID NO: 15758 - protein, 377 aa, Zea mays
  VARIANT 40..377: note = Derived polymorphism lacks residues 40 to 377
  VARIANT 85..377: note = Derived polymorphism lacks residues 85 to 377
MASLPNGGGAAASGSCGARPVDKEVDFANYFCTYAYLYHQKEMLCDRVRMDAYHSAVFRNAPHFQGKVVLDVGTGSGILAIWSAQAGARKVYAVEATNMAEHARELARANGVTDIVEVIQGTVEDVDLPEKVDVIISEWMGYFLLRESMFDSVICARDRWLKPDGVMYPSHARMWLAPIRTGLGDKKREDFDIAMDDWSLFVQDTQTYYGVNMNALTKAYRAEHEKYYLKSSIWNNLHPNQVIGQPAAIKEIDCLTATVDEIREVRAQVTLPIRMEARLSALAGWFDVHFRGSAQNPGVEEVELTTAPDEHGGTHWGQQVFLLTPPLSVTKGDNVNVSFSMVRSKENHRLMDMEFTYELHELSGRKHPAVKTKMYLE

SEQ ID NO: 15759 - protein, 442 aa, Zea mays
  VARIANT 361: note = Ancestral polymorphism is P, Derived polymorphism is L
  VARIANT 357: note = Ancestral polymorphism is T, Derived polymorphism is I
  VARIANT 339: note = Ancestral polymorphism is G, Derived polymorphism is R
  VARIANT 331: note = Ancestral polymorphism is W, Derived polymorphism is R
  VARIANT 329: note = Ancestral polymorphism is A, Derived polymorphism is S
  VARIANT 301: note = Ancestral polymorphism is P, Derived polymorphism is S
  VARIANT 292: note = Ancestral polymorphism is W, Derived polymorphism is C
  VARIANT 291: note = Ancestral polymorphism is M, Derived polymorphism is K
  VARIANT 282: note = Ancestral polymorphism is A, Derived polymorphism is T
  VARIANT 274: note = Ancestral polymorphism is M, Derived polymorphism is I
  VARIANT 273: note = Ancestral polymorphism is H, Derived polymorphism is Y
  VARIANT 272..442: note = Derived polymorphism lacks residues 272 to 442
  VARIANT 255: note = Ancestral polymorphism is A, Derived polymorphism is T
  VARIANT 248: note = Ancestral polymorphism is P, Derived polymorphism is S
  VARIANT 247: note = Ancestral polymorphism is M, Derived polymorphism is V
  VARIANT 245: note = Ancestral polymorphism is G, Derived polymorphism is E
  VARIANT 240: note = Ancestral polymorphism is T, Derived polymorphism is I
  VARIANT 238: note = Ancestral polymorphism is H, Derived polymorphism is Y
  VARIANT 207..442: note = Derived polymorphism lacks residues 207 to 442
  VARIANT 202: note = Ancestral polymorphism is N, Derived polymorphism is K
  VARIANT 192..442: note = Derived polymorphism lacks residues 192 to 442
  VARIANT 190: note = Ancestral polymorphism is D, Derived polymorphism is N
  VARIANT 177: note = Ancestral polymorphism is K, Derived polymorphism is N
  VARIANT 160: note = Ancestral polymorphism is P, Derived polymorphism is S
  VARIANT 118: note = Ancestral polymorphism is G, Derived polymorphism is R
  VARIANT 76..442: note = Derived polymorphism lacks residues 76 to 442
  VARIANT 50..442: note = Derived polymorphism lacks residues 50 to 442
MASKVFGVTKGSSGESKDTWWWTEDVQKAIKENKECYRSLFHDRSAVNIEMYKVAKKTAKRVVSEAKGRAYDDLYRKLSTKEEEKDVYKIARIRERKTRDLNQVKCIKDEMDQLLVKGQDIKKRWHGYFENLFNGSKNQKSKKALKRMKGGKAMGTDGIPIEVWKCLGDIAIVWLTKFFNHIFRSNRMPDEWRSTLVPIFKNKGDIQSCTNYRGIKLMSHTMKLWERVIEHRLRGMTHIIMNQFGFMSRRSTMETIFLIRQVMERYKEQKDLHIIFIDLEKTYDNIPRNLMWWALDKHKVSTKYVMLIKDMYNKRDSDIDEDVSHRIKAGWMKWRQASGVLCDKRVPQKLKGKFYRTAIRLAMLYGHECWPTKRQYIQQLSVAEIRMLRWICGHTRLDRVRNDDIHDRLGVAPIEEKLIQRRLRWFGHVHRRPQRHQCIVAS

SEQ ID NO: 15760 - protein, 284 aa, Zea mays
  VARIANT 37..284: note = Derived polymorphism lacks residues 37 to 284
  VARIANT 71..284: note = Derived polymorphism lacks residues 71 to 284
  VARIANT 102..284: note = Derived polymorphism lacks residues 102 to 284
  VARIANT 118..284: note = Derived polymorphism lacks residues 118 to 284
  VARIANT 120..284: note = Derived polymorphism lacks residues 120 to 284
  VARIANT 128..284: note = Derived polymorphism lacks residues 128 to 284
  VARIANT 144..284: note = Derived polymorphism lacks residues 144 to 284
  VARIANT 164: note = Ancestral polymorphism is L, Derived polymorphism is V
  VARIANT 169: note = Ancestral polymorphism is S, Derived polymorphism is P
  VARIANT 193: note = Ancestral polymorphism is S, Derived polymorphism is Y
  VARIANT 206: note = Ancestral polymorphism is P, Derived polymorphism is L
  VARIANT 222: note = Ancestral polymorphism is I, Derived polymorphism is S
  VARIANT 225..284: note = Derived polymorphism lacks residues 225 to 284
  VARIANT 232: note = Ancestral polymorphism is L, Derived polymorphism is V
  VARIANT 235: note = Ancestral polymorphism is A, Derived polymorphism is P
  VARIANT 236: note = Ancestral polymorphism is R, Derived polymorphism is H
  VARIANT 244: note = Ancestral polymorphism is D, Derived polymorphism is E
  VARIANT 263: note = Ancestral polymorphism is V, Derived polymorphism is G
  VARIANT 272: note = Ancestral polymorphism is S, Derived polymorphism is F
MAASALHLRLHPSPPAGVKLQQRKLRSKIQRQGGLSRRFSKVVSYYGLTTPPYKLDALEPYMSKRTVELHWGKHHQDYVDGLNKQLATSPLYGYTLEDLIKEAYNNGNPLPEYNNAAQVWNHHFFWESMQPEGGGLPEGGVLQQIEKDFGSFTNFREEFIRSALQLLGSGWVWLVLKRNERKLSVVHTRNAISPLAFGDIVSNHQPRLVGGKDMDYEFLDFISCQILTLLLLSPARLLLRLQGDDKLTYVTNFMDHLVSWHTVTLRMMRAESFVNLGEPNIPEA

SEQ ID NO: 15761 - protein, 382 aa, Zea mays
  VARIANT 91..382: note = Derived polymorphism lacks residues 91 to 382
  VARIANT 142: note = Ancestral polymorphism is D, Derived polymorphism is Y
  VARIANT 161..382: note = Derived polymorphism lacks residues 161 to 382
MEGVRDARVIPKPRSVSMEGTSTSAPDLPCHPQIWPHPALCSREGPVLGAGGPERGAGRESVPQQQPQEHASAAEANDQAAEPEDKMGEEWIFETWLTTMDSRWRILSRCKKRLTDARTRFPGLHEELKRCVNGCDTAVIFYMLWGSILDKYGLRDDNWLQSLYEIRHKWVPAYLTSFFFAELSLTHRVETVTSENRHGLGKNKRGVSTPELHSKHSSWNWLKQCNYVVKVQDGSYMKYYVERNGDPPTRHTVFYNVAEKKAWCECCRFAFSTILCRHVLSVFLLAGVIMLPEPCITKRWTKKAKSGPELIGLNVGNGSGSADSTASRYNDLVRDAIKCAEKGAVSAGAFRVAKEVLRKAFVDIRGHGEKLCKDALHSASRR

SEQ ID NO: 15762 - protein, 413 aa, Zea mays
  VARIANT 34..413: note = Derived polymorphism lacks residues 34 to 413
MVGAGVLSLPYAMSKLGWGPGIAVLMLSWVVTLYTMWQMVEMHEMVPGKRFDRYHELGQHAFGERLGLWIVVPQQLIVEVGGDIVFMVTGGRSLKKLHDVVVCDAAGRCSEGGGDIRLTYFIMIFASCHLLLSQLPNFNSISGVSGLHRRRCHVTQVRTYSTIAWGASVHKGKLPDVDYEVLAAAATASEKALSYMAALGDVAFAYAGHNVVLEIQATIPSTPETPSKKPMWRGVVVAYAMVAACYFPVSLLGYWAFGNQVDDNVLVTLSKPRWLIALANAMVVVHVIGSYQIFAMPVFDMMETVLVKKLHFPPGLALRLIARSTYVAFTTFIAITIPFFGGLLGFFGGFAFAPTTYFLPCVMWLAICKPKRFSLSWFANWACIVLGVVLMVLAPIGALRQIILSAKTYRFYS

SEQ ID NO: 15763 - protein, 449 aa, Zea mays
  VARIANT 227: note = Ancestral polymorphism is G, Derived polymorphism is V
MAGSLAASAFFPGPGASPAASAKNLAGEVPDSLSVRGIVAKPNANSGNMQVKAQAQTLPKVNGTKVNLKNASSDTEEAIPYTAPKTFYNQLPDWSMLLAAVTTIFLAAEKQWTLLDWKPKKPDMLVDTFGFGGIIQDGMVFRQNFIIRSYEIGADRTASIETLMNHLQETALNHVKTAGLLGDGFGATPEMSKRNLIWVVSKIQLLVEKYPLWYVSANLNNPYPFLGKCHPSISFQEDTVQVDTWVAAAGKNGMRRDWHVLDCKSGCTILRATSVWVMMNKNTRRLSKMPDEVRAEIGPYFNARAAITDEQSEKLAKPGSTAGGDAMKQFMRKGLTPRWWGDLDVNQHVNNVKYIGWILESAPIAILEKHELASMTLDYRKECGRDSVLQSLTTVAGECVDGDTDSTIQCDHLLQLETGADIVKAHTEWRPKRAHGEGTPMGGFPAESA

SEQ ID NO: 15764 - protein, 401 aa, Zea mays
  VARIANT 291..401: note = Derived polymorphism lacks residues 291 to 401
MRPARPPTMEMQPPPTAMVREVGVTVLVLLWAITLYTLWQMVEMHECVPGKRFDRYHELGQHAFGERLGLWIVVPQQLVVEVGVNIVYMVTGGTSLKKFHDTVCGDSCTDIKLTYFIMIFASCHFVLSQLPSFHSISGVSLAAAVMSLCYSTIAWVASAHKGRSPDVHYGLRATTAPGKVFGFFGALGDVAFAYAGHNVVLEIQATIPSTPERPSKKPMWKGAIVAYAIVAACYFPASLVGYWAFGNQVNDNVLVSLSKPKWLIALANMMVVVHVIGSYQIFAMPVFDMIEAVLVMKFRFRPSLMLRLISRSAYVGFTMFIAITFPFFGALLSFFGGFAFAPTTYFLPCIMWLRIYKPKTFSVSWFTNWICIVLGVMLMVLSPIGGLRQIIFNAKTYNFYQ

SEQ ID NO: 15765 - protein, 241 aa, Zea mays
  VARIANT 156..241: note = Derived polymorphism lacks residues 156 to 241
  VARIANT 132: note = Ancestral polymorphism is W, Derived polymorphism is R
  VARIANT 122: note = Ancestral polymorphism is K, Derived polymorphism is M
  VARIANT 114: note = Ancestral polymorphism is R, Derived polymorphism is I
  VARIANT 112: note = Ancestral polymorphism is I, Derived polymorphism is M
  VARIANT 98: note = Ancestral polymorphism is W, Derived polymorphism is S
  VARIANT 96: note = Ancestral polymorphism is C, Derived polymorphism is S
  VARIANT 88: note = Ancestral polymorphism is L, Derived polymorphism is P
  VARIANT 75: note = Ancestral polymorphism is Q, Derived polymorphism is P
  VARIANT 74: note = Ancestral polymorphism is S, Derived polymorphism is L
  VARIANT 59: note = Ancestral polymorphism is S, Derived polymorphism is R
  VARIANT 42: note = Ancestral polymorphism is K, Derived polymorphism is T
  VARIANT 28..241: note = Derived polymorphism lacks residues 28 to 241
  VARIANT 8: note = Ancestral polymorphism is E, Derived polymorphism is K
  VARIANT 3: note = Ancestral polymorphism is A, Derived polymorphism is V
MGVEQGYEDMQGTFRDSEVFEFVGKVLQSVWMDLFLIDIRDKDYYDYMLGIVDPTKKRSTDDEAMFVTILRALSQAVSKIDIVYHHALLHNIFTMCVWHLHSDTRVVFLDLMTILKMASFVKCMLGLDAVVWDIIGSSLLEKVVYLLTELDVNITWEDILQDEHNKGIFDMELEDLGEDEDNLGQEGTKVCHISRAILTTRNDWVDTINMRMIDRFQGEQMMYHSFDTTVDDPNNYYLITI

SEQ ID NO: 15766 - protein, 122 aa, Zea mays
  VARIANT 25: note = Ancestral polymorphism is G, Derived polymorphism is R
  VARIANT 36: note = Ancestral polymorphism is A, Derived polymorphism is T
  VARIANT 37: note = Ancestral polymorphism is S, Derived polymorphism is P
  VARIANT 53: note = Ancestral polymorphism is R, Derived polymorphism is G
  VARIANT 56: note = Ancestral polymorphism is R, Derived polymorphism is H
  VARIANT 60: note = Ancestral polymorphism is R, Derived polymorphism is H
  VARIANT 84: note = Ancestral polymorphism is V, Derived polymorphism is E
  VARIANT 104..122: note = Derived polymorphism lacks residues 104 to 122
MADNRNLPPTWATTAGFGFLTLNSGVAIYRAWGDFASILLVTGSYSALLLLFRCLRDYERAAPGSPARARARRAVWPLTSLLTVAFAWKVAAAMPSAAAAAVVWALAVATTAGGFFALFVPG

SEQ ID NO: 15767 - protein, 189 aa, Zea mays
  VARIANT 163: note = Ancestral polymorphism is L, Derived polymorphism is H
  VARIANT 152: note = Ancestral polymorphism is P, Derived polymorphism is L
  VARIANT 135: note = Ancestral polymorphism is G, Derived polymorphism is R
  VARIANT 120: note = Ancestral polymorphism is G, Derived polymorphism is S
  VARIANT 111..189: note = Derived polymorphism lacks residues 111 to 189
  VARIANT 109: note = Ancestral polymorphism is D, Derived polymorphism is N
  VARIANT 81: note = Ancestral polymorphism is R, Derived polymorphism is T
  VARIANT 68: note = Ancestral polymorphism is N, Derived polymorphism is S
  VARIANT 66: note = Ancestral polymorphism is D, Derived polymorphism is Y
  VARIANT 62: note = Ancestral polymorphism is V, Derived polymorphism is F
  VARIANT 61: note = Ancestral polymorphism is W, Derived polymorphism is C
  VARIANT 60: note = Ancestral polymorphism is G, Derived polymorphism is S
  VARIANT 48: note = Ancestral polymorphism is P, Derived polymorphism is L
  VARIANT 36: note = Ancestral polymorphism is C, Derived polymorphism is Y
  VARIANT 34: note = Ancestral polymorphism is C, Derived polymorphism is Y
  VARIANT 14..189: note = Ancestral polymorphism lacks residues 14 to 189
MESCELCLLSKLVRMDGDSSQELHEISCGHHFHCTCIDKYLYIIATCPRAIGIMQSVKKGWVKVTDYNSYQTVKGSLKFKRKGQDLFYEHTLSLTKALCWFQFVLTHLDNWQLLIKSIPSEVVKPGRFKAINDDGMSIMKGKLYIHFTVKFPDSLVLEQCKALESVLPPKLSSNLIDMEIDECEETTMH

SEQ ID NO: 15768 - protein, 120 aa, Zea mays
  VARIANT 11: note = Ancestral polymorphism is L, Derived polymorphism is M
MDGDGDGRSVMAVVGLGVLGCNSAVAVYRSWGDPASVGFVVAADAALLLLLHFLRRFERARPRDDGGRGRAKAAVWALTTLLTAMFASRVAPMMPPHVGLAVWVAAVATAGGGFWALFIH

SEQ ID NO: 15769 - protein, 399 aa, Zea mays
  VARIANT 113: note = Ancestral polymorphism is A, Derived polymorphism is V
  VARIANT 106: note = Ancestral polymorphism is D, Derived polymorphism is Y
  VARIANT 44..399: note = Derived polymorphism lacks residues 44 to 399
MFGRGSPRMNLIQAATMKKISPRSTTNKRKKRTSPKVGHLRANWNSGLEKGLVEILQDHNNGCYKGQNRWSSEAWNRIVKLFHEKFSYVTFTKCQIQDKEKELKRDYKALKEARQQSGVSWDERLCRIEAEEPIWNNVTTSNERLKKFRTKSFPLFEALGELYDGNITEGTMNFTSIEPSRPPVTQPCQAFSNRFRHPSLAAFPQPSQAAFAQPSQTIFTQPSEAAFTQPSEATFTQPSQASFTQPSEATFTQPSQAAFTQPSQANISQAICDEDDELRVLDPPAPTSVSKRAKNVGTGNSRTRINKRTQDGNVVEMMGRFLEMKEKQAEADERATTNANEDDFPIQTCIAIVDGMEEFSDDEKVDAYDVFKDAQNRAIFMTAKDATRIKWLRKKIART

SEQ ID NO: 15770 - protein, 198 aa, Zea mays
  VARIANT 20: note = Ancestral polymorphism is R, Derived polymorphism is H
  VARIANT 89: note = Ancestral polymorphism is D, Derived polymorphism is N
MAYSCALWTTASVVTFLVIHVAEARYGGPEQWRRPAPAPVVPVAALVSEQLYGSLFLHKDNDACPAKGFYTYASFIQAARTFPMFAVTDFLAQISHETTCGWAMASDDQYAWGLCYKEEIRPASNYCDATDEQWPCYPGKSYHGWGPIQLSWNFNYEPAGQALGFDGLRNPELVANCSQTAFRTALWFWIEDPWNLEE

SEQ ID NO: 15771 - protein, 240 aa, Zea mays
  VARIANT 115..240: note = Derived polymorphism lacks residues 115 to 240
MALASATSRPLLGRPAGTARPHLAVSSSSPASSIRFPRGADGGASRAAVSLRAPTPPAAATATSGSIAPAISLTEKALKHLNQMRAERNEVLCLRIGVKQGGCSGMSYTMEFENRENASPDDSVVEYDGFAIDSPAYYCNTYTSFLIPRPVLLEIHVNINSTIPIKKNSSKALGYGSPHMPHVCDPKSLLFMFGMELDYSDALIGGGFLFQNPNATKTCGCGKSFATGKETEAAATTCNN

SEQ ID NO: 15772 - protein, 144 aa, Zea mays
  VARIANT 133..144: note = Derived polymorphism lacks residues 133 to 144
  VARIANT 111: note = Ancestral polymorphism is D, Derived polymorphism is V
  VARIANT 104: note = Ancestral polymorphism is K, Derived polymorphism is N
  VARIANT 84..144: note = Derived polymorphism lacks residues 84 to 144
  VARIANT 83: note = Ancestral polymorphism is D, Derived polymorphism is V
  VARIANT 50: note = Ancestral polymorphism is I, Derived polymorphism is M
MPKNKGKGGKNRKRGKNEADDDKRELVFKEDGQEYAQVTRMLGNGRCEAICVDGTRRLCHIRGKMHKKVWIAAGDIVLVGLRDYQDDKADVILKYMNDEARLLKAYGELPDTLRLNEGVDVDGPEEGEEGSDYIQFEDEDIDKI

SEQ ID NO: 15773 - protein, 144 aa, Zea mays
  VARIANT 5: note = Ancestral polymorphism is K, Derived polymorphism is N
  VARIANT 6: note = Ancestral polymorphism is V, Derived polymorphism is L
  VARIANT 11: note = Ancestral polymorphism is D, Derived polymorphism is N
  VARIANT 14: note = Ancestral polymorphism is A, Derived polymorphism is P
  VARIANT 17: note = Ancestral polymorphism is A, Derived polymorphism is T
MGMWKVVCVTDASAYIASWIVRLLLDRGYTVRATVRDTDMCGFSQFIWLHFYLPLNLIPDAGRQILSLLAAICVYLGISLKVDSTEPKHIKAYCYYLSFMFQTHLILHISTVCLHAQMLNSIYSLPYLFMIDKPIFIDHDINVP

SEQ ID NO: 15774 - protein, 904 aa, Zea mays
  VARIANT 461..904: note = Derived polymorphism lacks residues 461 to 904
  VARIANT 485..904: note = Derived polymorphism lacks residues 485 to 904
  VARIANT 559..904: note = Derived polymorphism lacks residues 559 to 904
  VARIANT 570..904: note = Derived polymorphism lacks residues 570 to 904
  VARIANT 587..904: note = Derived polymorphism lacks residues 587 to 904
  VARIANT 590..904: note = Derived polymorphism lacks residues 590 to 904
  VARIANT 622..904: note = Derived polymorphism lacks residues 622 to 904
  VARIANT 648..904: note = Derived polymorphism lacks residues 648 to 904
  VARIANT 654..904: note = Derived polymorphism lacks residues 654 to 904
MEMQPQLGDSSPEDKLASRPLTPGGRWPDSQWRPAEEKAIDDWLPINARRNAKWWYSAFHNVTAMVGAGVLGLPYAMSELGWGPGIAVLLLSWIITLYTLWQMVEMHEMVPGKRFDRYHELGQHAFGERLGLWIVVPQQLVVEVGLNIVYMVTGGTSLKKFHDTVCGDDDHRCKGRDIKLTYFIMIFASCHLVLSQLPNFHSISGVSLAAAVMSLCYSTIAWIASAQKGKSPDVHYGLRATTTPGKVFGFFGALGDVAFAYAGHNVVLEIQATIPSTPDKPSKKPMWKGVVVAYVVVAVCYFPASLVGYWAFGDGVDENILVTLRKPKWLIALANVMVVVHLIGSYQVYAMPVFDMIETVLVRKFGFRPTLMLRLVARSVYVGFTMFVAITFPFFSALLSFFGGFAFAPTTYFLPCIMWLTICKPKTFSISWFTNWLSTVALAPKGRRAASDAPAGGEGGWSGQDEKPAADDDWLPINARRNAKWWYAAFHNVTAMVGAGVLTLPYAMSELGWGVGVTVLVLSWVITVYTLWQMVEMHECVPGKRFDRYHELGQHAFGEKLGLWIVVPQQLVVEVGLNIVYMITGGQSLQKFHDMVCHGRCRRIKLPYFIMVFASVHFVLSQLPDFHSISSVSLAAAVMSVGYSAIAWTASAAQGKAAEAEADYSLRATTTPGKVFGFLGALGDVAFTYAGHNVVLEIQATIPSTPGKPSKKPMWKGVIVAYVVIVACYLPVVLVGYWAFGNGVDENILITLNRPRWLIAAANMMVVVHVVGSYQVYAMPVFDMIETVLVRKYWFTPGFRLRLIARTVYVALTMFVAITFPFFSELLSFFGGFAYAPTSYFLPCIMWLIIYKPRRFSLSWFTNWICIVIGVLLMVLSPIGGLRQMILKIKTYKFYQDYSGLSHN

SEQ ID NO: 15775 - protein, 453 aa, Zea mays
  VARIANT 8: note = Ancestral polymorphism is R, Derived polymorphism is S
  VARIANT 82: note = Ancestral polymorphism is H, Derived polymorphism is N
  VARIANT 139: note = Ancestral polymorphism is A, Derived polymorphism is D
MAGSAVLRSPLSVLLYILAAVPATAAATPTDAAIDEAYAHLVNLTANQEYWAERAEAAHAYNRAAYQTDPVAVVQRFNDGVHRATATRSRSLAHRARGPCTATNPIDQCWRCRRDWARDRKRLARCAMGFGHRTTGGLAGKFYVVIDPSDDAADLVTPRKGTLRHAVTRARALWITFARDMVIELCQELIVSSDKTIDGRGAQVHIVGAQITLQNVRNVILHNLHVHDAAAHGGGAIRDSQHHWGVRGESDGDGVSVMGSSDIWIDHLSMSSCADGLVDAVDGSTAITVSNGHFTRHDHVMLFGASDAASKDREMQVTVAFNHFGKGLVQRMPRCRHGFFHVVNNDYTHWLMYAIGGSRNPTIISQGNRFRAVDDSRFKEVTKREYTQYSEYKNWVWKSQDDLFLNGAFFNQSGGQNERKYDRLDLIQAKGGQYAESLTRYAGALNCRVGRKC

SEQ ID NO: 15776 - protein, 201 aa, Zea mays
  VARIANT 49..201: note = Derived polymorphism lacks residues 49 to 201
  VARIANT 53: note = Ancestral polymorphism is N, Derived polymorphism is K
  VARIANT 59..201: note = Derived polymorphism lacks residues 59 to 201
  VARIANT 96: note = Ancestral polymorphism is A, Derived polymorphism is V
  VARIANT 105..201: note = Derived polymorphism lacks residues 105 to 201
MAESIVSGAAAPPPGAPSFSYLAVFSNCPLVAAVLAFAIAQSIKVLTTWYKENRWDAKQLVGSGGMPSSHSATVTALAVAVGLQEGFASSLFATTAVFASVVETQLLHHGFTACIASHYTDLTVSCGTLQVMYDAFGVRLHAGKQAEVLNQIVYELPSEHPLAETRPLRELLGHTPPQVFAGGVLGFAVATFTAMIAGLGS

SEQ ID NO: 15777 - protein, 535 aa, Zea mays
  VARIANT 11: note = Ancestral polymorphism is R, Derived polymorphism is W
  VARIANT 21: note = Ancestral polymorphism is E, Derived polymorphism is D
  VARIANT 22: note = Ancestral polymorphism is E, Derived polymorphism is K
MATASVTFKSREDHRKQLELEEARKAGLAPAEVDEDGNEINPHIPQYMSSAPWYLNAEKPSLKHQRKWKSDPNYTKSWYDRGAKLFQANKYRKGACENCGAMTHDKKSCMERPRNVGAKWTNVNIAPDEKVESFELDYDGKRDRWNGYDPSTYTRVIADYEAREEARKKYLKEQQLKKLEEKDTEKDDENAGSEDDEEDGLRIDEAKVDESAQMDFAKVEKRVRTTGGGSTGTVRNLRIREDTAKYLLNLDVNSAYYDPKTRSMREDPLPDADPNDKFYVGDNQNRLSGQALEFKQLNIHAWEAFEKGQDIHMQAAPSQAELLYKSFKVKKEMLKSEHKDKIMEKYGNAASEDAIPRELLLGQSEREIEYDRTGRIIKGQDVSLPKSKYEEDVFINNHTSVWGSWWKDHQWGYKCCKQTIKNSYCTGLAGIEAAEASADLMKANMARKEAAEDEPVQHEEKRLATWGTDVPQDLVLNEKKLQESLKKETARRKEEKDERKRKYNVKFNDEVTAEDMEAYRMKRIHHDDPMKDFLN

SEQ ID NO: 15778 - protein, 58 aa, Zea mays
  VARIANT 44: note = Ancestral polymorphism is T, Derived polymorphism is I
  VARIANT 39: note = Ancestral polymorphism is G, Derived polymorphism is D
  VARIANT 38: note = Ancestral polymorphism is T, Derived polymorphism is I
  VARIANT 32..58: note = Derived polymorphism lacks residues 32 to 58
  VARIANT 29: note = Ancestral polymorphism is I, Derived polymorphism is T
  VARIANT 27: note = Ancestral polymorphism is T, Derived polymorphism is A
MHGHTLVVCVVSAHTIIDKSSMHIGRTCIAKCLVGYNTDTVLITPATIRVCNGSRLRS

SEQ ID NO: 15779 - protein, 363 aa, Zea mays
  VARIANT 172..363: note = Derived polymorphism lacks residues 172 to 363
  VARIANT 321: note = Ancestral polymorphism is G, Derived polymorphism is E
MTATLVETLHMVPGDGDTSYARNSTIQGGQQSNLKPMIEEAVVSLLNDNDGATGLAIADLGCSSGPNTLVLVSTAVAAVRRRCSELRRQPPELCVHLNDLPNNDFNLVTKSLATYAKAQESLGPPVLTSIVPGSFHARLFSKRSLHLVCSNASLQWLSKAPEELVQNGIPFYDRDESARRARRPAVIQAYARQFRSDFTQILRLRAQEMVPGGKMVFSLLGQRPDDKPENALQLFEFINAVLHEMASKGLIDEERLHSFYIPVYGPSEKELREIVEAEGSFSIDKMAIHEPPPSRNANLTPKARAGGLRAAMEPIIVRHFGASPPAMDEFLRIAEKLIKMSHVEDEYPNKPRAFVAASLTRRA

SEQ ID NO: 15780 - protein, 82 aa, Zea mays
  VARIANT 38: note = Ancestral polymorphism is K, Derived polymorphism is N
  VARIANT 31..82: note = Derived polymorphism lacks residues 31 to 82
  VARIANT 21..82: note = Derived polymorphism lacks residues 21 to 82
  VARIANT 12: note = Ancestral polymorphism is D, Derived polymorphism is Y
MIGVVTSDSLTDILGHKMTMRFAAVVGIFGWLTVYFAKDAMMLYAGRVLLGYCTGVLSYVVNIYSSQYMYLNLHSYVSKPFV

SEQ ID NO: 15781 - protein, 25 aa, Zea mays
  VARIANT 18: note = Ancestral polymorphism is C, Derived polymorphism is Y
MGEDVLSVFEHAIKVLSCKDDLVDS

SEQ ID NO: 15782 - protein, 243 aa, Zea mays
  VARIANT 220: note = Ancestral polymorphism is G, Derived polymorphism is D
  VARIANT 201: note = Ancestral polymorphism is I, Derived polymorphism is T
  VARIANT 200..243: note = Derived polymorphism lacks residues 200 to 243
  VARIANT 162: note = Ancestral polymorphism is A, Derived polymorphism is S
  VARIANT 122..243: note = Derived polymorphism lacks residues 122 to 243
MLRNKVWFSICRSVPATKLMLSNFRHRRATKGKAIDLDDIKFHQCVRLARFENDRTISFIPPDGSFDLMTYRLSTQVKPLIWVEAQIEKHSRSRIELMVKARSQFKERSTATNVEIEVHVPSDATNPNIRTSMGSAAYAPERDAMVWKIKSFPGGKEYMCRAEFSLPSITAEEGAPEKKAPIQVKFEIPYFTVSGIQVVYILGQVRAMDNEMLLRIKQYGLDMMPKILILSVMANMVKGKCSG

SEQ ID NO: 15783 - protein, 184 aa, Zea mays
  VARIANT 32: note = Ancestral polymorphism is S, Derived polymorphism is T
  VARIANT 41: note = Ancestral polymorphism is D, Derived polymorphism is Y
  VARIANT 42: note = Ancestral polymorphism is Q, Derived polymorphism is K
MIREAISRLRDGGFGFVALAMRVKFAELEKLSNLTVFALNDQAIFTGEGHGYVSAVRFHIVPEHRLTRADLLRLRPGTILPTLAGEDQKLVVTLGSGSATDEVRINYIPVKEPDVVINSRVAVHGVYVPFPRLHLANLATLVAVASDLQTNDSCGGAGGPLGDCASTPMTSTTISVDQGYGKGQ

SEQ ID NO: 15784 - protein, 155 aa, Zea mays
  VARIANT 98: note = Ancestral polymorphism is P, Derived polymorphism is S
MAPKLEVLAVCDAMKAYISAPNLSVVSWDSDTGYNPLCHHFANAARHLRLLHLGSKCVSASLMRQFDEVDVLKLKLNLLNFKGTEAYTNLLNETAALPKCEELKLRVSLRAYRHNFASIMFHILRSCSNTRRISIKVDSGMVISILHASANVSFN

SEQ ID NO: 15785 - protein, 163 aa, Zea mays
  VARIANT 66..163: note = Derived polymorphism lacks residues 66 to 163
  VARIANT 14: note = Ancestral polymorphism is R, Derived polymorphism is I
MAQSKGRRKSYWVRPDSDFNVFEVLSISLCSLASAFSYGVASMAMVFVNKAVLMQYVHSMTLLTLQVILSVICTDTGVLIAALGDFSFDLYGYCMALTSVFFQVVLSPCALFLQISTTNYVSTVGVHTIPPVHVLPPRNRPRPNPPLHPAAALFPSSAQPRIP

SEQ ID NO: 15786 - protein, 222 aa, Zea mays
  VARIANT 170: note = Ancestral polymorphism is R, Derived polymorphism is M
  VARIANT 60..222: note = Derived polymorphism lacks residues 60 to 222
  VARIANT 40: note = Ancestral polymorphism is M, Derived polymorphism is K
  VARIANT 33: note = Ancestral polymorphism is S, Derived polymorphism is F
  VARIANT 30: note = Ancestral polymorphism is L, Derived polymorphism is P
  VARIANT 23..222: note = Derived polymorphism lacks residues 23 to 222
  VARIANT 19: note = Ancestral polymorphism is N, Derived polymorphism is K
  VARIANT 7..222: note = Derived polymorphism lacks residues 7 to 222
MLKEVIKRPLLCLRKELYNRMEWRIIIICPVCSPTVFMEMRSLLHFWFQGTYMIISFPVWFSFATALLFYREGSHDSLSETLSKEPTAESISDVSLVQRAAFYLSWVLCPSNDDQCEMLSNNILEISHSWARNNKKCLSYQITMNHRRKLQIPTAAKSEKFHVPINTGSRFARLAPNPDTQDHQVTVMLVRCFHCFGCTSFIHFKVDTIPLKRKGNIKYVHD

SEQ ID NO: 15787 - protein, 439 aa, Zea mays
  VARIANT 159: note = Ancestral polymorphism is R, Derived polymorphism is H
MHDIGLSARAAGATSCSSAAAAAGDGGDESKTRKAHPSFVVSAYTRLHSSHRTVASLLLFLTVAVAAFLAGRARPSVDCAPPRLDARFLALPDAAAASDFGSLGVPWCRSKTGKTVEWTSKDLLNGLEEFVPIYETRPIKNNVYGMGFDHSFGLWFMARWIKPDLMIESGAFKGHSTWVLRKAMPNTRIISLSPRHPEKYLKKGPAYVDGNCTYLAGKDFVDFGSIDWGKLLRNHGISDPDKVLVFFDDHQSELKRLKQALKAGFRHLIFEDNYDTGTGDHYSLRQICDQSYIRGGGHSCFWESDEARLRFERKKFWEKAVGIADLCGKDDAWWGVKGYMRDNFNHSNMAISYKEHFQNSRLVESVLDMYWELPPVAGPSLTHQTRYDPARTVDPIIEDGRYGLFRKTGLARLDASVFNGYTQMAYVQISGSMLSTDDV

SEQ ID NO: 15788 - protein, 110 aa, Zea mays
  VARIANT 6..110: note = Derived polymorphism lacks residues 6 to 110
MESRVQGHHRMFWALQYSCTNRAYVHNSSSLHMTASFFSLLDSFHFCPLGFKSAYPSIFFSFFNHIGLPDLGNTTSSLLSTCCHVVLELWYNWSWVKATWSLEVVGELSS

SEQ ID NO: 15789 - protein, 200 aa, Zea mays
  VARIANT 185: note = Ancestral polymorphism is P, Derived polymorphism is L
  VARIANT 184: note = Ancestral polymorphism is S, Derived polymorphism is L
  VARIANT 183: note = Ancestral polymorphism is M, Derived polymorphism is K
  VARIANT 178: note = Ancestral polymorphism is K, Derived polymorphism is N
  VARIANT 174: note = Ancestral polymorphism is G, Derived polymorphism is R
  VARIANT 165: note = Ancestral polymorphism is L, Derived polymorphism is V
  VARIANT 146: note = Ancestral polymorphism is T, Derived polymorphism is M
  VARIANT 145: note = Ancestral polymorphism is A, Derived polymorphism is T
  VARIANT 141: note = Ancestral polymorphism is R, Derived polymorphism is C
  VARIANT 139: note = Ancestral polymorphism is R, Derived polymorphism is W
  VARIANT 126: note = Ancestral polymorphism is C, Derived polymorphism is Y
  VARIANT 113: note = Ancestral polymorphism is E, Derived polymorphism is K
  VARIANT 5..200: note = Derived polymorphism lacks residues 5 to 200
MVTGWVKAAMGFQRSPKSQVPEAASPSRAPTSGSVSTAGSTPSKASALARSFGAYFPRSSAQVRPAARAPPQVAELLRTIEQLQERESRLHVELLEQKILKEIVTIVPFLEAELAAKKAELQVAKCASSSAGIYSAVVRARQTNATSASKVVALPPPLPRCAERLFLIAATWPGPKVKVRMTMSPGGENDDDGGTGSYSR

SEQ ID NO: 15790 - protein, 888 aa, Zea mays
  VARIANT 721..888: note = Derived polymorphism lacks residues 721 to 888
  VARIANT 525..888: note = Derived polymorphism lacks residues 525 to 888
  VARIANT 382..888: note = Derived polymorphism lacks residues 382 to 888
  VARIANT 363: note = Ancestral polymorphism is P, Derived polymorphism is T
  VARIANT 328..888: note = Derived polymorphism lacks residues 328 to 888
  VARIANT 74: note = Ancestral polymorphism is I, Derived polymorphism is T
  VARIANT 29: note = Ancestral polymorphism is L, Derived polymorphism is F
  VARIANT 27: note = Ancestral polymorphism is P, Derived polymorphism is H
  VARIANT 21: note = Ancestral polymorphism is T, Derived polymorphism is A
MAEIAVLLVLKKIAIALAGETLSFAKHLLAKKSELVAALPDDMKLISNELELIRAFLKKIGRTGRKDEMIETWIGQVRRLAYNMEDTVDHFIYVVGKHNQTGSPLDYLKKIAKKPQRLLSLDEIASEIKKIKQELIQLSESKDRWTKPLDGGTDVPAGSYETEKEMYLPGHDYSIRDEELAGIDKNKQTLISSLKFEDPSLQIIAVWGMGGIGKSTLANNVYKNEGFNFDCRAWVSISQSYKLEDIWKKMLTDILKKDKKEFDPGTMDSAELREKLIKTLDKKRIKKVLVDNGLGSRVIITTRTEEVASLAEDSCKIKVEPLGDHDSWLVFCRKAFPKVENHICPSELRQCGESIVEKCDGLPLALVAIGSILSLRPKNVAEWKLFYDQLIWELHNNENLNRVEKIINLSYKYLPDYLKNCFLYCAMFPEDYLIHRKRLIRLWIAEGFIEQKGACSLEDTAESYLRELIRRSMLHVAERNSFGRVRCIRMHDLVRELAIFQSKREGFSTTYDGNNEGMLVESYSRRVAVLQCSKDILSTIDPSRLRTFITFDTSMTLSLWYSSISSKPKYLAVLDLSGLPIETIPNSIGELFNLRLLCLDDTKVKELPKSIAKLQNLQALSLEQAELVKFPQGFSNLKKLRHLMVSRLRDATNNSFRCWEAVEPFKGLWSLVELQTLFAITASEVLVAKLGNLSQLRSLTIYDVRSNFCAQLFGSLSKMCQLSRLMIRACNEDEALQLDDSTFPNSLQTLTLYGRLSEGTFMSPFFLNRENGLLRLRLGYSHLSENPVPHLSELSNLTELSLIKAYTGQELYFQAGWFLNLKDLYLKDLPHVNQIHIQEGALASLKRMGMVGLLELRHVPVGFIYLKSLKTTFFHNMHPDFKSIQKEM

SEQ ID NO: 15791 - protein, 264 aa, Zea mays
  VARIANT 1: note = Ancestral polymorphism is M, Derived polymorphism is I
  VARIANT 25: note = Ancestral polymorphism is S, Derived polymorphism is I
  VARIANT 31: note = Ancestral polymorphism is G, Derived polymorphism is E
  VARIANT 32..264: note = Derived polymorphism lacks residues 32 to 264
  VARIANT 34: note = Ancestral polymorphism is P, Derived polymorphism is L
  VARIANT 60: note = Ancestral polymorphism is L, Derived polymorphism is R
  VARIANT 68: note = Ancestral polymorphism is G, Derived polymorphism is S
  VARIANT 88..264: note = Derived polymorphism lacks residues 88 to 264
  VARIANT 91: note = Ancestral polymorphism is P, Derived polymorphism is L
  VARIANT 250: note = Ancestral polymorphism is P, Derived polymorphism is L
MTARSALDEVTDTSAFDRSPSTFRSSVSRDGRFPVVAGRYHLYVSYACPWASRCLAFLKLKGLDHAIGVTVVKPIFEQTKESDEHLGWVFPVAADEEPGAEPDPLNGAQSVRELYEIASSNYAGKPTVPMSLQSRHSKSTKQAADLIPPPPFQHAEVQNSPTAKLIPVFHCISGAVGQAVEDGGEQRELQEHPDAQRRVQRHRQEPRAGPHPAHLWASIDEANELVYDAINNGVYKCGFAKKKDGCVLVPNLGSLTSIHDRWVL

SEQ ID NO: 15792 - protein, 234 aa, Zea mays
  VARIANT 36: note = Ancestral polymorphism is S, Derived polymorphism is Y
  VARIANT 40..234: note = Derived polymorphism lacks residues 40 to 234
  VARIANT 64..234: note = Derived polymorphism lacks residues 64 to 234
  VARIANT 111..234: note = Derived polymorphism lacks residues 111 to 234
MGPPRWWRGIEAECGHCVGLGGEDLSEREGKVSPFSRGAYCVARRGGTVAAEKTNRSSTVGFSSRSSVARARPLVAAVHLAGGGAGRCGAGRRGAAIALSLVARSEDPSEWEKEGWMPHDRGWAQRMAVCARCWEGAEAQRGKGIGAWEEVRELGRRFASVTFNAMAAQEEVHELGRSLDRGKLVDKEGAPGGEAAPAKGDDGTTLLRVHKSGRTGADGHGCRCGSCGEAGGAV

SEQ ID NO: 15793 - protein, 329 aa, Zea mays
  VARIANT 286: note = Ancestral polymorphism is S, Derived polymorphism is F
  VARIANT 251: note = Ancestral polymorphism is T, Derived polymorphism is I
  VARIANT 243: note = Ancestral polymorphism is F, Derived polymorphism is S
  VARIANT 241..329: note = Derived polymorphism lacks residues 241 to 329
  VARIANT 235..329: note = Derived polymorphism lacks residues 235 to 329
  VARIANT 219: note = Ancestral polymorphism is I, Derived polymorphism is L
  VARIANT 183: note = Ancestral polymorphism is T, Derived polymorphism is I
  VARIANT 166: note = Ancestral polymorphism is V, Derived polymorphism is E
  VARIANT 153..329: note = Derived polymorphism lacks residues 153 to 329
  VARIANT 128: note = Ancestral polymorphism is S, Derived polymorphism is L
  VARIANT 97: note = Ancestral polymorphism is E, Derived polymorphism is Q
  VARIANT 32: note = Ancestral polymorphism is R, Derived polymorphism is H
  VARIANT 19: note = Ancestral polymorphism is Y, Derived polymorphism is H
  VARIANT 13: note = Ancestral polymorphism is D, Derived polymorphism is A
MECLFQPDSYLGDEVINFYIYLLVAQEHMKHHPSGTVHIEIIFASEFFKRDAGDVREFDDIYCETSERSQVERKVFVPINIRELHSYLVVLNAKRREIQILDSLGSSFDHKDLDCVLKGLQKQIDGVSQYMKLKDHNNWPDLQVASWPRKLIEFKDDMQTDRFLRVDFSYLVIWSTGQLDNFIQNDVIPTSTLVNGCGKDSLMSGLSTKDMPVIKADIIEFLCDYIMAIQDATILEAKWVRSSKPYLIDLTVKTLQELLNVNKDMPIDCFNMVVQILAHNEPKRLSLAKRKITKHYMNMRLCEMCGFDEEAKSCSYATEILYRLCTLRY

SEQ ID NO: 15794 - protein, 160 aa, Zea mays
  VARIANT 30: note = Ancestral polymorphism is A, Derived polymorphism is V
  VARIANT 84: note = Ancestral polymorphism is C, Derived polymorphism is S
  VARIANT 125: note = Ancestral polymorphism is P, Derived polymorphism is H
  VARIANT 135: note = Ancestral polymorphism is H, Derived polymorphism is Y
MSGGLGQSSRLPTSPSGAAESSGPNQANSAAIGINATNFVSRSGYSCQQLSVLMIQACGLLLAQLPPEFHMQLYSEAARVIKDCWWLADGSRPVKELDSAVGYALLEPTWASRDNTSTAIVTLLPFCIPFLAIFYKSGWNLLLLSSNTFGQSIQLSLLHS

SEQ ID NO: 15795 - protein, 374 aa, Zea mays
  VARIANT 175: note = Ancestral polymorphism is W, Derived polymorphism is S
METPNQVHILRKLLIMILYQALNQDVTNHNTLCCLLWSTGYRAVLYMVGNQLSNTTTQPPRRKGKIHVPLHKEDRWILVAHNLVNWQAEIYDPMCKSEDKKLEAVVETVARNLCGALQLREVENSKEFSVKYPPHIFKSEKIKYRKSWYCFWPRYDSGLRFTGMPNPEPVSLKDWKREFFLSSSGPWPGAVDWGEPSRTSLMKSALTARERNYHTPWALCGKGNLEVDVLGHTNREPDSEPFLLLQCQESEAEAEVDAPAFGDSGRRYLGLRTLGVEMMLLNDDGSGESHARMACVNGQANTFCWWECRGQSFSPFKKSSAGGIRIMEHPRNQKNQLNANMIAKRNVDNFGGLKFLPDSRSYEAYQKKSEMYAL

SEQ ID NO: 15796 - protein, 143 aa, Zea mays
  VARIANT 67: note = Ancestral polymorphism is H, Derived polymorphism is Y
MALAAIYNLFIINKSGGLIYYKDYGSAGRMDTNDSLRLASLWHSMHAISQQLSPTPGCTGIDLLQAHNFDLHCFQSLTGTKFFVVCETGAPNMEMLLKVIYELYTDFVLKNPFYEMEMPIRCELFDHNLAQMIQKDRVALLGR

SEQ ID NO: 15797 - protein, 303 aa, Zea mays
  VARIANT 36: note = Ancestral polymorphism is T, Derived polymorphism is M
  VARIANT 260: note = Ancestral polymorphism is V, Derived polymorphism is A
MSGMSLSHRLPPAAAAVDPYYVYAAHPDPQRQGVLTLFVAGLPDDVKPREIHNLFSHRPAFDHCLLEYTGRGNQAVAFVTFFTHEAALSAMSSLNGTIFDPESGDRLHIELAKSTSRRPRGGVEGYRVIDKRANKTEGNADHENVGDEDDDEVWGEDEDGGNDNNGDGGSDEPSGTENENPSDKNELPTDQSDQPGHKQQNGQSLSNEGRDKSSSDIPPCSTIFIANLGHTCTEDELKEVLSKEPGFHVLKMRRRGGMPVAFADFTDIESSTAAMNRLQGTVLASSDNDGLHIEYARSKMRKS

SEQ ID NO: 15798 - protein, 471 aa, Zea mays
  VARIANT 65: note = Ancestral polymorphism is A, Derived polymorphism is D
  VARIANT 222: note = Ancestral polymorphism is A, Derived polymorphism is V
MPTERVDVAVSSRTLLRASDPPPDFPAVLQASNLDLILGSFHIYLIAMYPAPAAGFPAVVAAARDAMPAFLSRFFPFAGRVVANADTGVPEIACDNTGAELVVARAGVRLADVDFADADRSLGRIAVPFQQDLALSLQLVRFACGGFALSWGTNHLLVDGHGLTALPSAWAELLRTGGLSWEPHHERASLFRPRDPPRYSASLDAEFTRYAPAGLPNSLLTATLVRRNYVVSAADVDRLRAAASTPARRATRLEALSAHVWKLLAAAVGGLDAHCRMAWLVDGRPRLDAARYDGATVRRYLGNVLTYASREAAVEAVSSSPLADVAAMAGAAIAEVFRWERYEELVDWMEVHKGVFREGGKWTEVVGTGMGSPALVVSTFVPFRVEGDFGFGRPRLVFPWVRPGRLGSAAMTVSRSPREDGSWLITARMWPRLADAVDADPDAVLKPATAARLGFGAPDPADVMQHATSRM

SEQ ID NO: 15799 - protein, 93 aa, Zea mays
  VARIANT 40: note = Ancestral polymorphism is D, Derived polymorphism is Y
MYSRDDLMKNNFGTEDDDDEEGDGDEDDNFAKNMGKALKDKGSQKKDLKQQAVQRFKDASEKLKGACKQGVQRGEEMVERGKEACRQIQQKQN

SEQ ID NO: 15800 - protein, 217 aa, Zea mays
  VARIANT 110: note = Ancestral polymorphism is R, Derived polymorphism is W
MVRWLPPPVTADGELPFGHDAVTFSFLVACVAATVTLASSMCSACGRKPKAATNADPAGTGSSVSGGSGSQEAGGAEEAAVEEEVVRLSPELAMHGAIEPVALPSSTSRRRLSISVSKKLSLNIPDKLRLSRREHKDHHHHKVESEDTLWKKGIILGEKCRIPGEREAECADPDDDDIAAANFRRSSYSRPVSRSSSFAMHQPQHDAPGPALHASDT

SEQ ID NO: 15801 - protein, 279 aa, Zea mays
  VARIANT 153..279: note = Derived polymorphism lacks residues 153 to 279
  VARIANT 140: note = Ancestral polymorphism is K, Derived polymorphism is N
  VARIANT 97: note = Ancestral polymorphism is A, Derived polymorphism is V
  VARIANT 72: note = Ancestral polymorphism is G, Derived polymorphism is C
  VARIANT 21: note = Ancestral polymorphism is S, Derived polymorphism is Y
  VARIANT 18: note = Ancestral polymorphism is R, Derived polymorphism is W
  VARIANT 17..279: note = Derived polymorphism lacks residues 17 to 279
  VARIANT 11: note = Ancestral polymorphism is T, Derived polymorphism is M
  VARIANT 10: note = Ancestral polymorphism is R, Derived polymorphism is H
MSTISDQKKRTLEALQQRYTSAKAKKLQDEKVKSQKKSNFNTPKPNFDAPREGKGPEITPRGTYIQPSRHKGVAFSSSNYQQKPSTSSGEEINPVYAELSCAFHDNLSKGVISDFDDTEVVYNVINDIIQKGGDAGKITKGAKKLKLERGILLDNYVQRGPRLVDAQARSLLIHSKRSKRHLSLKQHKKCGSFDLDGTLHKYGLYEPMHKIWKDYIRELINVNPKKKLSENLLSADLHGALLIVAECKAASDKGLNGIMIRDTAETFGIISEDNRFRAK

SEQ ID NO: 15802 - protein, 288 aa, Zea mays
  VARIANT 222: note = Ancestral polymorphism is V, Derived polymorphism is L
MATDPAPVPAMRCYSLPPVRLPAEDILFCVDVDLEARAEMKSAAAAAASSGSTSTASPQPTQPAGAGGAPAAGPRTVVRRMDAVRQALLLFVHSKLTMCPEHRFAFASLGETFSMVKKGFSSDAGFAMEAIHSLSASETRYAMADLTQLFMTACQEGKRAESQGRILRVVLIYCRSSTKPQHQWPVKPKNFTLDIIYLHDKPNPDNCPQKVYDALVDVLEHVSQYEGYILETGQGLARVLFRQMCILVSHPLQRCMQDDLDIPKQVAKKIVAAEPAQNEDAAPVSSQQ

SEQ ID NO: 15803 - protein, 89 aa, Zea mays
  VARIANT 16: note = Ancestral polymorphism is M, Derived polymorphism is L
MFHFACKFMCDDISLMLLLGFNVEKVQYKNVMFTVWDVGGQEKLRPLWRHYFNNTDGLIYVVDSLDRERIGKAKAKFHVCRLSVRAAYR

SEQ ID NO: 15804 - protein, 552 aa, Zea mays
  VARIANT 406: note = Ancestral polymorphism is V, Derived polymorphism is F
MAPPPAPPADWTPDLRPVASVPVPITVPSPRDHTHHHHHLVDRRDTPRGRAWEPERNRRGEAMDGAAVVKLMSGEAGYVLEDVPHVSDYLPDLPTYPNPLQDNPAYSVVKQYFVNPDDTVCQKIVVHKDGPRGNHFRRAGPRQRVYFEPDEVHACIVTCGGLCPGLNTVIREIVCGLSDMYGVTKILGIQGGYRGFYARNTITLTPKIVNDIHKRGGTVLGSSRGGHDTVKIVDSIQDRGINQVYVIGGDGTQRGAGVIFEEVRRRGLKVSVAGIPKTIDNDIPVIDKSFGFDTAVEEAQRAINAAHVEAVSAENGIGLVKLMGRHSGFIAHYATLASRDVDCCLIPESPFYLEGEGGLFRYIERRLKDNGHMVIVVAEGAGQKLIAETMQSIGKDASGNQLLLDVGLWLSQKINEYFKKNKMTINLKYIDPTYMIRAIPSNASDNVYCTLLAHSVVHGAMAGYTGFTIGQVNGRHCYIPFYRITEKQNRVSITDRMWARLLSSTNQPSFLCNKVIEEAKKEQERAAQLLDGSPSHRKVDDEVAASNLGRTK

SEQ ID NO: 15805 - protein, 79 aa, Zea mays
  VARIANT 45: note = Ancestral polymorphism is E, Derived polymorphism is K
  VARIANT 13: note = Ancestral polymorphism is C, Derived polymorphism is S
  VARIANT 2: note = Ancestral polymorphism is P, Derived polymorphism is S
MPNQHIVIRRLTCVSPTSAMIALDSEMSGGIRDVHAEDSVAINTESAIRVKTLGAIAGVLSRNELVAAALFTLAINHKQ

SEQ ID NO: 15806 - protein, 287 aa, Zea mays
  VARIANT 253..287: note = Derived polymorphism lacks residues 253 to 287
  VARIANT 223: note = Ancestral polymorphism is Q, Derived polymorphism is H
  VARIANT 203: note = Ancestral polymorphism is I, Derived polymorphism is T
  VARIANT 143..287: note = Derived polymorphism lacks residues 143 to 287
  VARIANT 122..287: note = Derived polymorphism lacks residues 122 to 287
  VARIANT 115: note = Ancestral polymorphism is S, Derived polymorphism is P
  VARIANT 112: note = Ancestral polymorphism is G, Derived polymorphism is E
  VARIANT 45: note = Ancestral polymorphism is P, Derived polymorphism is L
  VARIANT 40: note = Ancestral polymorphism is R, Derived polymorphism is K
  VARIANT 36..287: note = Derived polymorphism lacks residues 36 to 287
MPCGNCFYRVKGQEDLCESFFMYNRAKGTLYDGETRLFLRGNGKPVYMYSMGGLAEYCVVPANALAVLPDSLPYTESEILGCVVFTSYGALRHAAEMRPSDSVAVIGVGGVGSSSFICNCLQIAKAFGASQVIAVDVLDEKLQNATTLGATHTVNAANDDAVERIKEITDGRGVDVAIEALGKALTFSQCAKSVRDGGKAVMIGLAATNVMGEVDITHLVRRQVKIIGSYGARARQDLHQIVKLAESGAFNLQNTISRKCKFEEANGAYEDLNHGKIVGRAVVEIME

SEQ ID NO: 15807 - protein, 368 aa, Zea mays
  VARIANT 95: note = Ancestral polymorphism is G, Derived polymorphism is R
  VARIANT 32..368: note = Derived polymorphism lacks residues 32 to 368
MNLIHRTKHFPSALGLLPDTDSDRRCSSSPHRRLFKLFRSASVRCRALPAPRLALADVSFAVDVVTAGGDSTLSFLVAADKAAHIENSAGLFLFGVDLSGWNGAIGPGEWRVRWTAVRTAARRGEEPAALLMMDAKMPAQGRQEPSPSAAEVRRGSRRVWAQWRGWLCRPLGRLPPLCRAGIRFACPPHLCSAIPYAESVAESLYGNTTPLTRRPSSAPPSTPPSRPPLPLLRDPLRTPPVLPQARIHWGRLADPGPGRARRGQVPAGTRHGLRVQGTGLWLISSPVKHDLLDSSYLWRAQEYDRLGHTLALYELEHCERWASVTVLGVGEGEHGRRQGPGKKKMGGCPGMGSKSKSLFCGAFNLFSR

SEQ ID NO: 15808 - protein, 161 aa, Zea mays
  VARIANT 58: note = Ancestral polymorphism is G, Derived polymorphism is S
  VARIANT 64: note = Ancestral polymorphism is G, Derived polymorphism is S
  VARIANT 84: note = Ancestral polymorphism is R, Derived polymorphism is Q
  VARIANT 125: note = Ancestral polymorphism is G, Derived polymorphism is R
  VARIANT 134..161: note = Derived polymorphism lacks residues 134 to 161
  VARIANT 142: note = Ancestral polymorphism is H, Derived polymorphism is Y
MSWQAYVDEHLMCEIEGQHLSAAAIVGHDGSVWAQSESFPELKPEEVAGIIKDFDEPGTLAPTGLFVGGTKYMVIQGEPGVVIRGKKVQWGTDWHWGHYYQENRHVLDYWCLRRANDSRAMQHGGGEARRLPDRAGLLKVRHVLFWSFGHQSLRLIWFCNP

SEQ ID NO: 15809 - protein, 160 aa, Zea mays
  VARIANT 30: note = Ancestral polymorphism is A, Derived polymorphism is T
  VARIANT 67: note = Ancestral polymorphism is A, Derived polymorphism is D
  VARIANT 72: note = Ancestral polymorphism is L, Derived polymorphism is V
  VARIANT 87: note = Ancestral polymorphism is D, Derived polymorphism is A
  VARIANT 113: note = Ancestral polymorphism is T, Derived polymorphism is M
  VARIANT 115: note = Ancestral polymorphism is E, Derived polymorphism is K
  VARIANT 124: note = Ancestral polymorphism is R, Derived polymorphism is W
  VARIANT 125: note = Ancestral polymorphism is F, Derived polymorphism is S
  VARIANT 136: note = Ancestral polymorphism is A, Derived polymorphism is V
MALIESLHVFKPDPARDGASPSETIERALARALVDYYPLAGRLAVSEGARGLHVDCSAEGVWFIEADVWCRLEDVDYLEYPLQIPNDDLLPHPLPRPTHEEESKLILLVQVTTFECGGFVVGFRFSHAVADGLGAAKFMGAVGELARGADRVSVAPTSLL

SEQ ID NO: 15810 - protein, 151 aa, Zea mays
  VARIANT 8: note = Ancestral polymorphism is R, Derived polymorphism is H
  VARIANT 31: note = Ancestral polymorphism is V, Derived polymorphism is A
  VARIANT 33: note = Ancestral polymorphism is G, Derived polymorphism is D
  VARIANT 63: note = Ancestral polymorphism is L, Derived polymorphism is P
MEEEQCRRESVSGHKAACGIQITTDAKQIAALGKRIAALECGAVVGSVCECRYEEKLENFLILVSEVLKATLATDAVIGAMAALEEILYQFEEKLQAEREEAARKQEELQAQLQAQQAALEENQSLLRQAQEEVKGMHTKFEETNDCYELS

SEQ ID NO: 15811 - protein, 449 aa, Zea mays
  VARIANT 429..449: note = Derived polymorphism lacks residues 429 to 449
  VARIANT 105: note = Ancestral polymorphism is W, Derived polymorphism is L
  VARIANT 74: note = Ancestral polymorphism is I, Derived polymorphism is T
  VARIANT 27: note = Ancestral polymorphism is H, Derived polymorphism is D
MAEIAVLLVLKKIAIALAGETLSFAKDLLAKKSELVAALPDDMKLISNELELIRAFLKKIGRTGRKDEVIETWIGQVRRLAYNMEDTVDHFIYVVSTHNQTGSPLDYLKKIAKKPQRLLSLDEIASEIKKIKQELIQLSESSYETEKEMYLPGHDYSIRDEELAGIDKNKQTLISSLKFEDPSLRIIAVRGMGGIGKSTLANNVYKNEGFNFDCRAWVSISQSYKLEDIWKKMLTDILKKDKKEFDPGTIDSAELKEKLIKTLDKKRYLIILDDVWMADVFFRIKEVLLDNGLGSRVIITTRTEEVASLAEDSCKIKVEPLGDHDSWLVFCRKAFPKVENHICPSELRQCGESIVEKCDGLQLALVAIRSILSLRPKNVAEWKLFYDQLIWELHNNENLNRVEKIINLSYKYLPDYLKNCFLYCAMFPEDYLIHRKRLIRLWIAEGFIE

SEQ ID NO: 15812 - protein, 437 aa, Zea mays
  VARIANT 139..437: note = Derived polymorphism lacks residues 139 to 437
MHPKPEGGGDDDGAAAEVGSPRSGYFRQRSMHAAAAAADPEAARRPFHVENPPCSAGGGLRPSESVTKLESLERAALAPAVVLRTGFYILVWYAFSTCLTLYNKTLLGDKLGKFPAPLLMNTVHFALQAGLSKLIIWFQPKGPEAAVDMGWKDYFMRVVPTALGTALDINLSNASLVFISVTFATMCKSASPIFLLLFAFAFRLENPSIKLLGIIVVISTGVLLTVSKETEFDFWGFIFVTLAAVMSGFRWSMTQILLQVSVLTNFMPFLKDNYGLKNPITLMSHVTPVMAIATMILSLLLDPWSEFQKNSYFDSPWHVMRSCLLMLIGGSLAFFMVLTEYILISATSAITVTIAGVVKEAVTILVAVFYFHDEFTWLKGFGLFTIMVGVSLFNWYKYERFKRGQINEDDVSSPFTGDVKYIIIDDLEYQNEFEEDT

SEQ ID NO: 15813 - protein, 338 aa, Zea mays
  VARIANT 164: note = Ancestral polymorphism is L, Derived polymorphism is R
MSAAADDRARRAAAFRPAPLPPPAQKQQLSGVAAAVLDAGGRLGRAVGDVFRRLRIDDTFYSGGGGGGGGAPNRSWRDAGNNGGRPAAAGAPAAASREEATGGGASSGRFARAQGSMNLSATYDSRTHDVESSVVARGDLWRAEASHSSSSSAGAGGNGANNNLFLVQLGPVLFVRDTTLLFPVHLSKRHLIWYGFERKSFMDMQFPNGQLRYVAGDGFTARAFLPLRGGVLQAHGKFPGEKRLSFSFKDSICPTIGGRHPGVCVELIHSADDNVGVVCGYSHTASSPASAYASISIGRSKLNGGAARSGLAFRVDAPLLHGFGRPWFSVQMNSGIEF

SEQ ID NO: 15814 - protein, 257 aa, Zea mays
  VARIANT 16: note = Ancestral polymorphism is A, Derived polymorphism is T
  VARIANT 20: note = Ancestral polymorphism is E, Derived polymorphism is K
  VARIANT 32: note = Ancestral polymorphism is T, Derived polymorphism is S
  VARIANT 87: note = Ancestral polymorphism is R, Derived polymorphism is C
MSREDNVYMAKLAEQAERYEEMVEYMEKVAKTVDVEELTVEERNLLSVAYKNVIGARHASWRIISSIEHKEESRKNEEHVIQITEYRGKIEAELSNICDGILKLIDSHLVPSSTATESKVFYLKMKGDYHRYLAEFKTGAERKEAAESTMIAYKAAQDIALVELASTHPIRLGLALNFSVFYYEILNSPDKACNLARQVFDEAISQLDTLGEDSYKDSTLIMQLLRDNLTLWSADSTTEDGIEEGNEASKGDAGEGQ

SEQ ID NO: 15815 - protein, 225 aa, Zea mays
  VARIANT 199: note = Ancestral polymorphism is P, Derived polymorphism is S
  VARIANT 189: note = Ancestral polymorphism is S, Derived polymorphism is F
  VARIANT 90: note = Ancestral polymorphism is S, Derived polymorphism is P
  VARIANT 88: note = Ancestral polymorphism is A, Derived polymorphism is T
  VARIANT 85: note = Ancestral polymorphism is P, Derived polymorphism is L
  VARIANT 76: note = Ancestral polymorphism is N, Derived polymorphism is S
MAKPEGPTIGVKLFVDKEKKVLFAESNKEFVDVLFSFLTVPLGTMVRLLDKQSQLGCLDQLYKSVEDLNLEYFQTNACKAMLLKLLNAASGHCCRLKINVDGSVPRVVYVCKDTRCSALSDNAFSSFPGTVCKCGKVMESIGQFPKYDGDTETAAATCSEDGVFVKGCLKFIVTDDLQVAPASTSLMMSVFEKFGVLDPAVLEQQVLQFSSEKITCLLKRLLTSK

SEQ ID NO: 15816 - protein, 154 aa, Zea mays
  VARIANT 47..154: note = Derived polymorphism lacks residues 47 to 154
  VARIANT 146: note = Ancestral polymorphism is A, Derived polymorphism is T
MTTAGEAASPGGFACAVAALAEQQHMHGQSSSASACQTTRFDILSRSDRSFTEDLSVVGNSSSDSRVDEPSSSSTHRTVEGSNGWWSEVAEAGTRIAESDVTVEAGVGNSSTSAVSNIGSGSVPDSFEEQMMLAMALSLVDARARAGSPGLAWR

SEQ ID NO: 15817 - protein, 661 aa, Zea mays
  VARIANT 213: note = Ancestral polymorphism is V, Derived polymorphism is D
MPPPPPPPLGLRLRLSLLPPHPIAPSIRHAFCSPSVVSCHLSVRPLAQRRGGRPRPLCAARGEAEAEGFAWPDGSEEELRRLLELLPRELSRRVETHPELPALVEVVMDLGRPPLARFPSGDFLLSQRPISFDDLRHATSHSQVGDFGADNRAGISRTLHRISAIRNRKGVIVGLTCRVGRAVPGSANLLQDLVKDGGSLLLIGPPGVGKTTVIREIARMLADDYKKRVMIVDTSNEIGGDGDIPHPGIGNARRLQVPNQDMQHKVLIEAVENHMPQAIVIDEIGTKLEAMAASTIAQRGIQLVATAHGVTIENLIMNPSLEMLVGGIQSVTLGDEEANRRGVQKTVLERKGPSTFTCAAEIVSKKELRVHRSLEATVDALLAGKLPNFEIRKLGSKGSMQEVSVQKEQSHLGIYDATEFGSDSLRNARRSLDSAFSLDSAEGHIVRSDGADSSFNLYAYGISESTALQAIHQLELDDSVTLTYNISEADAVIALHSKLKKNYQIQAVLKSQDIPVFLVKTNSLPQITRALRALVDDHMDEVIDYNDKEEARSSEETDALEEARLAIEQVVIPKGESVQLLPRPSSIISSQVGLVESFSLKWEVVGQEPKACVRILPHFAPKQVEAVARETPAEPADSDWESHDDSDHTQSGITRLPFLPD

SEQ ID NO: 15818 - protein, 202 aa, Zea mays
  VARIANT 34: note = Ancestral polymorphism is Q, Derived polymorphism is H
  VARIANT 127: note = Ancestral polymorphism is T, Derived polymorphism is A
  VARIANT 131: note = Ancestral polymorphism is T, Derived polymorphism is A
MAETVFTPSLEGMKHVKAENGVILTKPFLDVCKQILPVLDKFGAAMAIVKNDISGNITRLENKYSSDPSKYGHMYSMVQEEVQNKTAKGSSSCTNGLLWLTRAMDFLVELFRNLLEHPDWTMTQACADSYTKTLKKFHGWLASSSFTVAMKLSPNRDKFMEVISGTGDINADIEKFCTTFSPFLKENHEFLASVGLDDMKAS

SEQ ID NO: 15819 - protein, 237 aa, Zea mays
  VARIANT 160: note = Ancestral polymorphism is C, Derived polymorphism is W
MRPSIVLFGDSITEEAFGEGGWGASLANHYSRSADVVLRGYSGYNTRWAARVAGRAVASIASPVSAVTVFFGANDAALPDRACALQHVPLAEYKDNLRAIFALLKKRWPSVVVILITPPPVDEDGRLRYPYAHDFSGLPERTNAAAAAYARACVEVARQWGLRAIDIWSRMQRFPGWEKSFLRDGLHLTPRGNRVLFEEVVFALKDANLSLEALPADLPLFSDIDPDNPVKSFEDQE

SEQ ID NO: 15820 - protein, 322 aa, Zea mays
  VARIANT 77: note = Ancestral polymorphism is G, Derived polymorphism is D
  VARIANT 94: note = Ancestral polymorphism is R, Derived polymorphism is C
  VARIANT 104: note = Ancestral polymorphism is S, Derived polymorphism is F
  VARIANT 255..322: note = Derived polymorphism lacks residues 255 to 322
  VARIANT 285..322: note = Derived polymorphism lacks residues 285 to 322
MAGTRWGRWLGLVTAAWVHCISGNNYTFSNYSHALKTLMGLTQLQLNGLSVAKDVGKAFGLLAGLASDRICVFLCLGGNSTTWMNTAVLVTCICNFRQSRGLVSGLLKGYVGLRTAIFTDTCSALFADDPASFLVMLAVVPAAVCALAMVFLREGTAAVDEEDDGRCFAAINSLAVAIALYLLAADLMGLDGGGGVVFVAVLLRGDRGDPVVPANADLEEADSLVAAVAPLLLVAKEARAPGERPRLGEEHTIAQTLTSLDFWLMFASFLMGVGIGLAVMNNLGQMGVAMGYVDVSLFVSMTSIWGFFGRIASGTISEHFIK

SEQ ID NO: 15821 - protein, 324 aa, Zea mays
  VARIANT 5: note = Ancestral polymorphism is D, Derived polymorphism is N
  VARIANT 8: note = Ancestral polymorphism is T, Derived polymorphism is I
  VARIANT 11: note = Ancestral polymorphism is P, Derived polymorphism is L
  VARIANT 39: note = Ancestral polymorphism is S, Derived polymorphism is F
  VARIANT 59: note = Ancestral polymorphism is R, Derived polymorphism is C
  VARIANT 70: note = Ancestral polymorphism is G, Derived polymorphism is E
  VARIANT 84: note = Ancestral polymorphism is P, Derived polymorphism is L
  VARIANT 101..324: note = Derived polymorphism lacks residues 101 to 324
  VARIANT 126..324: note = Derived polymorphism lacks residues 126 to 324
  VARIANT 143: note = Ancestral polymorphism is L, Derived polymorphism is I
  VARIANT 147: note = Ancestral polymorphism is P, Derived polymorphism is S
  VARIANT 158: note = Ancestral polymorphism is A, Derived polymorphism is V
  VARIANT 159: note = Ancestral polymorphism is A, Derived polymorphism is V
  VARIANT 168..324: note = Derived polymorphism lacks residues 168 to 324
  VARIANT 242: note = Ancestral polymorphism is A, Derived polymorphism is T
  VARIANT 249..324: note = Derived polymorphism lacks residues 249 to 324
MRYLDRFTALPVSSTRQLGIPLVCCQEVTVSEEIAWRASVSNSVTSAVVKEYFLVVGARGLSIEFDPRPGSFAFVNAIEVMLTPDNLFNDTMSKVGSAGTQLPLGLSGRGVETMYRLNIGEIDLISKLWKDVESWQTRCQLYLQDFPDLKELEGFLLAADGSNFSIPELNILKQLDELPIVEKELKRSLCRKQAYEALAIVMPMEVVEEVLKEASILNIEEEQPFDDLSRMLKEATSWEEKARLILERSASLYEFEDHMRCSEGIRVILPSKLHMKAEVDIAKLWIDKCQAYLRPSCNKLAFGDFLKVDDIKVHKIWIVLTLDL

SEQ ID NO: 15822 - protein, 177 aa, Zea mays
  VARIANT 49: note = Ancestral polymorphism is V, Derived polymorphism is A
MAGRDREPLVVGRVVGDVLDPFVRTTNLRVSYGARTVSNGCELKPSMVVHQPRVEVGGPDMRTFYTLVMVDPDAPSPSDPNLREYLHWLVTDIPGTTGAAFGQEVICYESPRPTMGIHRFVLVLFQQLGRQTVYAPGWRQNFNTRDFAELYNLGPPVAAVYFNCQREAGSGGRRMYS

SEQ ID NO: 15823 - protein, 511 aa, Zea mays
  VARIANT 474: note = Ancestral polymorphism is D, Derived polymorphism is V
MARAALRLGVRALALLVFVSVALLPLVSSDDGYRHCEGVVRGWADASSGRVKDGDKLSLKDLLFFLHIPRTGGRTYFHCFLKKLYTNAQECPRSYDKLRFDPSHPDCKLVVSHDDYSLTSKLPRERTSVVTILRNPVDRVFSTYEFSVEVAARFLVHPNLTSAKLMTTRVLTKSRAVSTLDIWPWKYLVPWMREDLFARRDARGVYKVHSSKKVNAYDVDDMVMPLHRYINDPVAHEIIHNGATFQITGLTNNSYFDGAHEVRHCVRKHPDLGRIVLEVAKNRLDQMLYVGLTEDHEESARLFAHMVGAQVLSQSGTLTLDLKEDLPIETDSHPSMEPEDEETNGHLNSTHGWQNNEAMNSTNDEHGKGNMTVGKLMEAYETCIAKLWKSQSGRRKISLKKVQEANFSKEARKLVSEAILNQIISLNRLDMELYDHAKKIFTQEHLMLKAQQSMVGQHRQFGEQKGWIGVMCSVGICPPWMVVLVVLGISTIIVLVTLAVTTRKRTSKLKV

SEQ ID NO: 15824 - protein, 307 aa, Zea mays
  VARIANT 70: note = Ancestral polymorphism is R, Derived polymorphism is W
  VARIANT 112: note = Ancestral polymorphism is R, Derived polymorphism is L
  VARIANT 128: note = Ancestral polymorphism is A, Derived polymorphism is V
  VARIANT 267..307: note = Derived polymorphism lacks residues 267 to 307
MAKAPLPLPSLLVLAAFFFHHPCCTAQGRAENISEVEAAVRARASELLRDATSQLVDLPLPANLSGAGVRASALSVRSNALWAGGVNTTGFTVPPRVVPVPFARRLAIVFERFVGNSTAAFAAPQRYALAAPVAGLLAYDASAGPDARVSLRALGAPVRVEFKDDLSAAAALDKGFEFDATTARCVTFAASGEVVATHAVAPGSACAVNGTGHFGIAVLLPETPPPASAVRARWWAWTVGVGAGGVLGASALTLSVAGAVSWTRMRRREEMDRRAMAGEELGRMTVRGSRMPSAKVVRTRPELEERS

SEQ ID NO: 15825 - protein, 194 aa, Zea mays
  VARIANT 39: note = Ancestral polymorphism is Q, Derived polymorphism is H
  VARIANT 41: note = Ancestral polymorphism is N, Derived polymorphism is S
  VARIANT 55: note = Ancestral polymorphism is L, Derived polymorphism is M
  VARIANT 65: note = Ancestral polymorphism is R, Derived polymorphism is M
  VARIANT 71: note = Ancestral polymorphism is C, Derived polymorphism is Y
  VARIANT 75: note = Ancestral polymorphism is K, Derived polymorphism is N
MIGVGKAKQYANVLDKPLSRGRQEVSLSAFAFLFSELVQYNQTQVDNITELERRLEDAGYAVGARVLELLCHREKGNRRETRLLGILSFIHSTVWKVLFGKVADSLEKGTEHEDEYMISEKELLVNRFISVPKDMGAFNCGAFVAGIVKGVLDNAGFPAVVTAHFVPIEGQQRPRTTILIKFAEEVLHREARLG

SEQ ID NO: 15826 - protein, 136 aa, Zea mays; identical to SEQ ID NO: 3315
  VARIANT 86..136: note = Derived polymorphism lacks residues 86 to 136
  VARIANT 87: note = Ancestral polymorphism is S, Derived polymorphism is C
  VARIANT 88: note = Ancestral polymorphism is S, Derived polymorphism is F
  VARIANT 103: note = Ancestral polymorphism is G, Derived polymorphism is A
  VARIANT 111: note = Ancestral polymorphism is C, Derived polymorphism is Y

SEQ ID NO: 15827 - protein, 315 aa, Zea mays
  VARIANT 73: note = Ancestral polymorphism is K, Derived polymorphism is N
MPEAATVVYTERKRKIKKEPAETATVPKLVRVFCDDLDATDSSGDDEAAASGGVAARGARKFILEIFTEGHRKGCNATATIPAPGGGKRKAPATTLAPEEPRYRGVRRRPWGKYAAEIRDPHKGERLWLGTFDTAEEAAREYDSAARRLRGPSATTNFPAPPTPSDRVPAVRELSSAEESDSDETHTVSSPVSVLQEAMPGETAAAVGPPAPKPTDDAADPAAAKKDAPRGDGGLSHFSADAPLPQLGDDAFSFAPLGGVPFDDLPAPQLDYCYLADDSALDLGSLPMWPGVDGCQFSDISDDDLFALSGPGAPN

SEQ ID NO: 15828 - protein, 303 aa, Zea mays
  VARIANT 35..303: note = Derived polymorphism lacks residues 35 to 303
  VARIANT 55..303: note = Derived polymorphism lacks residues 55 to 303
  VARIANT 56..303: note = Derived polymorphism lacks residues 56 to 303
MDGFGHDGFGDDGLRDLFPRSDQTVCLGGYDLFSQSESSIPHGDPHDFQALDLNSQVQEFPDLLMYTGIIEGSGARVTGGGRAFSAAGLRAPRQGTHGGGWTVSAVGLRAPRNNTRGGGRGRSMSARADSGRARAGTMGAAGGTSSCGSMVSGVVGRGSRSMSAGAASVGGVGHGGRWVATSGGAQDVVGEETINLDGEQEGADEGFAPDPKTPEWKKLKYGSPDYIDELEEMFQDIVVDGSSSYIPEQEFNEQGTTEVDEVEDEATQGMEDELSPMSTSTRKRLSSTRSTTSSPGKKAKTPW

SEQ ID NO: 15829 - protein, 523 aa, Zea mays
  VARIANT 232: note = Ancestral polymorphism is R, Derived polymorphism is C
  VARIANT 128: note = Ancestral polymorphism is R, Derived polymorphism is S
MNGTTGEPTSTETNKKQPTGEPTSTETNKKQPAGEPTSTETNKKQPAGEPTKLRPGGVSSAPPYESMLRSTMYERLRAQHPAEFEPASVFFTHDERSFIDRRKSLRVKAALVYEAVTGRHEDDDQMQSAKILLLALAKKCHSKMHPETAVVHGGGRGTGTGIRSCVSLHLYSALHAAGETGGDAADETGWDDKMMRVLDGIFLVVGFLPKLNEAISSSNADRDSVDQSFRSRHMLEMVADVVKLENQLLWLQDLLDVAGHIEAVIKETVEQHDFRDVKKAMGREYKQEVTAQNLADVIHRFCWYYSPFATKKPAPDSPFKDVVANKEMAAKRTLLDCLHMSVVKPSSHGKGGSGGIGRPSRMPTARDLWRSGVRLQASENGRAEIEFAQPTLWLPALVYDFKLATVARNLLVLEYDEEQSKPITRYFQMMNEIVEDAADVRILRRAGVVRGGQEVHELIKNIDSRAMYPSVYMAMDREIDKVREYHDKRMASFFVRNRPGVIWASSVAAISMAAVVASMRKRG

SEQ ID NO: 15830 - protein, 492 aa, Zea mays
  VARIANT 70..492: note = Derived polymorphism lacks residues 70 to 492
MSQRRRPRRRSCHAVAPVDKTTTDRDHATPLVMDVDRVSHPAETTSGRSDDGEGELAARWREIHGSDHWEGQLDPIDAVLRGELIRYGEFAQACYDSFDYDRFSPYCGSCRFPAKTFFQDVGLGGAGYQVSRYLYATCNDLKLPNFGGRKHSSAANDKLWSELGTFIGYVAVSTDEETARLGRRDIAVSWRGTITRLEWVADLTANQKRLSELGVPCPDPDVKVEMGFAELYTGKDAACRFCRYSAREQALAEVRKQVELYHGRGEQVSVTVTGHSLGSALAMLNAFDVAETGANASPDGRKAPVCVFSFAGPRVGNLRFRERFQRELGVRALRVFNVHDGVPKVPGVFFNDAAFPEAVLRVVDGLGAGGVYTHLGVPLALDHKVSPFLKETMDISCYHNLEAHLHLLDGYRGSGEGFQLRGRDPALVNKSADFLRDEHMVPPVWYQAENKGMVRTEDGRWVLPPRHRDIDEHPDDTDHHLQQLGVILTAST

SEQ ID NO: 15831 - protein, 547 aa, Zea mays
  VARIANT 255: note = Ancestral polymorphism is L, Derived polymorphism is H
  VARIANT 484: note = Ancestral polymorphism is E, Derived polymorphism is G
MAYHLISSPLFLLAQLLAVAVPLLLLLLHQRSSIRRRRRSSSSRSAKQGGQLLPPSPPALPIIGHLHLVSDLPHVSLRDLAAKHGGDDGLMLLRLGAVPTLVVSSPRAAEAITRTHDHVFASRPTSTLSDEILYGSSDIAFSPYGEHWRQARKLVTAHLFTVKRVHSYRRARKEEVRLVVAKVREAAVAGTATDMSLAMNTFANDIISRAVSGKFFRAEGRNKLFRELVEANSALFGGFNLEDYFPGLARALGFLSRRLLFLRNRRRVQETHRRWDELLETILSDHEGRRGSVSVDGGGDFTDVLLSVQTEYGMTRDHLKAILVDMFGAGTDTSSLVLELAMAELMRNPQQMAKLQAQVRRHTPEGQETVEEENLSDMPYLRAVVKETLRLHPPAPLLVPHLSLADCVVDGYHVPSGTRVIVNAWALGRDPGSWEKPEEFLPERFMDGGSAAGVDIKGNHFHFLPFGAGRRICPGLNFGMATVEIMLANLVYCFDWQLPMGMEEKDVDMTEVFGLTVHPKEKLMLVPKLPATAAPTATARQLHPPSC

SEQ ID NO: 15832 - protein, 79 aa, Zea mays
  VARIANT 43: note = Ancestral polymorphism is Y, Derived polymorphism is D
MGKKAPKLDTDLTCPFCNHPGIVQCNIFFKERRIFVVASCSVDKETYATKQGPIYTRATRTFYRSPDCIARGSRKDSDM

SEQ ID NO: 15833 - protein, 91 aa, Zea mays
  VARIANT 27: note = Ancestral polymorphism is C, Derived polymorphism is W
MGKRKSRSSKLAAQPKKAPKLEKVFTCPFCNHPESVKCLIDLKLGYAEASCLICEESYCTVPHNLTAPTDIYHEWIDECERANDDARRSRR

SEQ ID NO: 15834 - protein, 285 aa, Zea mays
  VARIANT 80: note = Ancestral polymorphism is R, Derived polymorphism is C
MELFPNGGFVRLRSRARDKYVHADADASGVSLRPLGAAPSVNAVWKPEHWPGEEDIFLLQGAAYGRYLAVSDQDAPPGHRGVRAVQRDYNSPHVDAPFMWTAFRVDADQNYVRLHNHQRWLRANGRHRYWNNVVTVDTRNGSLTTMMQWRVEAIPVSPQPLPLLPPPQQPTIHVSRGLFKRRAKVHPFAGRMIRHVQMDDDGFIHDKPEFNFNDYSVSNLRTELALRQGDENITLCLRAGIYALAIPLITDLPHNTDPLDIIVVTTGSPGFEMLEYPQFDEPPEP

SEQ ID NO: 15835 - protein, 652 aa, Zea mays
  VARIANT 533: note = Ancestral polymorphism is I, Derived polymorphism is F
  VARIANT 455: note = Ancestral polymorphism is I, Derived polymorphism is F
  VARIANT 442..652: note = Derived polymorphism lacks residues 442 to 652
  VARIANT 413: note = Ancestral polymorphism is L, Derived polymorphism is P
  VARIANT 405..652: note = Derived polymorphism lacks residues 405 to 652
  VARIANT 398..652: note = Derived polymorphism lacks residues 398 to 652
  VARIANT 373: note = Ancestral polymorphism is R, Derived polymorphism is C
  VARIANT 360: note = Ancestral polymorphism is P, Derived polymorphism is L
  VARIANT 349: note = Ancestral polymorphism is A, Derived polymorphism is V
  VARIANT 227..652: note = Derived polymorphism lacks residues 227 to 652
  VARIANT 189..652: note = Derived polymorphism lacks residues 189 to 652
  VARIANT 136..652: note = Derived polymorphism lacks residues 136 to 652
  VARIANT 117..652: note = Derived polymorphism lacks residues 117 to 652
  VARIANT 80..652: note = Derived polymorphism lacks residues 80 to 652
MASGTPFVGLRCPVLTGVKMLPTKYLSGAQKRNKRKRENQLIESQKGAIHRFFSASTNVPPKDNPKDLEEDDQDTHDQEQEQNLDEVQINQDDEDNQVIQDGDGEESFSEIFDPKTWDNLDNKRRDILIEKGPMRELNLQFPKDNLGRHFSYTFYQRKLSNSEIVDRKWLVYSKHVDKVYCFCCRLFKSNETKSLLAHAGLSDWKHLSGRLKQHENSTEHMRNMNTWNELRSRLSKNKMIDDDLQREIAKEKERCRQVLVRIVAAVKFCAKNNLPLRGTNEKIYQDSNGIFLGSIEMIAEFDTVMQEHIRHIQNNEIHHHYLGHNIQNELILLIADTVRRYIFSIIKGAKYFSIILDCTPDKSHEEQMTLIVRCVNISSSTPRVEEFFLCFLPVDDTSGFGLFTELMDRLELLELNVEDFLCGMVIWHDILFYINMVSKKLQSKTVCMDAALEQIKGVVLYFKKYRAEGFSRIIDIAKEIAEEMDVELVFPRSRQAKRKKHFDEQNDQNEEEALSAIESFRVNYFLVMIDMAIASWNSRFEQMEIFENIFGFLLNSERLKSLDDRDLRKCCTTFAKTFTHDDSSDIDLNDFISELQVLQVTLPDVLMIASEILQFITIADCYPNVSIAYRILLTKVKWLGYLFYREGCIDKC

SEQ ID NO: 15836 - protein, 284 aa, Zea mays
  VARIANT 1: note = Ancestral polymorphism is M, Derived polymorphism is R
MELFPHGGFVRLRSRARDKYIHADADASGVSLRPLGAAPSVNAVWKPERWPSEGDFLILQGVAYGRYLAVSDKDAPPGHRGVRAVQRDYNSPHAEAPFLWTAFRVDADQNYVRLHNHQRWLRANGRHRYWNNVVTIDTRNASLTTMMQWRVEEIPVSPEPLPLPPPPQQPTIHVSRGLFKRRAKVHPSGRMIQHVRMDDDGFILDNWPDFNFDDYSVSNLRAEVALRQDDENITLCLRAGKHALLIPLITDLPHNTDPLDIIVMPTGSPGLDAIEYPQFDAPEP

SEQ ID NO: 15837 - protein, 281 aa, Zea mays
  VARIANT 238: note = Ancestral polymorphism is R, Derived polymorphism is L
MELFPHGGFVRLRSRARDKYVHADVDASGVSLRPLGAAPSVNAVWKPERWPSEGDFLILQGVAYGRYLAVSDKDAPPGHRGVRAVQRDYNSPHAEAPFLWTAFRVDADQNYVRLHNHQRWLRANGRHRYWNNVVTIDTRNASLTTMMQWRVEEIPVSPEPLPLPPPPQQPTIHVSRGLFKRRAKVHPSGRMIQHVRMDDDGFILDNWPDFNFDDYSVSNLRAEVALRQDDENITLCLRAGKHALLIPLITDLPHNTDPLDIIVMPAGSPVVLEVMLYLVVS

SEQ ID NO: 15838 - protein, 118 aa, Zea mays
  VARIANT 65: note = Ancestral polymorphism is A, Derived polymorphism is T
MKLKQLEGLLGGLTQFSDPKLELEQYATGPHIASRMLYMAENSFNDITGKVVADFGCGCGTLAVASALLDAEHVLGIDIDPQSLELAQENAADLEIYRQYSHIYVVQNANLHLPVKAC

SEQ ID NO: 15839 - protein, 165 aa, Zea mays
  VARIANT 109: note = Ancestral polymorphism is D, Derived polymorphism is G
  VARIANT 97: note = Ancestral polymorphism is A, Derived polymorphism is V
  VARIANT 70: note = Ancestral polymorphism is G, Derived polymorphism is S
  VARIANT 39: note = Ancestral polymorphism is L, Derived polymorphism is F
  VARIANT 17: note = Ancestral polymorphism is P, Derived polymorphism is S
MKLKQLEGLLGGLTQFSDPKVLLTAPPPPPPPLGWPFFLPFSYPARFRLAQPRQKGGGKAEEYLTFATNGVFFYNEMALLGVAGAGAVCDGPSHRVADALHGVSFFCWDSLGKRRRAFSHVLGIDIDPQSLELAQENAADLEIYRQYSHIYVVQNANLHLPVKAC

SEQ ID NO: 15840 - protein, 951 aa, Zea mays
  VARIANT 449..951: note = Derived polymorphism lacks residues 449 to 951
  VARIANT 627: note = Ancestral polymorphism is L, Derived polymorphism is S
MAEIVTGAMGTLLPKLANLIKEEYNLQKKVRGEIMFLETELKSMEAALIKVSEAPIDHPPDVQVKLWTREVRELSYDLEDSIDRFMVRVGDGKPHSFKGFIDRSLHLLTRGRIQHSIGIDIKEIRSRIKDVSERRDRYKVDLVPSKPVGRSIDNLRLSALYRKATELVGAEEKSSDLVKRLMEGDKEASKQPVVLSIVGFGGLGKTTLANLVYEKIKGQFVCGAFVYVSHNPDVVKVFKNMLYQLDGDKYRDINQGTWSEEQLIWELRKFLLHKRYFIVIDDIWNTSVWETIQCSLMHNECGSIIIITTRNIDVAKQAGSVYQMEPLSLSDSTKLFCQIIFGSEDKCPPANLAEVAGKILQKCGGVPLAIITMASMLANKTGKEINTHSYWSHVYQSMGYGLDGSTNVKNMRRILSVSYYDLPSHLKTCLLYLSLYPEDYRIRTRGLIWKWIGEGFVHEEQGKSLYEVGKDYIEELVNTSMLEPVGIGHDGKTVSCRIHDMVLDLISFLSNEEHFLTKVGGQQPVSLDLPKKVRRLSLQISQEEEAKQLATMSFSHVRSLTVSTEVFQLTPKLSAFLVLRVLNLKKCNGVNNHHFKDICNMFQLRYLSLNAKFITEIPREIRNLQFLQVLDITNLGHKVKMTTIIHLRQLLRLCSRSGWSIKQLDGFGKLTSLQEVKGTITIESPSMLHDLGCLTNLRTLGINFRDWDESYEEPFIQCLSNLVSLKSMKIKGTMMSSLCSECDKLYPGPQQLCSIDMKSLARTVIMTRVPRWMSSLCSLSSIKITLLALGVQDIHVLGSIPSLRCLSVHVKETRDERLVIDKCYPFRCLTEMQIDYESMAVVFAPGSMQNLKELHLLFGVKEVMHKYGDCNFGLEHLMSLEHVSVKTMYTIMPEEVEAVKDEFQKSLDMNPGKPTLIVDYLYPKERKIRSQAQAIRAAILFANAGRIPATD

SEQ ID NO: 15841 - protein, 47 aa, Zea mays
  VARIANT 46: note = Ancestral polymorphism is C, Derived polymorphism is S
  VARIANT 7: note = Ancestral polymorphism is R, Derived polymorphism is M
  VARIANT 1: note = Ancestral polymorphism is M, Derived polymorphism is L
MLSINFRCLLKDDGKGVREPLDEVVCNEMSSKCYKVFLIMLEWLGSR

SEQ ID NO: 15842 - protein, 263 aa, Zea mays
  VARIANT 246: note = Ancestral polymorphism is E, Derived polymorphism is D
MATTATEAAPAQEQQANGNGEQKTRHSEVGHKSLLKSDDLYQNHFHQYILDTSVYPREPESMKELREITAKHPWNLMTTSADEGQFLNMLIKLIGAKKTMEIGVYTGYSLLATALALPEDGTILAMDINRENYELGLPCIEKAGVAHKIDFREGPALPVLDDLIAEEKNHGSFDFVFVDADKDNYLNYHERLLKLVKLGGLIGYDNTLWNGSVVLPDDAPMRKYIRFYRDFVLVLNKALAADDRVEICQLPVGDGVTLCRRVK

SEQ ID NO: 15843 - protein, 129 aa, Zea mays
  VARIANT 89: note = Ancestral polymorphism is E, Derived polymorphism is K
  VARIANT 60..129: note = Derived polymorphism lacks residues 60 to 129
  VARIANT 49: note = Ancestral polymorphism is N, Derived polymorphism is Y
  VARIANT 32..129: note = Derived polymorphism lacks residues 32 to 129
  VARIANT 26: note = Ancestral polymorphism is G, Derived polymorphism is D
MAASHGTGTLKSTSINGVKLYSLTGGRYVAPWVVVKKKRILRKDKEVENLCRYELPNESWEVNLPAEKVSPELPEPTLGIKFARDGIQEKEWLSMVAAHSDAWLLSVAFYLGARFGFNKNYRLIFIPSL

SEQ ID NO: 15844 - protein, 135 aa, Zea mays
  VARIANT 5: note = Ancestral polymorphism is E, Derived polymorphism is K
  VARIANT 10: note = Ancestral polymorphism is R, Derived polymorphism is M
  VARIANT 112: note = Ancestral polymorphism is G, Derived polymorphism is S
MGVTKVKGKRAVDLKMGSITRDKVQDKYTQYWSFFRRPKETATKAASVEKVPAFVDTFYNLVTDIYEWGWGQSFHFSPSLLGHSHRDATRVHEERVTDLLGARPGHRLLDIGCGVGGPMRAIAAHSGSNDTGFGG

SEQ ID NO: 15845 - protein, 177 aa, Zea mays
  VARIANT 51: note = Ancestral polymorphism is G, Derived polymorphism is S
  VARIANT 67: note = Ancestral polymorphism is P, Derived polymorphism is S
MEVDATAFCPPPQPAPAASPASKPPAPVLGAGGAVAPVAGHGRGGGRQYRGVRMRKWGKWVAEIREPNKRSRIWLGSYSTAVAAACAYDTAVFCLRGRSARLNFPDQLDGAAVADNPEDGAGLTAAAIRKKAAEVGARVDALHCGGGTSPQPLSFHRRRPKNPDLNREPTPETSDDE

SEQ ID NO: 15846 - protein, 328 aa, Zea mays
  VARIANT 49..328: note = Derived polymorphism lacks residues 49 to 328
  VARIANT 125..328: note = Derived polymorphism lacks residues 125 to 328
  VARIANT 129..328: note = Derived polymorphism lacks residues 129 to 328
  VARIANT 207..328: note = Derived polymorphism lacks residues 207 to 328
  VARIANT 246..328: note = Derived polymorphism lacks residues 246 to 328
  VARIANT 249: note = Ancestral polymorphism is A, Derived polymorphism is G
  VARIANT 303..328: note = Derived polymorphism lacks residues 303 to 328
MSFMGHNGEEGINSTPTKGHISEVDPSEVSGTTSPKLPSNSEEVHVAEEKLDSSTETLASKVGDAESSEKSQSTGHPSIVEDNQIHQVSKYSSPSDEAQPNRLKGSVGDLLEGSASSATTKIHQSAYAEKFDPSSGSFAQRNSKLLKENVNRQLEQPDYYVDRNHIVVLWCSSPSTNADEYRDNVVAADFGDSVFNQFLDKVCRLRQMVVDGVPHGVEVTLGMALTTFRAARGVAAKHEAKLFPDWHLAYLVYAIVASLTDLSMALWDLYDLYEVSRDHCYIPGGISHFIRAFTNEILIVYGQNVPRIQYGGDGFRPTVDVTPHASRA

SEQ ID NO: 15847 - protein, 1128 aa, Zea mays
  VARIANT 250..1128: note = Derived polymorphism lacks residues 250 to 1128
MGAVGGNLPPPSLDRGRRMASWPLDRPLANRIRAEKREIKVGDKVAGRHGNKGIISKILPRQDMPYLQDGTPVDMVFNPLGVPSRMNVGQIFESSLGLAGDLLKKHYRIAPFDERYEQEASRKLVFSELYEASKQTKNPWVFEPEYPGKSRIFDGRTGDPFEQPILIGKSYILKLIHQVDEKIHGRSTGPYSLVTQQPVRGRAKQGGQQIGEMEVWALEGFGVAHILQEILTYKSDHLIARQEILNATIWGKRVSNHEDPPESFRVLVRELRSLALELNHFLVSEKNFQEIATGAGAIREQLADLDLRIIIENSLVEWKELEDEGYSGDEWEDRKRRIRKVFLIRRMQLAKHFIQSNVEPEWMVLCLLPVLPPELRPIVYRSGDKVVTSDINELYKRVIRRNNNLAYLLKRSELAPADLVMCQEKLVQEVVDTLLDSGSRGQPTRDGHNKVYKSLSDVIEGKEGRFRETLLGKRVDYSGRSVIVVGPSLSLHQCGLPLEIAIKLFQLFVIRDLITKRATSNVRIAKRKIWEKEPIVWEILQEVMRGHPVLLNRAPTLHRLGIQAFQPTLVEGRTICLHPLVCKGFNADFDGDQMAVHLPLSLEAQAEARLLMFSHMNLLSPAIGDPICVLTQDMLIGLYVLTIGNRLGARGNAAQVHQLVGMRGLMADPQGQMIDLPIQSNLREGLSLTEYIISCYGARKGVVDTAVRTADAGYLTRRLVEVVQHIIVRRRDCGTIQESEQVIAEIRAGTSTLHFKEKDQDQMNTYSFSVDGRYIFDFSMANDQVSHRLLDTFGKKDREILDYLTPDRIMFNGHWNCFYPSILQDNSDLLVKKRRNRLVVPLQYHQEQEKERISCLGISMEIPFMGVLRRNTIFAYFDDPRYRKDKRGSGIVKFRYRTLEEEYRTQEEEYRTREEEYRTREEDSEDEYESPENKYRTREGEGEYKILEDEYRTLEDEYETLEDEYGILEDEYRTLEKDSEEEYGSLENKYRTREGEGEYEILEEESEEEYGSSEDGSEKEYGTLEEDSEEDSEEDSEDEYGSPEEDSILKKEGFIEHRGIKEFSLKYQKEVDRFFFILQELHILPRSSSLKNKSSKRVQLIHYRRISKGELRIGMNVYQEFLGFPGDS

SEQ ID NO: 15848 - protein, 762 aa, Zea mays
  VARIANT 65..762: note = Derived polymorphism lacks residues 65 to 762
MCQERPPTDTKKKTWIQMMIATGCIGMRTMSQRETFGPQTEDVGSFDMSTEAVRRKHHVPRGERQTILARRNQQFEAYIAKNVSTSIGDNISDADINNNVDDDDEVVIFGEDDDDDEGYIFDGQYEETNEYNEIDGTQDESIATDVPDPYDKAQGMMYHNIKSFGKEGGLDHKHLELYFYDDDPSLEHRYRKCREEQLQKDKEVIKQIVGILHGNPYFEHLRSMGHVENLDDYHISLNLDQTLDQKTYNTPLTSEVATVWIEGSERQSSSARVLCYMGRIGELGWHANIPKVGVSMVEVDAYRATHRASNANDEDAEYLSHLCVSVRDYYCYKFHIRLGVFNPILHGNRLFQQFAVDTYIKIESSRLDFICKNQDRLRADLYQGLVDSMLDGDIRVDKPFNDTTLQGKDSYPVYRRRDDGSNEKVRGCELDNRWVVPYNPCLLRLFNYHINVEACGSIKAVKYLFKYIYKGHDRVFVVMRDAGKADDVDEIKQYRDARWMTPPEALWRIYGFELSQISPPVMQLQLHLPNMHMVAFHERQMVERVVNRPGVDRSMLTAYFQANRLHEEACGIMYRDFPEWYTWQSGKGKVWQQRKRETLDSMSEDYQHRSQCKTHVVQMVLIDIRNMLQSMGKDIKTFPLPPIMDVYDDAIGTAREGGLFFVDGLGGTGKTYLYRVLLATLRSQGKIAVATATSGVVASIMPGGRTTHSRFKIPLTIDDGADEASMTKRQAMEAQDNSMRDIMGRPRLPFGGKTIVFGVDFR

SEQ ID NO: 15849 - protein, 170 aa, Zea mays
  VARIANT 7: note = Ancestral polymorphism is D, Derived polymorphism is Y
  VARIANT 14: note = Ancestral polymorphism is A, Derived polymorphism is E
  VARIANT 26: note = Ancestral polymorphism is A, Derived polymorphism is V
  VARIANT 55: note = Ancestral polymorphism is P, Derived polymorphism is L
  VARIANT 114: note = Ancestral polymorphism is R, Derived polymorphism is Q
MDLESSDLAALSAEELVRVSASIPRVALRAFALLTACLVFPLSFAVLAHSRFTHPILLAPSPRQWHFNNNPLSGGFPHELSLLRNLRSLWMFDNYIVGPFPAFIQNLTNLTDLRIYGTNLQGPIPKNFSNLSNLEVLMLGDLAGNHSYLNVIGAWANLSVLYVKRHPCSY

SEQ ID NO: 15850 - protein, 373 aa, Zea mays
  VARIANT 48: note = Ancestral polymorphism is D, Derived polymorphism is N
MASPFVWDDRGKLLANSLDCSPVELVSLALHSVLGGSPTGFHVVEESNRHFRFSVATKKVGFMVLALKRIISANFDVYFDLWGNGSPNWRKEYALWCREEDEKWTVVRRRSSRSSKLVSFGKNLVQDSPNKKHSPSGHFNKGFLRSAMKRKSKLIPHDTPTVQYQKDFVQIGSFKCPLQILNSYFKFRFSLKNRSLVSALVLVPAIFSRISPDLDREVLKEKQVISKVYKRQAPKKIEHIDKKTRSVRKKAAQQSHPLPARRSARINAVTKGLKVSFELGSTSGSREVPTQHLPLSLEDLNDLNSFPGPVKLKFLQNLLDFDGTYPEINDITLQKVAIEHCGVPPEEASVEVLLHPDPGAEGNIILAENTQEI

SEQ ID NO: 15851 - protein, 258 aa, Zea mays
  VARIANT 32: note = Ancestral polymorphism is P, Derived polymorphism is S
MNECNINNLTNRATSFAINCGGKQVEYSDLMPIMFSEDSTDLGGSGFHVNATSHWVVSHVGSDPFNESTGIVNTSDIFETNMQELYQTARTSTSSLWYYVVGLANGNYTVQLFFAEIVITHGPGKRLFDIDIQDQNIRKDFDITKEAGGSRKATNITYEVTVDNSILAIHLYWSGRGTCCIPYEGAYGPLVSAIKVTHSQDPKTSPPQAPHSDSARDDVKRRGVVAGIAALSIAAAVISSSVVYLWWKWVSLVKRPMA

SEQ ID NO: 15852 - protein, 250 aa, Zea mays
  VARIANT 15: note = Ancestral polymorphism is E, Derived polymorphism is D
MSRRYDSRTTIFSPEGRLYQVEYAMEAIGNAGSALGILAADGVVLVGEKKVTSKLLQTSRSAEKMYKIDSHLACAVAGIMSDANILINTARLHAQRYALSYQEPIPVEQLVQSLCDTKQGYTQFGGLRPFGVSFLFAGWDKHHGFQLYMSDPSGNYGGWKAAAVGANSQAAQSMLKQDYKDALTREEAVGLALKVLSKTMDSTSLTAEKLELAEVFLQPDTGEVQYQVCSPEALGKLLANSGLTQPTPEA

SEQ ID NO: 15853 - protein, 368 aa, Zea mays
  VARIANT 153..368: note = Derived polymorphism lacks residues 153 to 368
MAMAELNADEMPVFVAAVSDARPTDRTPLRTSARSWPPRSSPSRPQSPPTTSPRTSGSSSRASTSSSGSGAASAAVPCLRDVLTADDWVARKVAAEALALLALEHGDDLVSHKSSCITVFEAKRFDKVKIVCESMNRLIEAWKEIPDLDEEVCSLPSSQSRSSLSGDVAIHEDTASDGRYPADSSGSTSSPSITRRNSWPTNRQPQPDGSNNAINRKGSPPSIVAKKNLPSSHRSTDQFKKFEDMVVVTMAPDATPIKMVAEEKLLKEGNVRERLEARRVLFQKTGDKGYKKVAGPKSGSRVVPYSGEGDGVTSCYDEGKRVVETLMFDYHRQHGIEIRIARIFNTYGPRMNIDDGCVVSNFIDQAVR

SEQ ID NO: 15854 - protein, 567 aa, Zea mays
  VARIANT 490..567: note = Derived polymorphism lacks residues 490 to 567
MAYHLISSPTFLLAQLLAVAVPLLLLLLYHGSSIRRRRRSSRSAKQGGQLLPPSPPALPIIGHLHLVSDLPHVSLRDLAAKHGGDDGLMLLRLGAVPTLVVSSPRAAEAITRTHDHVFASRPTSTLSDEILYGSSDIAFSPYGEHWRQARKLVTAHLFTVKRVHSYRCARKEEVRLVVAKVREAAVAGTATDMSLAMNTFANDIISRAVSGKFFRAEGRNKLFRELVEANSDLFGGFNLEDYFPGLARALGFLSRRLLFLRNRRRVQETHRRWDELLETILSDHEGRRGSVSVDGGGDFTDVLLSVQTEYGMTRDHLKAILVDMFGAGTDTSSLVLELAMAELMRNPQQMAKLQAQVRRHTPEGQETVEEENLSDMPFLRAVVKETLRLHPPAPLLVPHLSLADCVVDGYHVPSGTRVIINAWALGRDPGSWEKPEEFLPERFMDGGSAAGVDIKGNHFHLLPFGAGRRICPGLNFGMATVEIMLANLVYCFDWQLPMGMEEKDIDMTEVFGLTVHPKEKLMLVPKVARVLQLLVNNSIVQVADRRDSRSIMHVYGLFGVENCMQRV

SEQ ID NO: 15855 - protein, 1016 aa, Zea mays
  VARIANT 480..1016: note = Derived polymorphism lacks residues 480 to 1016
  VARIANT 430..1016: note = Derived polymorphism lacks residues 430 to 1016
  VARIANT 377..1016: note = Derived polymorphism lacks residues 377 to 1016
  VARIANT 240..1016: note = Derived polymorphism lacks residues 240 to 1016
MTWFRAASGAARLALRRSLATRTPPAAATRCGRCFHSTAMRPRSAAPVPRAVPLSRLSDSFLDGTSSVYLEELQRTWEADPSSVDESWDNFFRNFVAQASPSAGVSGQTIQESMQLLLLVRAYQVNGHMMAKLDPLGLDDRAVPEDLRLGLYGFTEADLDREFFLGVWRMSGFLSENRPVLTLREILNKLQQAYCGPIGYEYMHIPDRDKCNWLREKIETAKPKEYNKDRRLVMLDRLIWSTQFENFLATKWATAKRFGLEGGETLIPGMKEMFDRAADLGVENIVIGMPHRGRLNVLGNVVRKPLSQIFSEFTGGTRPVEGEDGLYTGTGDVKYHLGTSYDRPTRGGNRIHLSLVANPSHLEAVDPVVIGKTRAKQFYSNDADRTKNMGILIHGDGSFAGQGVVYETLHLSALPNYTTGGTIHIVVNNQVAFTTDPRAGRSSQYCTDVAKALNAPIFHVNGDDLEAVVCVCELAAEWRQTFHSDVVVDLICYRRFGHNEIDEPSFTQPKMYQVIKNHPSSLKLYEQKLLGTGEVMKEDVQRIHDKVNRILNEEFAKSKDYVPNKRDWLSAYWTGFKSPEQISRVRNTGVKPEILKRVGQAITTLPENFKPHRAVKKIFELRAAMIESGQGIDWAVAEALAFATLIVEGNHVRLSGQDVERGTFSHRHAVLHDQETGAKYCPLDHVAMDQNEELFTVSNSSLSEFAVLGFELGYSMENPNSLVLWEAQFGDFANGAQVMFDQFLSSGEAKWLRQTGLVVLLPHGYDGQGPEHSSARLERFLQMSDDNPFVIPEMEPTLRKQIQECNWQVVNVTTPANYFHLLRRQIHREFRKPLIVTAPKNLLRHKDCKSNLSEFDDVEGHLGFDKQGTRFKRLIKDRNDHKQVEEGVNRLILCSGKVYYELDEERKKSERGDVAICRVEQLCPFPYDLIQRELKRYPNAEIVWCQEEPMNMGAYSYISPRLFTAMKALGRGSFEDIKYVGRAPSAATATGFLSVHAQEQSELVKKALQAEPIKFL

SEQ ID NO: 15856 - protein, 463 aa, Zea mays
  VARIANT 100..463: note = Derived polymorphism lacks residues 100 to 463
MAAAGVEPRPNPPPTMASDLPNGSKTKSRESDRRRRRRKVKKNKSAAEAGAQNEGGGASSSDAKENADPNPEPMVEVEIDQIYNVTLFQGKRGIEKQPFQLPDFIAATGIEKIRQAYIEKEDSKKLKQKQRERMQPKMGKMDIDYQVLHDAFFKYQTKPKLSSHGDLYYEGKEFEVKLREMKPGMLSHELKDALGMPDGAPPPWLINMQRYGPPPSYPQLKIPGLNAPIPPGASFGYRPGEWGKPPVDEHGRPLYGDVFGVLQQDEPSYDDEPVDRSKHWGDLEEEEEEEEEEEEEEPMEDEEMEDGIQSVDTISSLILSLRPTSTPTGVETPDVIDLRKLQRKETDKQAERPLYQVLEQKDKRIAPGTLYGSSHTYVLGAQDKSSAPKRVDLLKNQKSDKVDVTIQPDAMDDVVAAKYEEAREEEKLRNQKEDFSDMVAENAHKRKRKQEKEGKSKKKEFKF

SEQ ID NO: 15857 - protein, 409 aa, Zea mays
  VARIANT 348: note = Ancestral polymorphism is Q, Derived polymorphism is E
MAASSLPPPTHHKKKDTVIVISGPTGAGKSRLALEVARRLGGEIISADSVQVYRGLDVGSAKPSAAEMSLVPHHLIDILDTSDDYSAGAFFRDARRATQDVLDRGCVPVIAGGTGLYLRWYIYGKPNVPQSSMESTLAVWSELADFRENGQWEEAVELVVQAGDPRARDLSVNNWNRLSRSLEIIRSSGSPPSAFALPYDAFCEQHDTDLTEAPSSAGNYEAREMEYDFFCIFLASPRIELYRSIDLRCEEMLVDTGGLLSEASWLLDIGLQPRMNSASSAIGYKQAMEYLLHCRQNGGESTPQEFLDFLAKFQRTSRNFAKRQLTWFRNEKIYHWVDGSKPFEALVQFVCDAYHGCSARMVPESLEMKRENCVLKSRDLKTYRSMNRVFLGGDDCSHVLNWIRRTQSK

SEQ ID NO: 15858 - protein, 394 aa, Zea mays
  VARIANT 144: note = Ancestral polymorphism is K, Derived polymorphism is N
MATSSTALLHLVIPASRRRRHLVPRAAHSESAPPAASVDRRRFIAHTAAAAAVSPLVLPRWTPAARADEAPALSEWERIFLPIDSGVVLLDIAFVPDDPSHGFLLGTRQTILETKDGGNTWFPRSIPSAEDEDFNYRFNSVSFKGREGWIIGKPAILLHTSDAGESWERIPLSAQLPGNMVYIKATGEQSAEMVTDEGAIYVTSNRGYNWKAAVQETVSATLNRTVSSGISGASYYTGTFNTVNRSADGRYVAVSSRGNFYLTWEPGQPFWQPHNRAVARRIQNMGWRADGGLWLLVRGGGLFLSRGTGITEDFEEVQVQSRGFGILDVGYRSQEEAWAAGGSGVLLKTTNGGKSWMRDKAADNIAANLYSVKFLDDRKGFVLGNDGVLLRYLG

SEQ ID NO: 15859 - protein, 93 aa, Zea mays
  VARIANT 23: note = Ancestral polymorphism is S, Derived polymorphism is L
MTYISVFTEVILQFLTQFMIIMSDMVEFMKNLARMDVDMSAEERHLFSVGFKNTIGAKRIICSHEKKVTSDRQTGVMIDAYKKKVEEELRKVD

SEQ ID NO: 15860 - protein, 250 aa, Zea mays
  VARIANT 146..250: note = Derived polymorphism lacks residues 146 to 250
  VARIANT 91: note = Ancestral polymorphism is D, Derived polymorphism is Y
  VARIANT 84: note = Ancestral polymorphism is L, Derived polymorphism is Q
  VARIANT 41: note = Ancestral polymorphism is G, Derived polymorphism is V
MVTNASHTHGEREREREREREGEGRHRNSESPPRRSHHHRGLRPVRLRRSFCSRMSTESGELLGIDPVELRFPFELNKQISCTLQLTNKTDKQVAFKVKTTSPKKYCVRPNNSMVVPRSKADIVVTMQAQWDAPPYMHCKDKFLVQSAIMAKEIMSKEVTGDMFTKDSGNIVDEVKLKVVYTAPSSSQSEGFEDGNLGSLSYQELGYCLTITFWHFALISDSLQYPPSKSESGSFFARNKRTQRIRKNNL

SEQ ID NO: 15861 - protein, 188 aa, Zea mays
  VARIANT 155: note = Ancestral polymorphism is A, Derived polymorphism is T
MPRATASLRLQAAASSTSTATPREQQASSSSSSWPVPPPLPQQPAVSVNSDTVMILASFLCALVCVLGLALVSRCTCRPASSSTATGIPQQARPPKGLKKKAIDALPTAPFTAAASSDCAICLDEFSDGDALRVLPRCGHAFHVACVDAWLRTRATCPSCRAGIVIAHQPLMAASLSPGYLDPSVVSI

SEQ ID NO: 15862 - protein, 83 aa, Zea mays
  VARIANT 42: note = Ancestral polymorphism is L, Derived polymorphism is F
  VARIANT 37..83: note = Derived polymorphism lacks residues 37 to 83
  VARIANT 21: note = Ancestral polymorphism is S, Derived polymorphism is F
  VARIANT 13: note = Ancestral polymorphism is A, Derived polymorphism is V
MDCHGRGKGNEKAILDSGESSGAAGGLSKTYVVTKEGKRIELKGTIKDPWSHGTKGGGFETWGTNSFVSKINKKKDANSQEHY

SEQ ID NO: 15863 - protein, 905 aa, Zea mays
  VARIANT 446..905: note = Derived polymorphism lacks residues 446 to 905
  VARIANT 398..905: note = Derived polymorphism lacks residues 398 to 905
MAEIAVLLVLKKIAIALAGETLSFAKPLLAKKSESVAALPDDMKLISNELELIRAFLKEIGRKGWKSEVIETWIGQVRRLAYDMEDTVDHFIYVVGTHDQMGSCWDYMKKIAKKPRRLVSLDEIASEIKKIKQELKQLSESRDRWTKPLDGGSGIPAGSYETEKEMYLPGHDYTISDEELAGIDENKQTLISSLKFEDPSLRIIAVWGMGGVGKSTLVNNVYKNEGSNFDCRAWVSISQSYRLEDIWKKMLTDLIGKDKIEFDLGTMDSAELREQLTKTLDKRQYLIILDDVWMANVFFKIKEVLVDNGLGSRVIITTRIEEVASLAKGSCKIKVEPLGVDDSWHVFCRKAFLKDENHICPPELRQCGINIVEKCDGLPLALVAIGSILSLRPKNVDEWKLFYDQLIWELHNNENLNRVEKIMNLSYKYLPDYLKNCFLYCAMFPEDYLIHRKRLIRLWIAEGFIEQKGACSLEDTAESYLKELIRRSMLHVAERNCFGRIKCIRMHDLVRELAIFQSKREGFSTTYGGNNEAVLVGSYSRRVAVLQCSKGIPSTIDPSRLRTLITFDTSRALSVWYSSISSKPKYLAVLDLSSLPIETIPNSIGELFNLRLLCLNKTKVKELPKSITKLQNLQTMSLENGELVKFPQGFSKLKKLRHLMVSRLQDVTFSGFKSWEAVEPFKGLWTLIELQTLYAITASEVLVAKLGNLSQLRRLIICDVRSNLCAQLCGSLSKLCQLSRLTIRACNEDEVLQLDHLTFPNPLQTLSLDGRLSEGTFKSPFFLNHGNGLLRLMLFYSQLSENPVPHLSELSNLTRLSLIKAYTGQELYFQAGWFLNLKELYLKNLSRLNQIDIQEGALASLERITMKHLPELREVPVGFRFLKSLKTIFFSDMHPEFESSFQKEM

SEQ ID NO: 15864 - protein, 93 aa, Zea mays
  VARIANT 10..93: note = Derived polymorphism lacks residues 10 to 93
  VARIANT 2..93: note = Derived polymorphism lacks residues 2 to 93
MQGVHGLGGGWRLGSSTVASSSCSTTRHGSSPRASAPLQVLHIIGREDRVQIDDARRLHHRAVTRERTRNNEGIFLYRARVLPHDLVKGTTEP

SEQ ID NO: 15865 - protein, 90 aa, Zea mays
  VARIANT 49: note = Ancestral polymorphism is A, Derived polymorphism is S
  VARIANT 37: note = Ancestral polymorphism is A, Derived polymorphism is T
  VARIANT 21: note = Ancestral polymorphism is L, Derived polymorphism is P
MAEVRKGPGRYGREFKLGGGLAVKSKGAEKPTKGRKAKAGKDPNKPKRAPNAFFVLMGEFRKEFKEKNPKIKSVAAVGKAVGDRWKSLSE

SEQ ID NO: 15866 - protein, 617 aa, Zea mays
  VARIANT 224: note = Ancestral polymorphism is R, Derived polymorphism is W
MQPPPPPSSRRRAITRALLCLLFLAALSLAAMIAFATSTPSSASSPARRALQIVPPRRRQPLTAVRKDGGENEARPASDSSGLDHPDAVLLPDWEVLVLLRPDDDAHGTTAANATCVFPGGATSPARQLGRMPTSGRRAYTCVMPRPERASSRPFRAPRLVVAATAPSSPAAAARSKTPEMTRWNGRLVYDSAALADDGGGGVLVFAKGVNPRQGVNRDAADIRCIYYRRCTAGEVVVASLPAATSAQHVFRCPAPPAAGAQQLRVTLAVAGEDPIPSVATYMPLPPAAQTTTTKKEKELICACTMVRDVAKFLREWVVYHAAVGVDRFHVYDNGSGDDLEGEEAGFSYAAAAHRDSCEWMAFIDVDEFIFSASWAGRGEAAKSMLRLVVDAVEPDVGQVTLGCRDFGPSGQTRHPQEGVTQGYTCRRRAEERHKSVVRLDSVAPSLVNSVHHFELRSEFRWERSKDARVNHYKYQAWDEFKAKFRRRVSTYVADWTDRVSFGSHIGNIMSNHFELRPEFRWERSRDARVNHYKYQAWDEFKAKFRRCVSTYVADWTDRVNNGSKDRTPGLGFEAVEPTEWSHMFCEVEDALLRDVTRRWFGVGFTGINHKRLEHSF

SEQ ID NO: 15867 - protein, 509 aa, Zea mays
  VARIANT 120: note = Ancestral polymorphism is M, Derived polymorphism is I
MAHGDFVTPENTPIAALHQALGDKKLKGQLSVKEKLYGQSAKAAANAEKWLMPNDGGILEPGHLEKTYRFSQEDILTEVDLLSSRKPFDMILPVLGPYNIGYTSNGRYMLVGGRKGHLAMMDMLHMDLIKEFEVRETVRDVTFLHNEQLYAVAQKKYPYIYNRHGTEIHCLKEHGKALKLQFLSKQFLLASINSFGQLHYQDVSTGEMVANYRTGLGRTDVMRGNPYNAVIGLGHAGGKVTMWKPTSVKPLVTMLCHHGPVTAVAFDRGGNLMATAGVDRKIKIWDLRKYEVVRSYPMRAQSLDFSQKGLLACSNGSQVEIYRDFGGHDYRLYMKHKIVKGYQVGKVVFRPYEDILGIGHSMGFSSILVPGSGEPNFDTFVDNPMETTKQKREKEVHALLDKLPPETIMLNPNTIATVRAPKKKEKKTKEEIEEEMADAVEAAKNTERKKKTKGRSKPSKRAKKKEEDVFKAKRPFLEQSDKVDGRPDKKQRIGELPKALQRFAKKPQS

SEQ ID NO: 15868 - protein, 376 aa, Zea mays
  VARIANT 121: note = Ancestral polymorphism is V, Derived polymorphism is L
MATNLGVFCRAPRPSPASTAAAPSQSLSPSSASVHIPHSTQRGRLAAAPPLPRCVASPTIANVKDQTEAEVAMGYTMTEICDKFIEFFMYMKPETKDWRKLLVFREEWQRYRGHFYKRCQVRIHIEADPSLKQKLVVLARKVKKIDDEIEKYMELFTELRENPADINAIVARRRKDFTGDFFRHLNFLVNAYNGLDERDGIVRLGAKCLSAIHAYDCTLEQLDIESAQLKFDDILNSSSLDGACDKIKSLAKAKELDSSLILLINRAWAAAKESTTMNDKVKDIMYHIYTTTKESLKSISPPEMKLLKTPSELHKWIKMLLDSYHLNKEETDFMDARKMSDPVIIQRLTLLKEMIEEEYMKRYIHPEEEEEPMDDS

SEQ ID NO: 15869 - protein, 424 aa, Zea mays
  VARIANT 177: note = Ancestral polymorphism is F, Derived polymorphism is I
MENLRSQNCHQGVAMEGVKFAPEKANTNRRALSDIKNIIGGPHQHLAVSKRALSEKPAAAAAANAKDQAGFVGHRPVTRKFAATLATQPTVALLDPIGSERLKRNADTAFHTPADMESTKMTDDSPLPMVSEMDEMMSPELKEIEMEDIEEAAPDIDSGDAGNSLAVADYVDEIYRFYRKTEGASCVPTNYMSSQTDINEKMRGILIDWLIEVHYKLELLEETLFLTVNIIDRFLARENVVRKKLQLAGVTAMLLACKYEEVSVPVVEDLILICDRAYTRADILEMERRIVNTLNFNMSVPTPYCFMRRFLKAAQSEKKLELLSFFMIELSLVEYEMLQFCPSMLAAAAIYTAQCTINGFKSWNKCCELHTKYSEEHLMVCSRMMVELHQRAAHGKLTGVHRKYNTSRYSYAAKSEPATFLLDA

SEQ ID NO: 15870 - protein, 480 aa, Zea mays
  VARIANT 171: note = Ancestral polymorphism is I, Derived polymorphism is K
MAVELAKQLLAVIGSYTPPLWATLIAGVFVIISVSLSLYLLFNHLSAYKNPEEQKFLVGVILMVPCYAVESYISLVNPSISVDIEIMRDGYEAFAMYCFGRYLVACLGGEDRTIEFLNREGGSGSAAPLLGQASEQRYVNHPFPMNYVLKPWPLGEWFYLVIKFGLVQYMIIKSICAILAVILESFGVYCEGEFKLNCGYSYTAVVLNFSQSWALYCLVQFYTVIKDELAHIKPLAKFLTFKSIVFLTWWQGIAIALLFNWGLLRGPIAQELQFKSSIQDFIICIEMGVAAVAHLYVFPAKPYELIGDRLVGDVSVLGDYASVDCPLDPDEVKDSERPTKFRLPQPDDHVRCSTAIKESVRDVVLGGGEYIVNDLKFTVNHAVEPINEKLHMISENIKKREKGKKKTNDDSCIGSPTSLTRVISGIDDPLLNGSLSDNSGPKKARRQHRKSGYAGAESGGESSDHGLGGFEIRGNRWITS

SEQ ID NO: 15871 - protein, 225 aa, Zea mays
  VARIANT 190: note = Ancestral polymorphism is E, Derived polymorphism is V
  VARIANT 181: note = Ancestral polymorphism is A, Derived polymorphism is T
  VARIANT 134..225: note = Derived polymorphism lacks residues 134 to 225
  VARIANT 111..225: note = Derived polymorphism lacks residues 111 to 225
  VARIANT 35..225: note = Derived polymorphism lacks residues 35 to 225
  VARIANT 21: note = Ancestral polymorphism is G, Derived polymorphism is A
  VARIANT 10: note = Ancestral polymorphism is T, Derived polymorphism is M
MSSEKMMKGTLEWFNATTGYGFITSIDYEVHVAEEKFDSSTETPTSKVGDAESSEISQSTGHPSKVEDNQIHQVSKYSSPSDEAEPNQLRGSVGDLPEGSASSATTKIHQSGDTETGKSIHTRMEDTFDRNILQAQLAESALEPAEPKESLAIEEVLVTTINGVPHGVEVKLGMALAAFRTARGVAAKHEAKLFLDWHLANLVYAIAASLTDLSMALWDLYDPYE

SEQ ID NO: 15872 - protein, 279 aa, Zea mays
  VARIANT 74: note = Ancestral polymorphism is T, Derived polymorphism is M
  VARIANT 88: note = Ancestral polymorphism is R, Derived polymorphism is T
  VARIANT 166..279: note = Derived polymorphism lacks residues 166 to 279
  VARIANT 174: note = Ancestral polymorphism is P, Derived polymorphism is L
MEHSYYASFGYHVTNFFAVSSRSGTPEDLKYLVDKAHSLTVLMDVVYNHASNNVTDGLNGYDVGQSTQESYFHMGDRGYHKLWDSQPRFLLSNLRYWLDELMFDGFRFGVISMLYRHHGINVGFTGNYKEYFSLDTDVDAVVYMMLASHLMHKLLPEATVVAENVSGMPVLCRLVDEGGVGFDYRLAMAIIDRWIDYLKNKDDSEWSMGEISHTLTNRRYTKKCIAYAESHHQSIVGDKTIAFLLMDKEMYSGMSDLQPASPTIDRGIALQKVPFLLKS

SEQ ID NO: 15873 - protein, 326 aa, Zea mays
  VARIANT 34: note = Ancestral polymorphism is K, Derived polymorphism is M
MAEQLDLPGFRFHPTEEELLEFYLKQVAHGRKLKFDIIPTVHLYRHDPWELPGLARIGEREWYFFVPRDGGRPAKQHHHQSSGARPSRTTERGFWKATGSDRAVRCAHDPKRLIGLKKTLVYYEGRAPRGTKTDWVMNEYRLPDACNNNNNNNNTVAGDSSAAAAASSTTTNNSPKEDIVLCKVYRKAVSLKELEQRVAMEELARATPSASHNAGSPADSMSSSDQDQQTQLGQGGVEIMITMPVGGISPPPPLPPPVMMSMKQEEEVAEPEAPLPAVLMRPSTLSLPQLEVAKQQQEWMQDPFLTQLRSPWMESWSPYYPSVLNF

SEQ ID NO: 15874 - protein, 322 aa, Zea mays
  VARIANT 223: note = Ancestral polymorphism is S, Derived polymorphism is F
MPRAVIPPPPDPRAPPAIAAVKPATSVPPPTPPPTCPRPRPRPLTTHRPILPPIVPAVEISPAREISSSQHPPTPILPSLAYGPTSSPQSPLRDALVILEVSSCSGSNSGVARTKSLTQDDLDFGFRPPRPRPPAARCPPPTSPLPSALEQWSCSSPGGVELWWEACKLEGNLNVKLSSYVRLATLTSSTIDRSSHKSVEFEIQSLLGKLQHINDAMSCCVASIATTTSVSQKLAHHHNILHEFTQVCSSHSRFVETPVSNRLKWWLARSFMEAGVHEDEGNLSSMREHADLQLFNILVLIKSIMFQLLKSTMVYNQRTEII

SEQ ID NO: 15875 - protein, 310 aa, Zea mays
  VARIANT 20: note = Ancestral polymorphism is S, Derived polymorphism is F
  VARIANT 106: note = Ancestral polymorphism is P, Derived polymorphism is L
MAMTRALAMVAMLATAALFFMSARAQQCGTQAGGALCPDCLCCSQWGYCGSTPDYCTDGCQSQCFGSGCGGGGGTPATPPSGPVSEIISESLFNEMLLHRNDVACPAIGFYTYDAFIAAANAFPGFGTTGGADTQKRELAAFLAQTSHETTGGWDTAPDGPYTWGYCFKEEVGGVWGPDYCQPSPQWPCADGQKYYGRGPIQLSWNYNYGPAGEAIGQDLLGNPGLVAADATVSFETALWYWMTPQPPKPSCHDVITGQWAPSPADVAAGRLPGYGVLTNIINGGLECGHGADARVASRIGFYKRYCDMF

SEQ ID NO: 15876 - protein, 27 aa, Zea mays
  VARIANT 17: note = Ancestral polymorphism is T, Derived polymorphism is M
MPDLARLSQHSKAYLFTANVGIADGVR

SEQ ID NO: 15877 - protein, 190 aa, Zea mays
  VARIANT 35: note = Ancestral polymorphism is A, Derived polymorphism is T
  VARIANT 75..190: note = Derived polymorphism lacks residues 75 to 190
  VARIANT 87..190: note = Derived polymorphism lacks residues 87 to 190
  VARIANT 91: note = Ancestral polymorphism is Q, Derived polymorphism is K
MAASVASVAVLLLPLFMLTALVWRMGTYLPLLHRALLLAQAYLAIYFATLALTMAATGLELLRFVHATSPTAYAWTQAAQSLGFMAYLVLQIVDLVAVFSSTASPEDDSNGDATKALGLAQMVVSLVAGVHYYVVVFHRAAAGAAPRANWRVYTVYVACFAIVCACTLAERRKKAYLVGTVCAAEEWKKN

SEQ ID NO: 15878 - protein, 316 aa, Zea mays
  VARIANT 12: note = Ancestral polymorphism is I, Derived polymorphism is T
MELDEQAFLEEILSLRRDAWDCNVSMGDLFAPAAAAAIDCSFHNQQAPTVSVLPTFTASCAEPPAFDCLSEVYGAAAAFGGPNAGDEMAFLHVAEPKEALQLDNNAGLGVCKVEPGLVESDGGGAAAPTPAPAASKKKRVEGMPSKNLMAERRRRKRLNDRLSMLRSVVPKISKMDRTSILGDTIDYMKELLERIKLLQEEIEQQGEAPAGMLSVFRELNPNEMVARNTPKLDVERKEGADTRVEIYCGASARPGLLLSTVSTLDALGLDIQQCVVSCFNDFGMHASCSEMQRDMISADAIKQELLKTAGYGGGCM

SEQ ID NO: 15879 - protein, 176 aa, Zea mays
  VARIANT 157: note = Ancestral polymorphism is I, Derived polymorphism is T
  VARIANT 125: note = Ancestral polymorphism is S, Derived polymorphism is L
  VARIANT 117: note = Ancestral polymorphism is G, Derived polymorphism is E
  VARIANT 79: note = Ancestral polymorphism is N, Derived polymorphism is I
  VARIANT 61: note = Ancestral polymorphism is P, Derived polymorphism is H
  VARIANT 4: note = Ancestral polymorphism is E, Derived polymorphism is K
MTKEVLESDVYEVFERIQDPNLVYPDYYLNLFHAYDEGNLSWLAATEAEPATMSIAKRAIPEATSIEEANQIVCGNWLNVIEEHRLKYLGSSQCHECPARAITGLVKEAFRVLRPGETIALTDNLVGVSFVSLFIEYKCANLFKKSAVTYKTPFFIIKFFAAEVKYLRNYPQFCSL

SEQ ID NO: 15880 - protein, 67 aa, Zea mays
  VARIANT 21..67: note = Derived polymorphism lacks residues 21 to 67
MGKKVAVPSALAASGLVASDRFFMCFGRNGVGRLNFGDAGGRYQAETPFIARSSRLVAFPSSTRRLK

SEQ ID NO: 15881 - protein, 532 aa, Zea mays
  VARIANT 115: note = Ancestral polymorphism is T, Derived polymorphism is I
  VARIANT 122: note = Ancestral polymorphism is Q, Derived polymorphism is L
  VARIANT 134: note = Ancestral polymorphism is G, Derived polymorphism is A
  VARIANT 170: note = Ancestral polymorphism is W, Derived polymorphism is C
MLVKLMNLLRACWRPSSNRHARTGSDVTGRQDGLLWYKDAGQHVNGEFSMAVVQANNLLEDQCQIESGPLSFLDSGPYGTFVGVYDGHGGPETACYINDHLFQNLKIALFPFLSTISAFGFQFAHKGDHPFFHGLYLGFASEQNAMSADVLKKAYEATEDGFFSIVTKQWPVKPQIAAVGSCCLVGVICGGMLYVANVGDSRVVLGKHVKATGEVLAVQLSAEHNVSIASVRKELQSMHPEDRHIVVLKHNVWRVKGLIQVCRSIGDAYLKKQEFNREPLYAKFRLREPFHKPILSSEPSISVQPLQPHDQFLIFASDGLWEQLTNQEAVDIVRSSPRSRPVQQVAAVARLQAATCRLQAATRGFLARHQARQAATRLQAVGCRSLAHRLASILCVEQHASLGAARPSVGLADPPLQFTVLIHGHVDDKNTSSWVALSPLELAVAQVVQLGCARRLIRAALQEAAKKREMRYSDLKKIDRGVRRHFHDDITVIVVFLDSGLVSQASTHRGPTLSLRGGGGSAGLRSNTLAPT

SEQ ID NO: 15882 - protein, 258 aa, Zea mays
  VARIANT 133: note = Ancestral polymorphism is P, Derived polymorphism is H
  VARIANT 124: note = Ancestral polymorphism is V, Derived polymorphism is I
  VARIANT 19: note = Ancestral polymorphism is S, Derived polymorphism is F
MATRVWLTALLLGFLVAASPFTGRVARAESEEDAAAAEVVEGADLGIVGDDTQVSSDGPLSPAPGVETVVVFPKNAGKIVLAGEETELLVGLQNDGESILNVVAVHSTLHLPFDHNMYGQNLTVQNFFNSSVPVSVQATFPYKFVVSKFLQPGAYDLVGYIVYEIDQHPYQNVFYNGTIEVVEAGGLLSVESVFLITLGFALLGLFGLWAYGQVQQLSKKTKKAPKVELGTGTTDANIDEWLEGTSFVQRSKSKKKQT

SEQ ID NO: 15883 - protein, 291 aa, Zea mays
  VARIANT 93: note = Ancestral polymorphism is S, Derived polymorphism is L
  VARIANT 99..291: note = Derived polymorphism lacks residues 99 to 291
  VARIANT 103: note = Ancestral polymorphism is D, Derived polymorphism is N
  VARIANT 104: note = Ancestral polymorphism is G, Derived polymorphism is D
  VARIANT 109: note = Ancestral polymorphism is L, Derived polymorphism is F
  VARIANT 111: note = Ancestral polymorphism is P, Derived polymorphism is L
  VARIANT 115: note = Ancestral polymorphism is Y, Derived polymorphism is C
  VARIANT 131..291: note = Derived polymorphism lacks residues 131 to 291
  VARIANT 156: note = Ancestral polymorphism is R, Derived polymorphism is L
  VARIANT 244: note = Ancestral polymorphism is T, Derived polymorphism is M
  VARIANT 272: note = Ancestral polymorphism is P, Derived polymorphism is L
  VARIANT 275..291: note = Derived polymorphism lacks residues 275 to 291
MSTVSSLRSSPRIYKTSIPLFPSKSDTCRPTPIADRHGGRRRKPRTITAVVGGSRCLNGLGLEITSRDDLQTPWMLYARLIRTKVGRDPVTFLPIVLYWVYTDGYQLILHPLEQYRLHTLDEEEEKFVSLCTVVCGILLQHLVHVIHVMILFMLPLVMENDVIARYYGQGKGIVVKAIYDRELKKMHQEKQLDTLVDKGLESKYDRIELEEMVQVALLCLLGARKGAACSSNFQYECWGGRRLTRSSGYGLLCVICNAGGGAGTPGVQALEPASRCRLLPIHHQGEARSLV

SEQ ID NO: 15884 - protein, 289 aa, Zea mays
  VARIANT 117..289: note = Derived polymorphism lacks residues 117 to 289
MDLASVNEELAEIDGQIGDILRVLQNGFQKLEKIKDANRRSRQLEELTDKMRDCKRLIKDFERVSKAEAEHTDPATAKMLHDRKQSMIKELNSYVALKKQQASENKRIDLFDGPSAEDGFGEENVLLASNMTNQQLMDQGNQLMDETDQAIARSKQTVQETVNVGTETAAALKAQVRFFSYFQKESIALLCCPIRKAKGNFGLFLLHQTEQMSRVVNELDSIHFSIKKASQLVKEIGRQVATDRCIMAMLFLIVAGVIAIIIVKIVNPHNKDIRDIPGLAPPVSRRLLR

SEQ ID NO: 15885 - protein, 213 aa, Zea mays
  VARIANT 44: note = Ancestral polymorphism is S, Derived polymorphism is F
  VARIANT 68: note = Ancestral polymorphism is S, Derived polymorphism is P
  VARIANT 114: note = Ancestral polymorphism is V, Derived polymorphism is M
  VARIANT 123: note = Ancestral polymorphism is V, Derived polymorphism is G
  VARIANT 128..213: note = Derived polymorphism lacks residues 128 to 213
MARSPMLSARMPALTSWNITAMFPPTLENEPLMWKTRRLPMLESIWILSDVCLLMLMCQFNETKVMQSIQIYTKSKYPIVLVNILWRITEICIGVEQSTVVGKAVMLDEIINYVQSLQQQAEGNFHYQFTTRMTDHFVLISMKLATVNSQVDLNNLPNLLPKDIHQSCGPPHFSLETSGTPLSYLSQPHHGSPLGCMDNQSCMHPLDTAFYRQ

SEQ ID NO: 15886 - protein, 106 aa, Zea mays
  VARIANT 42: note = Ancestral polymorphism is K, Derived polymorphism is M
  VARIANT 40: note = Ancestral polymorphism is C, Derived polymorphism is S
  VARIANT 39: note = Ancestral polymorphism is R, Derived polymorphism is W
  VARIANT 30: note = Ancestral polymorphism is E, Derived polymorphism is K
  VARIANT 27: note = Ancestral polymorphism is P, Derived polymorphism is S
  VARIANT 26: note = Ancestral polymorphism is G, Derived polymorphism is R
  VARIANT 24: note = Ancestral polymorphism is E, Derived polymorphism is K
  VARIANT 19: note = Ancestral polymorphism is T, Derived polymorphism is I
  VARIANT 10: note = Ancestral polymorphism is I, Derived polymorphism is S
  VARIANT 2..106: note = Derived polymorphism lacks residues 2 to 106
MWNPTLVNSSVAKARLKPTGTILEIGPGVETSPSAPSMRCYKQQKNIAYMVLMSELILRVIKGLKLIERCLLLKFVASQTTDKPFRTGHRRRLELVFWFKHQVVFM

SEQ ID NO: 15887 - protein, 161 aa, Zea mays
  VARIANT 19: note = Ancestral polymorphism is T, Derived polymorphism is M
  VARIANT 30: note = Ancestral polymorphism is A, Derived polymorphism is E
  VARIANT 38: note = Ancestral polymorphism is E, Derived polymorphism is K
  VARIANT 44: note = Ancestral polymorphism is R, Derived polymorphism is C
  VARIANT 48: note = Ancestral polymorphism is D, Derived polymorphism is G
  VARIANT 58: note = Ancestral polymorphism is D, Derived polymorphism is E
  VARIANT 73: note = Ancestral polymorphism is L, Derived polymorphism is I
  VARIANT 84: note = Ancestral polymorphism is A, Derived polymorphism is V
  VARIANT 91..161: note = Derived polymorphism lacks residues 91 to 161
MHLREAETKKRPSTDFMETIQKDVNPSMRAILIDWLVKVAEEYRLAPDTLYLIVNYIDCYLSGNEINRQRLQLLGVACMLIAAAYDKVFLEVLFCSATALWTCTDVAHVLLQFSLAWCGKLIRYARAVAAHYVRFVKGLCFDLFIIRGGNRAFNACWRCAM

SEQ ID NO: 15888 - protein, 227 aa, Zea mays
  VARIANT 90: note = Ancestral polymorphism is T, Derived polymorphism is M
MGRGKIEIKRIENATNRQVTYSKRRTGIMKKARELTVLCDAQVAIIMFSSTGKYHEFCSPGTDIKTIFDRYQQAIGTSLWIEQYENMQRTLSHLKDINRGLRTEIRQRMGEDLDSLDFDELRGLEQNVDAALKEVRHRKYHVISTQTDTYKKKVKHSHEAYKNLQQELGMREDPAFGYVDNTGAGVAWDGAAAALGGAPPDMYAFRVVPSQPNLHGMAYGFHDLRLG

SEQ ID NO: 15889 - protein, 331 aa, Zea mays
  VARIANT 183..331: note = Derived polymorphism lacks residues 183 to 331
MAGFSLRSGGAGGGGGGRGGDRGGDHSIGADSLFLYARGAAAAAADTAASGGGIGFQLWHPHQVQQAAAAPHTSQFFSSGAVATGVVLGFSSHDGGAAGIAGAGGGRAGTSCQDCGNNAKKDCPHMRCRTCCRSRGFSCPTHVKSTWVPAAKRRERQQQLAALFRGAANSNSAAAAASKRPRELVRSLGRLPSANSAMVTTTTSSGDGGGGRFPPELSVEAVFRCVRIGPVDEPDAELAYQTAVNIGGHTFKGILRDHGPADDAGHLPPPSAEYHHHQLTAGQAREAPSPAGSSEAAATAATSAAVLMDPYPTPIGAFAAGTQFFPHNPRT

SEQ ID NO: 15890 - protein, 209 aa, Zea mays
  VARIANT 70..209: note = Derived polymorphism lacks residues 70 to 209
  VARIANT 93..209: note = Derived polymorphism lacks residues 93 to 209
  VARIANT 140: note = Ancestral polymorphism is D, Derived polymorphism is E
  VARIANT 159: note = Ancestral polymorphism is P, Derived polymorphism is L
  VARIANT 165: note = Ancestral polymorphism is A, Derived polymorphism is T
  VARIANT 168: note = Ancestral polymorphism is Y, Derived polymorphism is C
MPATASGGPRPEEVLPAPTVSASASSCMGTRAEELTARLAAAGPPRAPVPAERRSSTSASARCARSRTRSSETGPRSCSTSVWAPCPQSCRRWRIPEPRRRRSCRRRPRRGSLRAASKTARAVLAAGAVGHLTRLLAHPDEKVLTVDLMDQIMDFPVDPIMAAKAYKYKAEILLKEYLLADSYVLYTSVLAGLLMCKLVLLFTHSEFIC

SEQ ID NO: 15891 - protein, 706 aa, Zea mays
  VARIANT 520..706: note = Ancestral polymorphism lacks residues 520 to 706
MSSDPSRHLPSPVAPPDAAEVDTHSAEPPEVMHRTRAVDFLGRRTPIVYQNDNGPCPLLAICNVLLLKNVISMNPDAEEVSQQRLLSLVAERLIDPNIAGQSQVKDEEYVNNREQNIADAIDLLPCLTTGIDVNVMFRKIDDFEFTRERAIFDLLDIPLYHGWIVDPQDTETATAIGSKSYNALASGLVEFKSGKPTEENKPVEEETVDFAAATAAALKIPSPSVSLGRSFDEHSLSNSVEPHKRRGDLEEEEELMRVLTLSKGESGDAVDGEVSLDTSHSHSLSNMDTPQTENLQSETPELVGAAKEEEHGNHTVSDDGSILPVINGVVNGSEAVTKESQKTLTSKEPEASGIKNMLPGDLNILVQSSECTPNCQSHESFATSDPQPAVPTLVEGGKENNREQFDAQIHGQSNDTEVACDSTTATCEAVPGHAKTELDVKSDSLENSEPLPLSIQEYEPIYQGEEHILGTTNMVYENQEPVYEGEVVLAKQLDKMEESSPSVDDKATEHHWELIDNFLWSTANQLTVYGLFCLQEELKENELCVFFRNNHFNTMFKYNGSLYLLATDQGFISQTDLVWQRLDEVNGDGGFLTSNFTPFKAETPRNDSWNEQQAMTSTADYLAQFDNSTSGNSDLELAIALQQQEFERQPQRFQAPPPQQQQQQPPPQTQHQPAQSGRPGLVVGPRMSNVPPPSRSESKKERCIVM

SEQ ID NO: 15892 - protein, 559 aa, Zea mays
  VARIANT 398: note = Ancestral polymorphism is G, Derived polymorphism is C
  VARIANT 212..559: note = Derived polymorphism lacks residues 212 to 559
MASTSPNPASLSAPLLSDSISPAHAANGHAANHRHHHDGAVAASVCGDAGDPFAFLSEDRPPRDRGPSPADPFRNGTPAWCGGAYAWARTLLLLPVAAVRLALFGLAIAIGYAATWVALRGWADTHVRPREGGGPMPAWRRRLMWITRISARCILFSFGYHWIRKKGRPAPRELAPIVVSNHISYIEPIFFFYELFPTIVSSDSHDALPFVGTIIRAMQVIYVDRFSPASRKAAVNEIKPPHCFMMSFQRKAACNSFPRVLLFPEGTTTNGRFLISFQHGAFIPGYPVQPVVVHYPHVHFDQSWGNISLLKLMFKMFTQFHNFMEVEYLPVVYPPEIKQENALHFAEDTSYAMARALNALPTYYSYGDSMIMARAVEAGKVNCSNYMVEMAWVKDVYGISTAEVMELLEHFLAMNPDNDGRVKAEDFWAHFGLDCSPLCKKIFHYFDLDIKGLITFRQFLVGCAHLRKQPLFQGSCETAFEKCRGPETSEISRAQLADLLRLSMVPPSDDKMLELFKTFDVDGDEKISRDDFMACLGRFPFLIAFFAALINGEVYIEIV

SEQ ID NO: 15893 - protein, 252 aa, Zea mays
  VARIANT 96: note = Ancestral polymorphism is V, Derived polymorphism is L
MENSPPPPAPQAQATRPDPIHRPAEDPAPMRPPSPSSPRPPVAFPTLDSLAAFLRPRLPPGALSSWGAVPGTKTLANLFLELAVGDCALDAASPRVVRAVHVATVRIRNRRGARLVETRQLLSDGTVRRRGPRPLSEKMRPGESPEAAAARAVREELGARARVRILGGAGARVEERESASYPGLPARYVLHAVDAEVVDGVPEDGEFETEEAGEDDAAGAITVKRHYWDWIDDDDDGDSERKEVAAAGARAH

SEQ ID NO: 15894 - protein, 221 aa, Zea mays
  VARIANT 33: note = Ancestral polymorphism is P, Derived polymorphism is L
  VARIANT 61..221: note = Derived polymorphism lacks residues 61 to 221
  VARIANT 71: note = Ancestral polymorphism is E, Derived polymorphism is K
MARPCRSSSSAAARLLLLLAAVAAALQAAAATPPVASGFIRKSCRATQYPSVCEQSLAAYGGSPPPRSPRELARAALAVSADRARAASAYVGRLCGSRSGSGDGSPRRGAGAGAKKGSAAAGPVRDCLENLADSVGHLRDAAQEIGGAGMARAGTRAFRWHLSNVQTWCSAALTDENTCLDGLSSRAVDAATRAAVRGRVVEVAQVTSNALALVNKVGPGY

SEQ ID NO: 15895 - protein, 356 aa, Zea mays
  VARIANT 33..356: note = Derived polymorphism lacks residues 33 to 356
MSAGVVSAVDGGPAADGSKSRPECINSSNPYHECTDYCLRKIAEARQRLDDELPDSWKRPPEHRTVHRDCINACNPYHECSDYCFKRIADAKSGLERGEQQPPADVATAAGTSDAVEQQQLEDNDADGQEGAAADDGYPQMTEKQKKLFELRLKMNEARKANQQAMVAEKKRMEPRGESRGVSKQKWLDDRKKKIGKLLDSNGLDMSKAYMLDTQETAEAKYKKWEKEPAPYGWDVFNQKTLYDAYKKRTKDIEVDMEAYNKAKEADPEFYRDASSLQYGKVSNVPEENIDKMVKELKEREEKRKSFSRRRKFNEDKDIDSINDRNEHFNKKVERAFGKYTLEIKNNLERGTALPD

SEQ ID NO: 15896 - protein, 117 aa, Zea mays
  VARIANT 113: note = Ancestral polymorphism is P, Derived polymorphism is Q
  VARIANT 103: note = Ancestral polymorphism is I, Derived polymorphism is R
  VARIANT 91: note = Ancestral polymorphism is P, Derived polymorphism is S
  VARIANT 79: note = Ancestral polymorphism is T, Derived polymorphism is I
  VARIANT 73: note = Ancestral polymorphism is G, Derived polymorphism is R
  VARIANT 70: note = Ancestral polymorphism is A, Derived polymorphism is T
  VARIANT 68: note = Ancestral polymorphism is A, Derived polymorphism is V
  VARIANT 66: note = Ancestral polymorphism is L, Derived polymorphism is H
  VARIANT 61..117: note = Derived polymorphism lacks residues 61 to 117
  VARIANT 56: note = Ancestral polymorphism is N, Derived polymorphism is Y
  VARIANT 42: note = Ancestral polymorphism is L, Derived polymorphism is P
  VARIANT 37: note = Ancestral polymorphism is E, Derived polymorphism is K
  VARIANT 32: note = Ancestral polymorphism is F, Derived polymorphism is L
  VARIANT 9: note = Ancestral polymorphism is Q, Derived polymorphism is E
MIRRLEKQQRSSGDGVNNNLSKLREDLEYVRFFPKNEKYVLLFTGGNSQDIVQERNKWRKQIKENLMAAAANGKDLEETASDELRQNYRLPINIVLWLITGSIISISKKQKPPEQTS

SEQ ID NO: 15897 - protein, 506 aa, Zea mays
  VARIANT 67: note = Ancestral polymorphism is T, Derived polymorphism is I
  VARIANT 81: note = Ancestral polymorphism is R, Derived polymorphism is C
MEHAVSNITRKRSAFASSQQASTLQCGHFDPNFVEALKDGLQHSGQKSSDAPDIPVQQLAMLFTPITELNPQKINVVIRVRVIRKWEFRGATNDGPLRHINLILADEQGTTIHAEIPAALATEKGSLIQIDKVYEIRHFRVMPSRGYFKPVHNNLMIQFTLYTQAKVVNDPPHIFPIYIYNLTSFEKVEENVDNRNYLIDVIGMLTQIGAPHVAGYNNSSIVRDIFIKDISDASLKITLWGDQASGFSIDNVCNQSNNKPIVIMFVGCLAKQFKGQSYLSGTTATTWYFNPNIPEAQEYYIKLQSSDLQLIRPTVAEEECEPQGFKCTATISRLIQDNKWWFPACTKCRKSSPQTSTGYRCTSCGCTDVKFSYKLSFVVTDGTCEAEFFCFDTIAKRIVGKPCDTLITTTMTSQGFPLDLAAIVSLKFTFVVTLNMLAFSVTNRVFCILYVLTNHGRQTSVPSTMLNYPQEQLLTQDDVFESTATQDSPATSFAKLSTSARQENTV

SEQ ID NO: 15898 - protein, 82 aa, Zea mays
  VARIANT 22: note = Ancestral polymorphism is Q, Derived polymorphism is L
MAISSKTVAVSMLLLSAVFFVLLSAPAHARKLGTMRAPTSSVRRPPAAPCTPRSILQEVATQTESTTTPGHSPSIGHNSPPN

SEQ ID NO: 15899 - protein, 177 aa, Zea mays
  VARIANT 50: note = Ancestral polymorphism is T, Derived polymorphism is A
  VARIANT 115: note = Ancestral polymorphism is L, Derived polymorphism is R
  VARIANT 125: note = Ancestral polymorphism is E, Derived polymorphism is D
  VARIANT 139: note = Ancestral polymorphism is Q, Derived polymorphism is E
  VARIANT 168: note = Ancestral polymorphism is I, Derived polymorphism is V
MAEREHRTVFVTVGTTCFDALVMAVDSPEVKKALLQKGYSNLLIQMGRGTYVPSKVSGDATLQVDHFTFSPSIADNMRTASLVISHAGLALAGSGSIFETLRLGKPLIVVVNEDLMDNHQSELAEELAERKHLFCARPQTLGETIRAMDLETLVPYEPGDAKPVVALINRFLGFPVA

SEQ ID NO: 15900 - protein, 112 aa, Zea mays
  VARIANT 13: note = Ancestral polymorphism is L, Derived polymorphism is M
MASLGQLLLVAGLAFLVLLLGAQDHGRGEQATGGGPAVGAAAAAAAPPAREAVIISRHQHSQPSAAAMAESKRLPIPPSGPSTKWNYEANHEKPSSSESGSGRRRLGWWWSP

SEQ ID NO: 15901 - protein, 277 aa, Zea mays
  VARIANT 225: note = Ancestral polymorphism is I, Derived polymorphism is V
  VARIANT 79: note = Ancestral polymorphism is R, Derived polymorphism is W
  VARIANT 72: note = Ancestral polymorphism is D, Derived polymorphism is V
METSGWRRRAAARASWSPATVYLWLALAAAALTLAQAKKDLTEVTHKVYFDVEIDGKPAGLLRHPLAFSMSDSQISTLRRRIVMGLFGKTVPKTAENFRALCTEVPFQILNSFTSVKYLSDVLLDSYKSLVWFWFHVALNFLVYTGEKGIGKSGKALHYKGSTFHRIIPSFMLQGGDFTLGDGRGGESIYGMKFADENFKIKHTGPGLLSMANAGRDTNGSQFFITTVTTSWLDGKHVVFGKVLSGMDVVYKVEAEGRQSGQPKSKVVIADSGELPM

SEQ ID NO: 15902 - protein, 187 aa, Zea mays
  VARIANT 137..187: note = Derived polymorphism lacks residues 137 to 187
  VARIANT 112..187: note = Derived polymorphism lacks residues 112 to 187
MEPSPVGASGSAERWRAEAARAFQHYLDRSAPHTAGRWAGTLVAAAVYALRVYYVRGFYVVTYGLGIYLINLLIGFLSPMVEPELEAGPGLPTSGSDEFKPFIRRLPEFKFWYAVTKAFCIAFVMTFFSVFDVPVFWPILLCYWIVLFVLTMKRQIVHMIKYKYVPFSIGKQRYGGKKGPAASASKE

SEQ ID NO: 15903 - protein, 331 aa, Zea mays
  VARIANT 147: note = Ancestral polymorphism is T, Derived polymorphism is I
  VARIANT 93: note = Ancestral polymorphism is A, Derived polymorphism is T
  VARIANT 75: note = Ancestral polymorphism is R, Derived polymorphism is W
MESPIAVSRGAERRLDRGYRVGAELTYFSWAVFTGSRPGLQIRPCCRMSESPCRLIRLWSPASTQPNEFFAIIFRIRGWGANWKEFLELDALARETPVEKWDGTLLITTTGTFSVSLHGINDEAIYRYRINLQEEISSARLSKLATTYRNHARFSGTEVCLCLSNDADVDDFILWLVGFFRKIQVIKAAVSFRFRLSTRQTAIRDTPMDMGSNRPTAILQHEANNHWKVSGFQHLKSIAGLIWSSTNEEFQDECIGLLGLGSEYDVSEGPVRSSICEKMIHIIEMNDTKENAEDNVPYLFECEKLDGGSELDAKHSRRQLATLQLAKLVYI

SEQ ID NO: 15904 - protein, 420 aa, Zea mays
  VARIANT 163: note = Ancestral polymorphism is D, Derived polymorphism is Y
MDPNMKQLQEALVDIETDAEKVLLARHQLVENDKIRNGNREALTALRKQARTSKTSVPSPFEVIMKEMEGSSGKQLIKEICPTCGDHDPKEHTWLMFPGSDMFSRVPFHVAHTVVEKDQERLDLDTKKLQSFVKEKSLVIAEKGALAGRFGADTVKSLVSLTDTTKSTREGGECVVPDDELGVVKGSQSVVVMFETEVKIVPNNFAIVIVVKSFGTSVTSATEICLPILVPHAQAHATALESREVIAVEALKQANDEHVQKLIEAYLVTHNQRRALRIQEPASSNPVQPMRAKDLQILEGHPVCIRGDKKTWELPEGAIVLEGIPVFPQAMDKQEHPESSQDPPPELFEPLTMKKIPAPSLEVKEEAASTPPAPLPSEELQEPVQLEEEFNPAISVAAKRSHQHQLPLDPSRRYLRLKLC

SEQ ID NO: 15905 - protein, 458 aa, Zea mays
  VARIANT 228: note = Ancestral polymorphism is G, Derived polymorphism is R
  VARIANT 109: note = Ancestral polymorphism is D, Derived polymorphism is N
  VARIANT 22: note = Ancestral polymorphism is R, Derived polymorphism is S
  VARIANT 8: note = Ancestral polymorphism is W, Derived polymorphism is R
MSKLARGWADLPRDLLESVLARLPVPDLVRFPAVCTAWQSVHAAAAARLRQATPSSPWLMLPFNPTARAGGVAKLSVARFLSLAEGRVYVIRQPAPAARDRLCVGSSADGWLVTADARSELSLLNPITGAQLRLPPAATLPFVDARRGADGRVESYGLRSCFADGGGCGEEALVPTETLGPDRLRYEVYEKAIVVSAPRRVPPCSCWVGYAVLLICQPLGRLAVARAGDAEWALLDDADAPARCWVDAVRASFSGADGSRRDHQPVYTVDAAGRVDAWDTDAATTPSRAVAPPCGCSARSCAMSAACRKYLVELSPGRLLQVHRLRETAHARYAWEPRPEHMEYTTTGVELFEWTAATGLWARADGRVLGGRALYLGKSASLCVPVDVDDAGWCPGVRGGCVYFTDDGPWSHDRCHEVTPDVGVLDLDDGSYRPPRGAARDLLWKWPPPVWVFPSLAG

SEQ ID NO: 15906 - protein, 937 aa, Zea mays
  VARIANT 9..937: note = Derived polymorphism lacks residues 9 to 937
MGSSLQSDGNWRDACCLDPSLCTNLTIPQICMCSVRLFVVMAAWDVISLNRMITGFIRDGTSNRALVVYKWMVASGLRETPHTFSAVLGACNSCEGLQLHGRVLALGLRSNPFVMSALVNLYMRVETPCAALLLYDEMPLQSTAMSNAVLGGLCNLKLAEDLFRSLLDMRRRGLELNGLSYCYAMKACYQDEDWLEQGRQLHGVVLKAGWVPSNIFLSNSLVDLYAATGDLVDAKSSLDDIPSEDVISWNSIVSVCASKGRTKEATGYLRQMLWHGKTPSVRSFVGLFALSGQTGHLQVGVQMHGIALKLGFSWSSAHVQTALISMYGNCCHFDCCLAIFNETPSLALECYNAMITSSIGCKVFHSALEVLYCMVVEGVMPDNVTLSATMKAISLSASPSLISCQMLHSWVFKLGFEADMVVCSSLISAYARAGQVHSSRSVFESLRSPNVVCFTSMISACARHGDGAKGVELLREMVCRGLKPDDVTFLCAITGCDQAGLIEEGRLVFEFMRATRELGPDERHLACMVNLLGRDGFVEEAMKVMMEQHSPLRHYTKAWSSLVQSCKAHGEDALGRRAADTLVDMGREDAATSLQVSRYFYEIGDGENVSRIKGMASGQREHAAFGPHVQIANLGFGWNTKGLDRHLEEFVYAYFDGLVQNLIERCLQMYMNKKEVVDALSHHSRIEPCITELVWQQLEQQNPLFFKAYDMRLMLKNQIMVFNRLLQDQFEIMNKEFSSGIPSMSLPNDSNSNLLKQDSCFLPETAPGNAMPDGIMHNGSSSGIINDTPSGDQLLNASKDLHGLHSQIDASTSLQSDQNATAVLYGVDNETSATIKTESCYSSNADFAFCGNTFLESCQSIGDASGGGSFSSSELNGQPLNDSILDMESSSFSFLNQMPQSFMFSDLADDFNQNAEITPFLTPETNFSDSTGGDHTG

SEQ ID NO: 15907 - protein, 801 aa, Zea mays
  VARIANT 72..801: note = Derived polymorphism lacks residues 72 to 801
MIPAPPASSAGGSITSGWRNLLLLLLLLTLTLARPAAAQPPTSPALQAAYAALQAWKRTAIFSDPSNFTSNWAGPNVCAYNGIYCAPRPSDGALAVAGIDLNHADIAGHIPADLPLGVPDLALLHLNSNRFCGVLPDTLLHLRLLHELDLSNNRFVGAFPAVVLALPSLRYLDLRFNDFEGPIPPPLFDRPLDAILLNSNRLRGPIPANLGNSPASVLVLAHNRLGGCIPPSIGRMAATLNEIVLIDDDLTGCVPPQVGLLTKLTVFDVSGNHLQGPLPPAVGGMAALQQLNVAGNLLRGPVPPAVCGLQGTLRNFTYEDNFFTSRPGCAVATADGRWNCIPGAPAQRPPPQCAAAAAPFDCRTAQCQPPPTSGPPGSGPGGPSQPLSPPGSSNTPSHPSPPGSSNTPSYPSPPGSSNTPAYPSPPGSSTTPSHPSPPGSSTTPSPPGSSTTPSHPSPPGSSTTPSPPGSSTTPSHPSPPGSSNTPSYPSPPGSSNTPAYPSPPGSSTTPSHPSPPGSSTTPSPPGSSTTPSHPSPPGSSTTPSHPSPPGSSTTPSYPSPPADGNSPKPSMPPSSHGGSAPPSGYQPPPWSQWAPSGQPVGVPPPTEHPGGVWPPHTPTAPGTPGSAYPPGTPGSPSTPTTPGTPGSTFPPTTPGAPGSLPSTPTTPGTPGSTFPPTTPGAPGSLPPTPTTPGSTFPPTTPGAPGSLPPTPGYHPPSPGDHGSSQEHTPPSAPGSSGGVLPFPPVHGVAYSSPPPPPSDPAAGNPPSFSPVHGVSYSSPPPPLPPVYPVSYASPPPPYKSN

SEQ ID NO: 15908 - protein, 147 aa, Zea mays
  VARIANT 80: note = Ancestral polymorphism is W, Derived polymorphism is R
MEEYQQVHQQQQQQGGRGSNKIRDIVRLQQLLKKWKKLATVTPSAASSGGRSSVPRGSFAVYVGEEMRRFVIPTEYLGHWAFADLLREAEEEFGFRHEGALRIPCDVDSFQGILRLVQQGQGGRRNEPAAMCDCDCSCSSETEILCR

SEQ ID NO: 15909 - protein, 54 aa, Zea mays
  VARIANT 47: note = Ancestral polymorphism is E, Derived polymorphism is K
  VARIANT 46: note = Ancestral polymorphism is A, Derived polymorphism is T
  VARIANT 45: note = Ancestral polymorphism is G, Derived polymorphism is S
  VARIANT 19: note = Ancestral polymorphism is C, Derived polymorphism is Y
  VARIANT 18: note = Ancestral polymorphism is G, Derived polymorphism is R
MLVHPADCKSMLDAFIAGCDFHSRTTMSMYQHIRETVEEEKDAFGAERRKAIRC

SEQ ID NO: 15910 - protein, 96 aa, Zea mays
  VARIANT 64..96: note = Derived polymorphism lacks residues 64 to 96
  VARIANT 38: note = Ancestral polymorphism is V, Derived polymorphism is I
  VARIANT 30: note = Ancestral polymorphism is G, Derived polymorphism is R
  VARIANT 29: note = Ancestral polymorphism is S, Derived polymorphism is L
  VARIANT 17: note = Ancestral polymorphism is T, Derived polymorphism is I
MCGDPNSVLRFTFIEFTDEEGARAALNLSGTVLRYYPVSVLPSKTVIAPVNPTFLPRVTQADLKLFFESICGEVFRLRLLGDYHHSTRIAFVEFVM

SEQ ID NO: 15911 - protein, 303 aa, Zea mays
  VARIANT 113..303: note = Derived polymorphism lacks residues 113 to 303
  VARIANT 86..303: note = Derived polymorphism lacks residues 86 to 303
  VARIANT 85..303: note = Derived polymorphism lacks residues 85 to 303
MPSLVAKFLGLDGLPSPKGKYTVKDDKIKTASSPRAMFDIEMPKPKRLLQQLLRQKSGSGTEMPRPERSHESNFVSKGILPAADWQSSFSNPPRKIIVLISRLLSDAHRYILRCLSNHGTVSHCTVLTAISEIGHSAYVDSPLGPDAFREYETLLIQDHDELLKKSENLDRHKESIHKEASDFTSNVDNYSKWGSGVHYGSNSESSPTKRDFLMTKWARVFVLPSEGIIADSSLSNHHEDSLGSGLPSISTSKPFDSDEVPPGVTLTTQFLYHLANKMDLKLDIFSLGDTSKVIGKLMMDMKS

SEQ ID NO: 15912 - protein, 822 aa, Zea mays
  VARIANT 648..822: note = Derived polymorphism lacks residues 648 to 822
  VARIANT 616..822: note = Derived polymorphism lacks residues 616 to 822
  VARIANT 599: note = Ancestral polymorphism is G, Derived polymorphism is R
MRRIRLACLLVIFVQVQWAALGTHDVYIVTMEGDPVVSYRGGVQGFPATAVDSDEEIDLTSEAVKSYALHLRGHHDKLLDSLLVEGTYEKLYSYHHLINGFAVHMSPLQAEFLKKAPGVKHVERDMKVQKLTTHTPQFLGLPTGVWSTGGGLDRAGEDVVIGFVDSGIYPEHPSFAAHKTDPYGPAPRYKGKCEMDPVTQRSFCNGKIVGAQHFAKAAMAAGAFNPDVEFASPLDGDGHGSHTAAIAAGNNGVPVRMHGHEFGKASGMAPRARVAVYKVLYRLFGGYIADVVAAIDQAVQDGVDILNLSVGPNSPPTATRTTFLNPFDAALLSAVKAGVFVAQAAGNGGPFPKTLVSFSPWITTVAAGVDDRRYKNHLTLGNGKLLSGLGVSPATHGNMSFSLISAADALLGSSATKYSALDCQRPELLNKRKVQGRILLCGYSFNYISGTASIKKVSQTARNLGAAGFVVAVENNYPGTKFDPVPFSIPGILITDVSKTEDLIDYYNSSTIRDWAGRATAFKATAGIADGLAPTLYNSAPQVALFSSRGPDVKDFSFQDADVLKPDILAPGNLIWAAWAPNGTDESNYAGEGFAMVSGTSMAAPHIAGIAALIKQKNPKWSPSAIKSAMMTTANTLDKGSRPLRAQQYTASEMMTLSRATPFDCGSGAVNPKAALDPGLVLDATHEEYIAFLCSIPDVNQSEVSNIAGSACNSSSKGRQRPFDLNLPSIAISQLRGTVTVTRTVTSVSEETETYTIMTRMPPEVALEVTPPAVTVLPGASRELAVTLTARSVTGTYSFGEIAMKGDRGHLVRIPVVAMGFK

SEQ ID NO: 15913 - protein, 90 aa, Zea mays
  VARIANT 38..90: note = Derived polymorphism lacks residues 38 to 90
  VARIANT 3: note = Ancestral polymorphism is N, Derived polymorphism is I
MANLVKKWHPDKHPPSSRPKAEVRFKAISEAYEAILDQQENRGVFELCNDGRAGERTRGAGAEALLGYLSALATSPRAEGDRMDLTNAAA

SEQ ID NO: 15914 - protein, 115 aa, Zea mays
  VARIANT 27: note = Ancestral polymorphism is P, Derived polymorphism is S
  VARIANT 29: note = Ancestral polymorphism is T, Derived polymorphism is I
  VARIANT 49: note = Ancestral polymorphism is T, Derived polymorphism is I
  VARIANT 52: note = Ancestral polymorphism is V, Derived polymorphism is I
  VARIANT 56: note = Ancestral polymorphism is I, Derived polymorphism is V
MSGIHGSGREDEEEEGNHLHRPRNGSPLIDLLFDHYLDDMNIGAAQNATIRVVLVVFQWWGLNVAIIINKWNFQLKRVTGFVQSTKFRIGAPYNANHTNRSDEGNCTSFTRISLY

SEQ ID NO: 15915 - protein, 722 aa, Zea mays
  VARIANT 663..722: note = Derived polymorphism lacks residues 663 to 722
MADVLEPASDAPRVRRPPPPPPDSPEDRSPRLPPPPPGGPPAPSRKRSRSPPPPPPLGSSRPQRYRDHRGGGGRGGSSPSPPPYRGSRRHSPPRRSPSPPFKRSRRDDGYDRRGGRGSPPRYGYDDRRRGYDHDRGGGRGGYDDDRNHGRYLNRGPDWPDSGYGAANDGPGVTQREGLMTYKQFMLVLEDDISPSEAERRYQEYRTEYITTQKRAYFDLHKNEDWLKDKYHPTNLLSVIERRNERCKVIAKDFFLDLQNGTLDLGPGITGGAASKPGGSDGNSDDDTDNDKRRKHGKDSSKGTDSISGALKAHPVSSESRRVQADIEQTLALVRKLDSEKGIEENVLSSGDHDKSDVDKSHIGSMGPIIIIRGLTTVKGLEGVELLDTILTYLWRIHGVDYYGTSESHEAKGLRHVRVDSKTSSTSDVSAADWEKKLDTFWQERLNGQDPLVILTAKDKIDAAAAEVLEPLVRKIRDEKYGWKYGCGAKGCTKLFHAPEFVHKHLRLKHPDLVLESTSKVREDLYFQNYMKDPNAPGGTPVMQLSAPDRGRRRPSMDSRLKFDRGSNKEHDKAERDGGRYGRDDHSPSRDGPDDQMFDGFRGRPSNAPFVAEFPPPPILMPVPGAGPLGPFVPAPPEIAMHMLREQGPPPPFEPNGAPHGSTGMLGPMLGGSAPIIAMPPNFRHDPRRLRRFIPQFLNLFFLIYNDLDAPDEEVTVLDYRSL

SEQ ID NO: 15916 - protein, 412 aa, Zea mays
  VARIANT 142: note = Ancestral polymorphism is T, Derived polymorphism is I
  VARIANT 96: note = Ancestral polymorphism is N, Derived polymorphism is K
MMATGRSLAGVYSARATRPMPLRAGARAPCAGAAAAEPAAEHVRRLVAEFDPAVPLDSAVTPPSGWYTDPDFLQLEIDSVFFRGWQAVGHIWQVKNPNDFFTGRLGNVEFVVCRDANGKLHAFHNVCRHHASLLACGSGHKTCFQCPYHGWTYGLDGTLLKATRISGIKNFNKNDFGLIPIKVATWGPFVLIRFDDESTEDNVYDTVGNEWLGSASDLLGTNGIDTSLPHICRREYIINCNWKVFCDNYLDGGYHVPYAHGDLASGLQLQSYETLVLSTYERVSVQRCESAPAEPDDFDRLGTKALYAFVYPNFMINRYGPWMDTNLAVPLDSTRCKVVFDYFLDKSLLDDQCFIKKSLEDSEQVQIEDIALCEGVQRGLESPAYSVGRYAPSVEMAMHHFHRLMHANLSEY

SEQ ID NO: 15917 - protein, 327 aa, Zea mays
  VARIANT 2..327: note = Derived polymorphism lacks residues 2 to 327
  VARIANT 93: note = Ancestral polymorphism is H, Derived polymorphism is Y
MCPTKPGRPAQAAAGSGEKSWREQAVAASSLRPVDLDRGTNGWASPPGDLFHLRARGYFSCGGGKRGKAPSAAEWLLRPAGVDWLRSHARLDHVLARHDNRVAAAFRRARLRNDPTAHFLLAVNLQVPGRPDAYSAVFYFAAEAPIAPDSLLGRFVQGDDAYRNARFKIANRIVNGPWLLRATVGNYAACLLGRALTCRYHRGVDYLEIDVDIGSSAIASAILHLALGAVTSVTIDMGFLVESQSEEELPERLFGAVRIARMEMGAARYVELPPNEAMPETVCSGRAGAGFRVSSGKVVNHSRQQDRAGGKVGRSMSCPERERGGER

SEQ ID NO: 15918 - protein, 871 aa, Zea mays
  VARIANT 224..871: note = Derived polymorphism lacks residues 224 to 871
  VARIANT 150..871: note = Derived polymorphism lacks residues 150 to 871
MPTCLHVQDPRNIAMSRPLDFAVLNYKNQRLAEQLEVHKFEFRALESRFNDLKEKQRTHNETLILVENYWERLVAELGIVPVCKSESSHSSCSTGNNNIRKDGICFRLGAGFLNGLLEAGASATESSGFSNCQLGNDVSSEESTTIDILQKMFLPSSGPWHANNEVVSAALKKLPENEHSRQLHSATNDVLSKLHVVMRAVDNLHLKHMQLAGNYQKQRDSSAWNRAEQKRLKEELTSVVAKLEESKQKLAVLKAQGDNKQATPILVPMLGKKTAEKVGDKQTELQDLEATHKELMESISKRLEEIRRLHTERIGILNNLATFQNILTDFKSIHSSKAFQLVNDQLQKSQAELDGHQTLLEKLQVDMDTFVWRERQFNQKVDLAEISQKVSAYYVSRIADLEKDVQKLCNEKNMLVLKLEGALREPGRNQVISEFKALVSSLPREMGAVQTELSKHKDASLQLHSLRAEVHSLSSIRTRKEQEIEETSRSAHAGSDISQLQSLVHELRENTQELKLFVELYKHDSADSRQLMESRDRELAELAGVHVLRYSLNESKLEQRVIAANEAEAISQQRLATAEAEVAELGQKLETSRSKVISSAGFLWLRNLVKQSDILKSKHEECEAYMVEIESIGHAYEDIMSQNQQLLQQIIERDDHNTKLFMEGVKAKQSHDALHLEVCSLQRNLQHASTLMDLCNQKLIHLEDKLRGWSERLRRLSEDGMQQSISLGISQTKLTGMHGEAPKLGQALNVLQAKVGSNRLEVAELLIELETERFSKKRLDDDLDLMSSKASSLREKADNSQVLQKLLHEAKEYRGILKCGICHDRQKEVVIAKCYHLFCNQCIQKSLGSRQKRCPSCGLSFGVNDVKPIYI

SEQ ID NO: 15919 - protein, 472 aa, Zea mays
  VARIANT 62: note = Ancestral polymorphism is P, Derived polymorphism is L
  VARIANT 69..472: note = Derived polymorphism lacks residues 69 to 472
  VARIANT 224: note = Ancestral polymorphism is G, Derived polymorphism is D
  VARIANT 333: note = Ancestral polymorphism is G, Derived polymorphism is C
  VARIANT 353..472: note = Derived polymorphism lacks residues 353 to 472
MSGSCGENGRKPHTPSAIVIGGGFTGLAAADALRNASFQVILLESRDRIGGRVHTDYSFGFPVDLGASWLHGVCEENPLAPIIGRLGLPLYRTSGDDSVLFDHDLESYALYDTNGRQVPQELVEKIGKVFETILEETGKLREGTNEDMSIAKAIVHMGFPCVHYRQEGIAHEVLQWYLCRMEGWFATDADSISLQGCDQEVLLPGGHGLMVRGYRPVINTLAKGLDIRLNHKVVEIVRHRNRVEVTVSSGQTFVADAAVVTVLLGVLKAKTIRFEPRLPEWKEEAIRELTVGVENKIVLHFGQVFWPNVEFIGVVSSSTYGCSYFLNLHKATGHPVLVYMPAGRLARDIEKMSDEAAAQFAFSQLKKILPNAAEPMNYLVSHWGSDENTLGSYTFDGVNKPRDLYEKLRIPVDNLFFAGEATSVKYTGTVHGAFSTGVMAAEECKMQVLERFRELDMLEMCHPAMAIIYKYF

SEQ ID NO: 15920 - protein, 89 aa, Zea mays
  VARIANT 8: note = Ancestral polymorphism is L, Derived polymorphism is Q
  VARIANT 15: note = Ancestral polymorphism is G, Derived polymorphism is S
  VARIANT 28: note = Ancestral polymorphism is F, Derived polymorphism is S
  VARIANT 35: note = Ancestral polymorphism is G, Derived polymorphism is D
  VARIANT 36: note = Ancestral polymorphism is Y, Derived polymorphism is N
  VARIANT 38..89: note = Derived polymorphism lacks residues 38 to 89
  VARIANT 40: note = Ancestral polymorphism is T, Derived polymorphism is M
  VARIANT 41: note = Ancestral polymorphism is F, Derived polymorphism is S
  VARIANT 46: note = Ancestral polymorphism is P, Derived polymorphism is L
  VARIANT 47: note = Ancestral polymorphism is G, Derived polymorphism is D
  VARIANT 53: note = Ancestral polymorphism is G, Derived polymorphism is E
  VARIANT 55: note = Ancestral polymorphism is G, Derived polymorphism is D
MHAHDEHLHQPAAGGAAFGRRIWLLGPFFGGYRYGYGWSTFSLFTPGLSVDVGVGGGFETLVLFVALGTIVRAVRRFLNRNNDDYDNDY

SEQ ID NO: 15921 - protein, 261 aa, Zea mays
  VARIANT 28: note = Ancestral polymorphism is S, Derived polymorphism is L
  VARIANT 47: note = Ancestral polymorphism is I, Derived polymorphism is T
  VARIANT 63..261: note = Derived polymorphism lacks residues 63 to 261
  VARIANT 65: note = Ancestral polymorphism is T, Derived polymorphism is A
  VARIANT 171..261: note = Derived polymorphism lacks residues 171 to 261
MTCNQRRGKMRDKQRLDHDNQGCRLDVSGMAVDLLRVHRILSTLLETKGITVTRYIEGRGNTQKTTELLLEAGEQELLRTWEDPMDEQCKQDSKDSIRRTIVEHDKVFRQQVHELHRLYHVQKTLMAECDSHRYQPRAEGTHEVVQGSRSNLKCSPSTSGTNQSALLGNAQYPAPQQVQEDLSLHECKPVNCLSLFGEENSAAKERFHGENHKSVEDESWSAAVESDLDLKLSIGPSSHSPETPRWLFSGSRERNPSGQHR

SEQ ID NO: 15922 - protein, 473 aa, Zea mays
  VARIANT 346..473: note = Derived polymorphism lacks residues 346 to 473
  VARIANT 296: note = Ancestral polymorphism is M, Derived polymorphism is K
  VARIANT 284: note = Ancestral polymorphism is G, Derived polymorphism is R
  VARIANT 281: note = Ancestral polymorphism is I, Derived polymorphism is M
  VARIANT 267: note = Ancestral polymorphism is L, Derived polymorphism is R
  VARIANT 252: note = Ancestral polymorphism is H, Derived polymorphism is R
  VARIANT 249: note = Ancestral polymorphism is E, Derived polymorphism is K
MVSFGPSTGLLLAIAPFTASVLSWPSPSRHIRPLLKTKFVRKKQAVGISPYMDKADFKQYPILRNEYNCTRIQHALSAYSHIAMRTLRSRFRKNDQSCCKGGKVRIPSYRPRPEPLLSLARFDGDVVSKTFMQNIRQYNCLFAFTSMGAHIGRSLNDGHSPPVFKPQIVHELLQMLDTHNPFAKKFRIAKERLTEHADEEFIIRIIGAKEGDPVQYDMPTTDDLAMLVIGDFSLETFKWDIIIETRNSELKRISSLHPAYMALQYPLLFPYGERGFQIGVMYSGIQNRQANSRVHMTMQDYYCYQFHYKPGQPNPFLSYGILSNQAKVDARACIDENRLTYILNNQDKLRIENLQGISDAVSRGCINGEEMGKTIVLPPSHISGRRYMIQNYHDSIAICRVHGPPDFFVTFTCNAKWPKIIESLYHCGQKNSDAPDIAIRIFHIKLQELLQDIKSRNIFGPCKAGANILFPIL

SEQ ID NO: 15923 - protein, 421 aa, Zea mays
  VARIANT 30..421: note = Derived polymorphism lacks residues 30 to 421
  VARIANT 99..421: note = Derived polymorphism lacks residues 99 to 421
  VARIANT 108..421: note = Derived polymorphism lacks residues 108 to 421
  VARIANT 165..421: note = Derived polymorphism lacks residues 165 to 421
  VARIANT 177: note = Ancestral polymorphism is W, Derived polymorphism is C
  VARIANT 221..421: note = Derived polymorphism lacks residues 221 to 421
  VARIANT 244..421: note = Derived polymorphism lacks residues 244 to 421
  VARIANT 262: note = Ancestral polymorphism is S, Derived polymorphism is Y
MSPPSRSPPSSLLPPRRPPPRSPTRLPSSWISGALSSLRREQGRRLPWHRREPGITLPISWDGTGRRIRPPSRNALFAVFQREDEGSRAAQVASSWAEQTGESKRMDQELEPQRHASEEQFSRFLLYEVDAIRKVGLINYLNVVYLRYCLNVWDVGGQKTIMSYWRNYFEQTNGLVWFADSSDIRRLDDCRAELHNLLKEEFDVGAKGYAKLNVVSSVMLYYGCSEASNFSVYCNTWVHLVTLRQLIAAWFSCRYTRFKKRYADFHGRAADLVHGLRGTAMPRRQALEEEQCTEEKGISTIPKHKYASKACSPKVTQFGQKKLYFSSDAAFLGYSLILTIVGEHVVASFMGSGRLTDLCVLIILELVLTIEASGGIAPIVSVLQLWMSVDKRCIREKHFKVNLLSKLEMLDFVFWLLMGGE

SEQ ID NO: 15924 - protein, 337 aa, Zea mays
  VARIANT 74: note = Ancestral polymorphism is T, Derived polymorphism is I
  VARIANT 112: note = Ancestral polymorphism is D, Derived polymorphism is G
  VARIANT 205: note = Ancestral polymorphism is P, Derived polymorphism is L
MASYFAGPAIVPSQHATAAPDNSAVATPSPAKSRDPRFSGSASTTVRHIARSFAAADATGDGDLVIPIDGVDATNVWILGRVVSVVNMEASVSFTLDDGTGKIALTRWIAEDIDAKEVAFVQNGIYLKVQVTLVGFQTKQYGFARAIRPVTNFNEVALHFIECIYLHLENVRQKMQGQFPRSIQANVSTYEMQAQVAHSIQTKSPAYMPFSGGAREHQVDFAPEVNHGRFLSSVQTNTPTHVPFSGGAREQQVHFTPQPNQFSAYPGTGGHQHDLQSMVLEVMQRPDILALENGVHVDEVARRLGMPSAQILATAQRLVNLACLCSTIDDYHFKSIK

SEQ ID NO: 15925 - protein, 410 aa, Zea mays
  VARIANT 193: note = Ancestral polymorphism is I, Derived polymorphism is M
MDSSSGMWAVLGQASNVAQLVGVDALGLVSMVVQAALAARRHRDACRRLAQHVEVVGGLLRELELAELMRREATRRPLDQLRAALRRCYALVTACQDCGYLRSLLLGARMADELRAAEKEVDLFIRLVPLIALVDSTHGRSGKQTAEGVPGLLTNGSNHHVRFSRSVSASIKIHIQRTTQICSIAEQPLADYILLHKALHLIVPFRGQLPDGSMVAIKRMDEGATMFDFSSEFLAARLQHTNLIRLLGWCIHGKERILVYEFMHKGTLHSLIFDKRMGLLLDWSKRIDIIRGVAEGLLYLHKQAKLWIVHRDLKLQNVLLDHDMKPKLADFGSARSLSSDSAEECTSRVVGTSGYKAPEYTSRGVYSLKTDVFSFGVVVLVTISGRENTVLEKQGDSVGALVRDVSKHSI

SEQ ID NO: 15926 - protein, 642 aa, Zea mays
  VARIANT 403: note = Ancestral polymorphism is G, Derived polymorphism is R
MLCVRAEDALAAAAAAAAASDKMRSVTLGGTIQRAVRRMAGGAGRRRPHALADSGTADSSASASASCSGDDISSTGSAKREAVQRCTMHRYRSQLEQEVNKLQRQLQEEIDLHMALTDAITYNAALILKASMKLPDKAHELLISISSLETAITKLEEDLHHLHYQLCDARNERLLAENKPECLLPTASDCQPSTACDCTREEPEQTLRYSRFKDYHQVEDGLSTEPEDQQDDEKDAEDGEHVSLNMLMQEACSMENEGKEDQKIDALTFSQPNFKKSDMSGNLWNNPNQLSEEMVRSMKDIFLHLSASPKISREEPFANSSSSAERLSGSTLTTLSDSSIIASVLRSPSIDWNNGDGIIDDVRNFDPYNVKGKEARRDVGSYCSVAEVSWMYIGNEQLEYASGALKKFRFLVEQLSKVDPSCMNCDEQIAFWVNLYNALIMHAYLAYGVPENDIKLFALMQKACYTIGGQPVSAAEIEFVILKMKTPVHRPQLSLMLALHKFKTSENLRRYSIDGTEPRVLFALCCGMFSSPAVRIFSAENVRAELQESMRDYIRASVGINDKGELVVPKLLQSYAKGIVEDSLLADWICRHLTLDQVAAIQDTSSSSSHKQRLLGVRSFSVIPFDSRFRYLFLSNNTRCQN

SEQ ID NO: 15927 - protein, 156 aa, Zea mays
  VARIANT 5..156: note = Derived polymorphism lacks residues 5 to 156
MDASQVASRTKEDTDLHGRVLRFGAEDGRGSPRGRRVQWSGAGEGECGRRGAVLFGEGAAATGGCTGAGKGGGQHGDIPECRVREVAVHAMGDVGENRCVADEGADARTGLGSGGQPWGGGVGSPLRAREGRSPVARNVDGCGSPGKGAPMVDLAV

SEQ ID NO: 15928 - protein, 358 aa, Zea mays
  VARIANT 8: note = Ancestral polymorphism is G, Derived polymorphism is R
  VARIANT 11: note = Ancestral polymorphism is R, Derived polymorphism is Q
  VARIANT 52..358: note = Derived polymorphism lacks residues 52 to 358
  VARIANT 92: note = Ancestral polymorphism is A, Derived polymorphism is T
  VARIANT 99: note = Ancestral polymorphism is K, Derived polymorphism is M
  VARIANT 167: note = Ancestral polymorphism is S, Derived polymorphism is N
  VARIANT 197: note = Ancestral polymorphism is G, Derived polymorphism is E
  VARIANT 222: note = Ancestral polymorphism is Y, Derived polymorphism is N
MTMAGGGGLNRSSSRGQLPPQELLDDLCSRFLLNVPKEELESFERILFLLEQAHWFYEDNSVEHNPNLKSLSFKDFTSLMFKSCTALRPYIAHLDDIYKDFNNYKFRVPVSGAIILDDTYERCLLVKGWKAGASWSFPRGKRNKDEEDHTCAVREVNFCLYHVHACSLFSFLSAPYNFFEAYCTCSDEIYYVLEETGCDVSRLLNLDDYIEVSIGQQRVRLYIITGVKRDTVFAPQTKKEISEISWHRIDDLLPASDDAVSRAVNGMKLYMVAPFLTGLKAWIATHPPPLHQKPETSARGTVWRAKGSSSGTTPVENPVAKAGSDVQHAADRPGCSFRNFRFDTASILQAMEASFLRT

SEQ ID NO: 15929 - protein, 482 aa, Zea mays
  VARIANT 156: note = Ancestral polymorphism is P, Derived polymorphism is S
MRPSSRYPPQPALLALALALALAAAAPELRPLAAAVTVTPPPERTDEEVRRLYEEWRSEHDAGPRRGATGGSLGPGEDDDARRLEVFRYNLRYIDAHNAEADAGLHGFRLGLTRFADLTLEEYRARLLLGSRGRNGTAVGVVGSRRYLPLAGEQLPDAVDWRERGAVAEGLVISWFGGVRGAGACWAFSAVAAVEGINKIVTGSLISLSEQELIDCDKFQDQGCDGGLMDNAFVFMIKNGGIDTEADYPFTGHDGTCDLKLKNTRVVSIDSFERVPINYERALQKAVAHQPVSASIEASRRAFQLYSSGIFDGRCGTYLDHGVTVVGYGSEGGKDYWIVKNSWGTQWGEAGYVRMARNVRVRAGKCGIAMEPLYPVKEGPNPPPGPTPPSPVKPPNVCNAEYSCPEATTCCCVSEYRGKCLAYGCCELENATCCEDHSSCCPHDYPVCSSANSPMMVKALQRKPAMYTGGGGGGEQSGRSSW

SEQ ID NO: 15930 - protein, 546 aa, Zea mays
  VARIANT 130: note = Ancestral polymorphism is R, Derived polymorphism is L
  VARIANT 221: note = Ancestral polymorphism is H, Derived polymorphism is Y
  VARIANT 378: note = Ancestral polymorphism is W, Derived polymorphism is S
MKPPPPKGRGAGGSCVFGRRAFAFLLAAAVVALALLCLFYGAAFAPSIRRAHPRLPLRLRFGDLGTQSIPAGLVVSSIPVRTAAAAQPPRYLLVSVNGVVMGRWAMGAVCDARHSELIPCLDRGLHYQLRLRLNLSLMEHYERHCPPAPRRLNCLIPPPDGYQVPIRWPRSRDEVWKANIPHPYLAAEKSDQRWMVVNGDKINFPGGGTHFPTGAGKYIVHLAQRDGVLLLEVDRVLRPGGYFVYSSPEAYALDPFNRKIWRQMSDLARRMCWRVASKKNQTVIWAKPLTNGCYMRREPGTLPPMCERDGDSDADWGVPMKVCLTPYSKRVSKAKGSELLPWPQRLTTPPPCLEELGISWNNFSEDNEIWHSRVIQYWKHMKFEIQKDSFRNVMDMSANLGGFAASLKKKNVWVMNVVPFTESGKLKIIYDRGLMGTTHDWCESFSTYPRTYDLLHAWLLFSEIEKRGCSLEDLLIEMDRILRPYGYAIIRDKVDVVTYIKKLLPALRWDDWTFEMRPKKDALTIGDERVLIVRKKLWNHSVQDLS

SEQ ID NO: 15931 - protein, 87 aa, Zea mays
  VARIANT 2: note = Ancestral polymorphism is E, Derived polymorphism is G
MEKCRSVPHEHSSPYYGGGGGGGPGQAGKSYSFNGPSGRDDPEPKRRRRVAAYNVLAAQGRIKTTVRGSVKCLKSKISPMSISAVVW

SEQ ID NO: 15932 - protein, 150 aa, Zea mays
  VARIANT 122: note = Ancestral polymorphism is I, Derived polymorphism is T
  VARIANT 108: note = Ancestral polymorphism is F, Derived polymorphism is S
  VARIANT 3: note = Ancestral polymorphism is M, Derived polymorphism is K
MAMRMAAAAVALVAVMGVLAPRAAAQTPNCAEKLIPCSPYMNTTGTPPDTCCGPLKDAVQNDLKCLCDLYASPEIFKAFNISLDQALGLSKRCGLSDTTAACKGNSTSILKTRFSRIRLMAISCLPFMCNHSGVTRLRSIPELCSVTEFP

SEQ ID NO: 15933 - protein, 440 aa, Zea mays
  VARIANT 58..440: note = Derived polymorphism lacks residues 58 to 440
MTVVRVDENPAPDGENSPLDDEYVSADDEHVDDEDKETDSIDDYENPSGTPQMKKGPWSPEEDKRLKDYVEVHGAGNWNKVQQNARLNRCGKSCRLRWTNHLRPDLKKEPFNAEEEEKIIKLHIRRGPKWSMMASYLPGRTDNEIKNFWNTRKRRKQRCGSPLYPEYMLSQVSHKDMDFETLGESHGKKRSNECSKEKVVDVQELVDELIVFEHLDYGKDIVFPIRPLKCHASTGSVQISGDIRKTFCPTDLNYVMTKNQSVPVGSAIGSGYPVYGGRLSTSGTIFGSIQTEIPSIQSSSYSPSNDWLAQCPSACIEQRIPMECNTISQSKAYLMMHSSSAFCAPEHDACSETQAPDLCSGSDVVFDPSQCYPVASFSDLGISDTPLTSGFLNDITLASLLNVNLKDLSHLNRQEPTNDTSLGGASLLNANLKDQSHLSQ

SEQ ID NO: 15934 - protein, 234 aa, Zea mays
  VARIANT 200..234: note = Derived polymorphism lacks residues 200 to 234
  VARIANT 168: note = Ancestral polymorphism is E, Derived polymorphism is K
  VARIANT 88: note = Ancestral polymorphism is F, Derived polymorphism is C
  VARIANT 87: note = Ancestral polymorphism is S, Derived polymorphism is F
  VARIANT 65: note = Ancestral polymorphism is W, Derived polymorphism is R
  VARIANT 56: note = Ancestral polymorphism is S, Derived polymorphism is L
  VARIANT 52: note = Ancestral polymorphism is G, Derived polymorphism is E
  VARIANT 24: note = Ancestral polymorphism is G, Derived polymorphism is R
  VARIANT 15: note = Ancestral polymorphism is K, Derived polymorphism is E
  VARIANT 14: note = Ancestral polymorphism is Q, Derived polymorphism is R
  VARIANT 8..234: note = Derived polymorphism lacks residues 8 to 234
MSAEEAQEEIGRLQKSILLVLSTGNGVNGFTLDPSLGEFILTHPNIKIAKKGKIYSVNEGNAKNWDGPTAKFVEKCKYPEDGSPPRSFRYIRRPLNLLPLNFTTDPQCSSGATMIEAPTLRHSLGQDREDISEVQYPNTIYSSLMFLIVFHVTFIGVAYLGFVSSMAEKKTEMINIIQNCAVNHIACCVVYSQCGNRTVSSDKSIDRRTASWIVLSVWTRNDDNTLISRLLLLL

SEQ ID NO: 15935 - protein, 298 aa, Zea mays
  VARIANT 58: note = Ancestral polymorphism is P, Derived polymorphism is L
  VARIANT 37..298: note = Derived polymorphism lacks residues 37 to 298
  VARIANT 29: note = Ancestral polymorphism is S, Derived polymorphism is I
MMYQLSKVYDRCYGLTLSPGEQRIAVVRSLDLNLLNQMYQVSFTSKQKQQRVGSGLTLVRRKRCADGNSLKLLKRTVQASGSAEQILGQPIVVDEEVPMISRKLLIKSLDSDFKQKSRKQFGFQTEVKKTVWIQINNQAIRGETKTSAVSESGFCDPEKSCGHSNAESENMEVFCKPQEKSLRITEIRLLKEPYGNHWLLRNPIRVEVKTEAKSTSKVAGQHELGPSITPLGLRLEYMICEASKKSSQLVDFLVHNSGMKIMVYFATCACVDYWVVVLPLINSLKGSPIIASHGKMKQ

SEQ ID NO: 15936 - protein, 451 aa, Zea mays
  VARIANT 373..451: note = Derived polymorphism lacks residues 373 to 451
MSSSTARTEKGQEHDRLAPYPRRRASVGSRLRLWTGAAGWVEEQGEGREDERNVRRGRKRWCAHDVKRHRGRAIATARVSVGAGVRRIRGGSSTPTPSAENGVARRWRHKGREKRNRMANKVVVTEARTIIIVRRVLHLCPRIRVPAILRLGSASTLPARSPWKGPPPADLAPTAPVHYTGEKFPSKYLGQTSSPRISLAIHGSGPTPDSARVKGQYSARAAQSAALVAYRYLSGSPKNRLDMSAVVQALEPLIDLDDDVPVAPLGHAGPVVLFVAAAAKEKNERAPRKDVLGHRRRPMSPKASPRKHPSVGTKEEFWVRHLPADQKTRPSLGGVVQAFCYYSEIRCRVSPPSVSGSCGSSSADPYGVPEFGWRDIRRYKQFRSVDTNISASNDSALGQRLNWHGLGSMPSAEAMRLFVKILEEEDPGWYSRAPEFNPESVVDIQMHCSFH

SEQ ID NO: 15937 - protein, 451 aa, Zea mays
  VARIANT 155..451: note = Derived polymorphism lacks residues 155 to 451
MLDLWSAILTGSSERADGSRSSISMWTKITSTDSWRWCLGLIYIVAVASIWIAASYIVQSVVDAGVSPFLITYICNSLFVVYIPIVEAARYFEDSIGDLWTKLKFKDAESLQQASDMESVNLLQSGGHEINVASDQSQTRLSGDASVPDTCFPAQAELTVVDCSKGLDAKGRWTRARVAQVSMLISPFWFLAQLTFNLSLRYTTVTSNTILSSTSSLFTFLVALVFLGETFTWLKLISVLLCMGGTIIVSLADSSSSVNAIATNPPLGDFLSIVSAGLYAVYITLIRKKLPDEKEGQGQVSMAQFLGFLGLFNMLFFFPVALVLNFAKLEPFHRLTWEQAGLVVGKGLIDNVLSDYLWAKAILLTTTTVATAGLTIQVPIAAIVDTLTGHAPHLLDYVGAAAVLVGFAGINIPAGESPQDVQQEQETPIVSMVDDDPVHLPSSNNATDVVS

SEQ ID NO: 15938 - protein, 216 aa, Zea mays
  VARIANT 169: note = Ancestral polymorphism is F, Derived polymorphism is V
  VARIANT 151: note = Ancestral polymorphism is L, Derived polymorphism is R
  VARIANT 104: note = Ancestral polymorphism is T, Derived polymorphism is I
  VARIANT 97: note = Ancestral polymorphism is R, Derived polymorphism is C
  VARIANT 83: note = Ancestral polymorphism is R, Derived polymorphism is C
MSRRKTREPKEENVTLGPTVREGEYVFGVAHIFASFNDTFIHITDLSGRETLVRITGGMKVKADRDESSPYAAMLAAQDVAQRCKELGITALHIKLRATGGNKTKTPGPGAQSALRALARSGMKIGRIGKEILDLSRAGLPVLRTLPRSPRTALAERAVGGEGGCRRLFCVPFAGSCRVAIMKLVLSGWCCCFLCLSRRALILLYVDDCLPLVEPV

SEQ ID NO: 15939 - protein, 753 aa, Zea mays
  VARIANT 225: note = Ancestral polymorphism is S, Derived polymorphism is F
  VARIANT 70: note = Ancestral polymorphism is L, Derived polymorphism is P
  VARIANT 32: note = Ancestral polymorphism is K, Derived polymorphism is N
  VARIANT 20..753: note = Derived polymorphism lacks residues 20 to 753
MSVVGFDVGNDTLVAAAARQRGIDVLLNAESKRESPAAVAFSHNARLIGCHAASASSAHAPFSSVKRLLLGATGRNPDSSLLRDLPRLPFSVSHASGGGAVVHVDHIGRRIALSPTHLLSMLLAYLKQLAEADLGGAPVADCVISVPCYFTQAQRRAYLDAAAVAGLRPLRLMHDLAAAALGYGLYRSDLGGAGGPTCVAFVDVGQCDTQVAVVSFDMSGMKVLSHGFDADLGGRDFDEVLFEHFAEEFRDRYRIDVVRNVKASMRLRAACEKAKKVLSANAEAVVNIECLMEEKDVRGVIRREDFEKLCARLLERVVEPCKRAVEDSGIGLERLHSVELVGSGSRVPAITKVLAGFFRREPSRTLNASECVARGCALQCAMLSPTFRVREYEVQDAIPASIGFNTSDGPVSTLSSDALFRRGLHFPSVKIITLEKNDSFSFDAYYVDANELPPGTSTDIGSFQIGPFQAHTEASKVKVKIRLNLHGLVSVESAVLINDYQRNGSSTDHMEVDSSGDDMQGHKSRSERSIQRQELPITEYIYGAMSKHELLEAQEQEQQLAYQDKLVEWTKDRKNALESYVYDTRNKLSERYRSFATDSEREQISVNLQQTEDWLYEEGDDETEAVYSSKLEELKKLVDPIENRCKDDEVRAEAMRDLLKCIVDHRNAAKSLSTPERDAVDNECNKAEQWLREGSQLQESLPKNVDPVLWSCEIKRKEEELDTFCRNITRHKGSPARTDGSRGSDYMPTPDRD

SEQ ID NO: 15940 - protein, 338 aa, Zea mays
  VARIANT 40: note = Ancestral polymorphism is L, Derived polymorphism is M
  VARIANT 116: note = Ancestral polymorphism is N, Derived polymorphism is T
MDKGKSVVAELSASSSSLPSPSSYPFSKKAKPRKLVSLCLGTLGQHLEDIITDISEFAALFPPHITLAIMSIARRKSLLNDKVLTSLAESSWQILDISGSDVTDAGLATVANVCSNLRAVDISRCEKITTAGVSEIVCHCPSLEILRCGGCPRSEVTARRCLNLLKPKLNALEEDSWEELDTLDIGGGAESLRWLVWPMIDDKSKVTLAVECPRVTVNPQPSLFDLSGYSKVPIEALSSVPLDHSVVEDIDPKTWAVSAAPPRAVAPANPNVPSAPPEIPMAERFRLAYVEREARLAPKRAKRERQRRRRAERDYMMVDIDARSVALAAQASRNLRKS

SEQ ID NO: 15941 - protein, 127 aa, Zea mays
  VARIANT 85: note = Ancestral polymorphism is R, Derived polymorphism is W
  VARIANT 41: note = Ancestral polymorphism is L, Derived polymorphism is Q
  VARIANT 21: note = Ancestral polymorphism is G, Derived polymorphism is D
MDRRLRSPARRPERQQLAGSGSPHRFLRPGALARLRDSRVLARSLRCAARAWAPPSSPPRSPAPPAAWDGVPCFLGPASATRGMRYPLRKKLAAARAVVLLSPPLDVVEAFMDAFAPAASPDVVAAH

SEQ ID NO: 15942 - protein, 206 aa, Zea mays
  VARIANT 39: note = Ancestral polymorphism is S, Derived polymorphism is L
  VARIANT 52: note = Ancestral polymorphism is G, Derived polymorphism is S
  VARIANT 58: note = Ancestral polymorphism is G, Derived polymorphism is R
  VARIANT 81: note = Ancestral polymorphism is S, Derived polymorphism is L
  VARIANT 86: note = Ancestral polymorphism is D, Derived polymorphism is V
MVGLPRRLSRDSRVLMIYKSLLYGKLAGNMLHLIEACILRKLIDTSAYLWPGYVVPSGTLKDTALPQESPWLNFMKVSRLSGPLIDALVASPASRCFKLCKVRSVQFGQKGISYLNTYDGRTIRYPDLLIKANDTIKIDLETNKIMDFFKFDVSNVFMVTGGRNTRRVGVIKNWEKHKASFEVIDVLLGAFCMLCLVFSYLLYKKT

SEQ ID NO: 15943 - protein, 511 aa, Zea mays
  VARIANT 1: note = Ancestral polymorphism is M, Derived polymorphism is I
  VARIANT 151..511: note = Derived polymorphism lacks residues 151 to 511
MARSSGGGLKKGPWTKAEDKLLRDHVERNGEGNWNAVRRETELQRCGKSCRLRWTNHLRPSLRKGPFSTEEERTILVLHGLIGKKWATIASHVSPPESQLPKSRHLVLVILSSCRVPFRSSTPCVNRSSCFFDFDRMQLPGRTDNEIKNYWNTRVKRRQRARLPLYQPDVEQEIARLREENVNPLADDDGRANTNAGLPPPPDLPRLYDSGYQLVLPPTTSHSSLINQDCPLQDQMQVFHVHHIGSQQPAFHQDVSAAAFSNTVSSGLPPLPTVRTQADLPPTNQFKTCSGGTSGLLEPMLMIGDEQLLMRPDPSMVKVPSMPALSYRQLAVSGLLPAYGAGSDGDFTPHCPLGEDIHHGATWDFTFGNQTDAFTEEFVKPAKRRRTSEVGIVNMFPVAPPEDRLGTYYGVSAAPSSSPVTDDRFTVASPWSWFGTCGGSTTPSTGPSSVVADDEFTVAPPGDCFGTCGGSTVPLTGPSSAVVDDEFDYLDIEQFMWAVPPSIDDEHDSDA

SEQ ID NO: 15944 - protein, 1180 aa, Zea mays
  VARIANT 286..1180: note = Derived polymorphism lacks residues 286 to 1180
  VARIANT 693..1180: note = Derived polymorphism lacks residues 693 to 1180
MNIVRGVADLLRKAPPPPPAPDAGAAPTASFSAGDFDDAPTPRVVFSGSLEEGALNALWKNYENALDKVEKEKSLQIFVLQFVETFRDWDPNPIEQLVDQELGNNETVVGCSCGHPSEVILILIQEISLITSTFTESGNSPVSPTNHYSGQQNNLGLSSQILQVLECLEILTRSLHNCRVFSYYGGVQKITSLLKAAVAQLKNLNCLLAAEDQSADEAVKNSRVMLNILVCIITIISNFMKLDITVGRIPHITDTTKHTPSCNHLAAVTSSSPDRTISDTLRHWQQKATVLVMEARCVNWLVELLHTVQRLNLKEQCIDLSLHFITLCILRSTVSGTRAQNHLRSIGGLEILLDGLGLPSSKFSVPRQSSISKNERDEILLLQIQYLQTLSEAVFGNVNNLQILFENGRVHKFANCICWPAFMIQMFHWQNDSTKASLTLDSVSGPTYSLDRTEWIDYSIKLSNAFCSFVLPSEDIGYCSDEIAVSQIVLSIPLAYLEQSVRWIIRILMTVFLCIRACTKETELPHHIKIFAKTLQYYVIRMFKRVLISTPALLPAFREEGVWDLLFSGNFFYFGSSIEDTCFHTVTDIQNGNVSSNRISIHSESLYRTDVKILQVEAISFLEFAATLHENTYNMPECSALLDALEHCISDPLLVSTLLKSFRVILQLATEHTLASFESLDVITRVLKAACRQAQELRNFSNFLCSNVSISQDSSQFKNIEGRTEDTLICTELALSLFMEYVTISIDGRILVLHNADCIDCLFDLFHEQNIREHVLEQVLALFRLPSSSAEDHTAKLQLCSKYLENLARANEKEKVNTELLIDLLVNMREIIMMDHMYYQNLFRDEGCFLHIISLLNGNFNKVTDERLVLNVLQTLTLLLEGNDASKGAFRLLVGAGYQTLQSLILDFYKWSPSGRLLDALLSMLVDCKFKLDEKTTIKNEDAVVLLLNILQKSSTSLQHYGLVILQQLLKQSITNRTSCFRAGLLSFLLDWFSVEERDDTVIAITELIQILGAHSICGKDIRKIFALLRCEKIGAKHKHTSLLLTSLSHMLKEKGPEAFFEFSGHDSGIDIKSPFLWPYNRGISFSCWLRVENFPDSGMMGLFSFFKEDGKGCSAVLNRSALVYESIYQKHQCVLLPLKLPPKQWRFLSITHTIGRAFSGGSQLRCYVDGELVSSEKCG

SEQ ID NO: 15945 - protein, 1897 aa, Zea mays
  VARIANT 1448..1897: note = Derived polymorphism lacks residues 1448 to 1897
MGGTKLCSRHLPQDIIYCVGGVSVFFPLFTQFFDAASDIEKCCHTSVVNDKLVAEVIELVATVLDGNVSNQQQMYLLSGLSILGFLLQSATPQLLTTKTLSALKYMFDILRNCSMSKVLLKDAISQIYLNPQIWVYASYEVQRDLYMFVINYFETDGRLLPLLCGLPWVIDIVCRYYWEKADSRHVVASKPLFHSVTKQVIGERPEVVEIRKLRLLLLSLAEMSLKIKVSPDDIRALVAFIERSQDIACISDVLDMIIRALSQGEVFSSFVGNVNYLGGCCIFINLLKREFEPVRLLGLQLLGKLLTGIPSEKKETKLFALPLGQSRPISENLTKEITAAPQFFLNTMSERLFKFPLSDNLCAALFSVLSGTSAQQVPQENSEPDPSRDRNCNILSLPPFSLPQILICIFRFMHSCKDSSARTRILNLLLGLLDSNSSNIEALMEHSWNSWLETSTKLEVFKDYKSVSKGDPDDVKADEISLVRNLYSLVLSYYLRFVRGGWHQLDDTANYFLLKTDQGQLSCSDLLRDILDDIAGSLLHKSVEDNIFLLQPCCDNVLHFLNLIQELLISQMGIRLLFLSPSISEESSHDNIWKEDIKSTVNDILNTESHGQFTRFSDVNEVSDDWWSFFDKVWSIIRNLNGKGPSKFIPKDPNVEVASLGQRARGLVESMNVPAAEKVAVVSGGGGIGTALGIKVNRFAEKATTSREEIIPRIFFHLVILYLCKAGLENASKCVIQFMSLLPILLISEDDQSKNKLHFLIWSLLIVRSQYGQLDDSARFHVFSHLILETIIYGKSMLVTNILERDDSVDVNNKETGFILSFIQKNRVLAAAANEVKHMKAVQADRLKKLQDLRMKLNECSATEIKLAQAIEDEIHLTITAVLSADDNRKTACQLAFREDQQIIRDKWIHISRALMDERGPWSANPFPNDVVTHWKLDKTEDRWRRRFKFKRNYKFDERLCQPSQSRNESTATLADQLYISAKITQKMKQFLVKGVRGITEDSSYEQFEDTNDASESSQSNPSESQNLNNAADTSDHHASAHYKKEPSSTNGDNDYTKVLCSVRCVFVTPKRKLAGQLDITRTVMHFSFEFLVEGTGGSSVFSKFKDKKDSDCKNELGGVDRLDGCRDSMIETNGVLMQNQSNKIKRHKRWNITKIKGVHWTRYLLQYTAMEIFFDDSTAPIFLNFSSQKDTKNAGTLLVSLRNEALFPKGSTKDKNNIISFVDRRVGLEMAENARERWKRREISNFEYLVILNTLAGRSYNDLTQYPIFPWVLADYTSEKLDFNKSSTFRDLSKPVGALDENRFKVFEDRYLSFCDPDIPSFYYGSHYSSMGIVLHYMLRLEPFTTLHLNFQGGKFDHADRLFQSIESAYINSLSNTSDVKELIPEFFYMPEFLENSNSYHLGVKQDGEPIGDVALPPWAKGSPEEFIHINREALESEYVSSNLHNWIDLIFGYKQRGQPAVEAANIFYYVTYEGAVDLENMDDMLHKSAIEDQIANFGQTPIQIFRTKHPRRGPPIPIAHPLYFAPQSLTLTSSVCSTASHMCAILFISLLENTVVLMNEGLILSVKLWLTTHLQSGGNFTYSGPQEHSFGIGSDVISPRKIGTFLAENVKFGRQFLATMQNSRDNYLILCGNWENSFQIISLSDGRIMQSIRQHKDVVSCVAVSSDGNVVATGSYDTTVMIWHAFRGRPIDKKIRGANFELSEKEQVIVERPVHILCGHDDIITCLFVSTELDIVISGSKDGTCIFHTLREGRYVRSIQHPSGVGLSKLVASQHGRVVLYSENDLSLHMYSINGRHIASSATLGRLNCIELSCSGDFIVCAGELGQIVLRSMHSLGIVWRYDGNGKTITSLAVTPEECILAGTKNGSLLVFSTETSLLRRGSMQRNKIKPSTSG

SEQ ID NO: 15946 - protein, 185 aa, Zea mays
  VARIANT 17: note = Ancestral polymorphism is K, Derived polymorphism is N
  VARIANT 9: note = Ancestral polymorphism is C, Derived polymorphism is R
MKLLYNNYRFNNYKAAKCWQRYSSSSKEKVREAKVPSLESFAICRHGLVSSVGWWSTCMLAIATQKLAREQKPQQQPCCGAAPPLLAQNVALAAGEGDTGEPCASHPRCLCLACSRRVGHRIIPVLERCLRLLSPCSRSCKKLPAGAGPLAELRIQSGASSVDEELREAHACAWSQSSSTFDWDP

SEQ ID NO: 15947 - protein, 428 aa, Zea mays
  VARIANT 51: note = Ancestral polymorphism is D, Derived polymorphism is A
  VARIANT 52: note = Ancestral polymorphism is G, Derived polymorphism is C
MVLSDCKGNSIYAEIPANLAEEKGALIETNQIYDISRFRVTAAKTTYKPIDGDKMIQFTTYTIIKPASNPPPTFPLYIYQLTPFDEIESQIQHKTKFLDVLGTITEVTALKTVHIQGQLNPTIIRDVMIEDLSRKTLKITLWAKRATSFTIQDVYDPVSKKPILALFVGCLPKFYKGVYLSGGAACHWYFNPTIPEAEAYQNRRGGETIQLHLPTQPKHALQTFQPPTIEHKTLEQLLTMNPYDYPDTGYECTATITEIDTSNTWWYPSCTKCGRKTTPHNIAYYCDWCKWDGYKFKYKLKFRASDATAMAQMFCFDNIARYIVGKSCEVILRSTNAATPIPPDLAQIVPLKFTFRAARKLIYPPLSNPVTYQHTPKSDGEEEITEQQTMNTSQIKGKNSMPSFESPPKRFKKGSLDIQSNDDDVQEN

SEQ ID NO: 15948 - protein, 119 aa, Zea mays
  VARIANT 28: note = Ancestral polymorphism is T, Derived polymorphism is M
  VARIANT 35: note = Ancestral polymorphism is R, Derived polymorphism is W
  VARIANT 50: note = Ancestral polymorphism is Y, Derived polymorphism is D
  VARIANT 54: note = Ancestral polymorphism is H, Derived polymorphism is L
  VARIANT 63..119: note = Derived polymorphism lacks residues 63 to 119
MESVQRCGRPRNEAGSSLTPGLQGGVATSGPRWRRVARSTHASSGASSHYRLGHGVSVQGHGWSCGHAGSPRRSAITRKMAVSSAPASFSAGASPPEIAGDGNCSWEGEEGAMESGAEG

SEQ ID NO: 15949 - protein, 76 aa, Zea mays
  VARIANT 68: note = Ancestral polymorphism is G, Derived polymorphism is A
MYDEIRPAVEEHERDSQDSVSTSLAEKWIEASCRKYKAEFDLYAAVLKNVASTPLRSKDDVAPRVQNGLKYLENGS

SEQ ID NO: 15950 - protein, 135 aa, Zea mays
  VARIANT 23: note = Ancestral polymorphism is A, Derived polymorphism is T
  VARIANT 46..135: note = Derived polymorphism lacks residues 46 to 135
  VARIANT 64: note = Ancestral polymorphism is A, Derived polymorphism is S
  VARIANT 73: note = Ancestral polymorphism is T, Derived polymorphism is I
  VARIANT 84: note = Ancestral polymorphism is P, Derived polymorphism is A
  VARIANT 104: note = Ancestral polymorphism is P, Derived polymorphism is L
MRATGKDDSYAAHITKAYKWEFAEREGLQLVVLNPGTTLGPFFMSSVNTSLNNLLQHLRGLCLASMECLFDFTDRIADMYHDFPVHRINYQRGQTGWLMRAKEPSKKLIDLGVCFLPFDVTIRETVDCFRSKGLI

SEQ ID NO: 15951 - protein, 1018 aa, Zea mays
  VARIANT 595..1018: note = Derived polymorphism lacks residues 595 to 1018
MRPAFSASKPSPSGREKGRRKGASAAEQLLTGQAVPLRTRLHDALALGLTKSDGHGAKKWQSTDAGVQSHVLKSVGAFVGCLSNELLRLPPIKESISDILVALEGILKTENVSVLIQAADVSSKFFSTLGNSVRQYSVLEMVSCLSCHLSANQLRIALPCASALTCILNNQVTARASTQAEIWEALDKTNAVASVISTLQNYTEDVHPLNYLTEMISLLRSILWIWPSSRYHVWSNHNLMAKLAHYCLTAETTVSAKILKLYAALALCGNGAMVLLKNEELIIKTGNLMGKSHPTVTRIEALRLCQVFLRSSRGCNWLMTAHGQPIVQGITNAMSEINEKTLVREGCRTALLALRYSGNHHRCFWFNAIDKILYKILCGSCNSSSHAHQTLCHGELFNIDSKDIMDIHPYVWDILGYLAVHCDNEHFSVGTCQNNFLQGLISCACSLATDLTLKKSPLKLSKEEQEPALRAVLMMLLSPSQFIFSEASSKFLEAVLPLDNEYMNMFMSSLESNVTRNLTASFDCVKIMTNLMNIACLLVVQSNYSLNKRSAVDVLSNIIKECLHDHLYITRSNFASHLQFCFDGSSCCYLSEEWEGENIVLFYGLVVLFNLLKSDNFICFHCKRKLDAGIVCHECRDHYNEGLVGVLKQALCQNMSPGPKSYIAHILSMFGLCGFPSKLGGNMRNVLCDSELVDLELLLADGESLSAHAAILSARCPKLLPSEKTFVRDGSVTYEWGRRSCYHVRMSDRVDSHALKKILEYAYTGLVTVDDATVKPVKTLAKYCHLRSLHLMLQKEQPRWHSCPIYDLTTALEPAKHSFSDIILEAQSNDKMECHHGSCQLSTPHIHSHKVILSVSCEYLRALFQSGMHESFAETIRVPVGWEALRKLVQWFYSGELPRVPPDCRWKATSTEEKLSILKSYAELSSLADFWFVDGMKEESLQVLTSCLNSSSTDASLAFIGFAANLGQWELVEAAISSVAHLYPRLRDSGRLEQLDEDVLNMLRTEHVRYLQHRSASK

SEQ ID NO: 15952 - protein, 987 aa, Zea mays
  VARIANT 64: note = Ancestral polymorphism is G, Derived polymorphism is S
  VARIANT 31..987: note = Derived polymorphism lacks residues 31 to 987
MAAERACGALLLVVVALMMRLAAGAEHENNERDALRAFWAGVSSDPSGALRSWNSTAHFCRWAGVSCIRGHVVSLQLSYLGLVGTISPAIGNLTYLELLDLNRNQPSGSIPSSIGRLRRLTYLGLCDNGGVGGEIPDSLRNCTGLTVVYLNNNSFVGGIPTWLGTFQNLSYLYLSQNSLSGEIPPSLGNLTKLQILTLDQNLLEGPIPEGLSRLSSMQVFDVHQNSLRGEIPPGFFNLSSLQQLNLASNAFHGRLPLPLPPDSGARMSNLRYLLLGGNRLAGPIPAAIANASGLATLSLANNSFSGQVPPEFSGTMPASVGNLSKHLKTLGLANNRVSGPIPPGIGNLVALQRLRLQSNRLSGAIPEAIGNLRNLSGLWLQDNKLAGPLPSSIGNLTQLLVVDLSSNRLNGSIPRTLANLQLLTSLNLSGNALAGPVPSEIFSLPSLSLALDLSGNQLDGPLPSDVSSLVNLAQLVLSGNQFSGELPDDLGSCQSLELLALDRNLLDGSIPPSLSGLKGLRTLNLTGNMLSGSIPPKLGDMSGLQELCLSRNRLTGTIPEELENASSLVELDLSYNDLDGRVPARGVFANVFGLKIAGNGALCGGVPQLGLPRCPAAAASARDTHRFRLLLRVVAPVLSVALLSAAILLLAILQCWWKTTRRAKTAAPDVLEGKNYQRVSYAELAKATNGFAYTNLIGAGKFGSVYLGALPLTTTKTKSRDSDSEPESVAVAVKVFDLSQFMPNYSLDRWLHPGSRELDKDVKSLSVAQRLSVALDIADALSYLHTSSVPPIIHCDLKPSNVLLGEDMTALIGDFGLAKLLLDPGSDDPDPRGCAQESTIGIRGTIGYVAPEYGTTGKVTTHGDVYSFGVTLLEIFTGRSPADGAFEDGLTLVEFVGAALLHDKIEQVVDPALLPAVGFDGDASRGSGESGARVPVHNCLVSALRVGLRCTRAVPYGRLSMTDAASELRAIRDACAVALAPPVSSDS

SEQ ID NO: 15953 - protein, 154 aa, Zea mays
  VARIANT 20: note = Ancestral polymorphism is E, Derived polymorphism is K
  VARIANT 60: note = Ancestral polymorphism is G, Derived polymorphism is V
  VARIANT 72: note = Ancestral polymorphism is E, Derived polymorphism is D
  VARIANT 75: note = Ancestral polymorphism is E, Derived polymorphism is Q
  VARIANT 84: note = Ancestral polymorphism is S, Derived polymorphism is A
  VARIANT 140: note = Ancestral polymorphism is R, Derived polymorphism is C
MAPDTETTLAIRDDEPAAAEVDRSMATDTESPTPTPVPTLAIRDEEEPAAAAGAGAGAQVLEERSVAVILQELLQPRDRRVQASAFFFACGGSVVLHGTVANLADNPEHVLLGFGLFTVGAALAFLTLSGSDRLGRAAARVEEKLRGLFRSPAG

SEQ ID NO: 15954 - protein, 131 aa, Zea mays
  VARIANT 107: note = Ancestral polymorphism is P, Derived polymorphism is S
  VARIANT 105: note = Ancestral polymorphism is D, Derived polymorphism is E
  VARIANT 89: note = Ancestral polymorphism is C, Derived polymorphism is F
  VARIANT 83: note = Ancestral polymorphism is R, Derived polymorphism is Q
  VARIANT 18: note = Ancestral polymorphism is V, Derived polymorphism is D
MTMFAAASTALWPLCHVVPSFLSLLDNSLHRSNANIPVTLPPSMSQEAHRDFDVRKCCAEAICLVVDSKQNAAEPRERRRDQRQGELGCTLQFLLPNFALLWITDLPVNYLQIKTSVVLAIIEEVEAAKKE

SEQ ID NO: 15955 - protein, 134 aa, Zea mays
  VARIANT 18: note = Ancestral polymorphism is A, Derived polymorphism is T
MKRLLRRLSRVAAADACACAAAAAYQPLRPGAKAAALSGARRLGGGARAPGGHVPVCVGEEGGPLERYAVRAELLARPAFAALLRRAAQEYGYARPGALRIPCPVADFRDLLVQLSSTSADQPDDDAALCCHYC

SEQ ID NO: 15956 - protein, 736 aa, Zea mays
  VARIANT 534..736: note = Derived polymorphism lacks residues 534 to 736
  VARIANT 539..736: note = Derived polymorphism lacks residues 539 to 736
  VARIANT 592..736: note = Derived polymorphism lacks residues 592 to 736
MPPRPSLHSLLLMAASAAAASGDSGPLLAARRRLAATAAAGGHRIRLLHSFSPGRVPRRPEVVCCVRSAPDSRRSAPAPPCSRNVLSAKNYSTASEERLGKIIQKLKNEGINPKQWRLGNFQRMLCPQCNGGSSEELSLSVYIRKDGINATWNCFRSKCGWRGFVQADGVTNISQGKSGIESETDQEVEAKKAANKVYRKISDEDLNLEPLCDELVEYFATRMISAETLRRNKVMQRNWNNKISIAFTYRRDGALVGCKYRAVDKTFSQEANTEKIFYGLDDIKRAHDVIIVEGEIDKLSMDEAGYRNCVSVPDGAPPKVSSKIPDQEQDKKYSYLWNCKDYLDSASRIILATDNDRPGQALAEELARRLGKERCWRVNWPKKNDTDTCKDANEVLMFLGPQALRKVIEDAELYPIRGLFSFEQFFPEIDNYFLGIHGDELGIHTGWKSMDDLYKVVPGELTVVTGVPNSGKSEWIDALLCNINKQSGWKFVLCSMENKVKEHARKLLEKHIQKPFFNARYGGSAQRMTPDEFEAGKQWLNKTFHLIRCEDDSLPSINWVLDLAKAAVLRHGVRGLVIDPYNELDHQRPSNQTETEYVSQILTKIKRFAQHHSCHVWFVAHPRQLQNWNGGPPNIYDISGSAHFINKCDNGIVIHRNRDPNAGPLDTVQVCVRKVRNKVVGQIGDAFLTYDRVTGEFKDAGKATTAPSAKAAKQSRKEAYKMPFQHAAEDGENSGL

SEQ ID NO: 15957 - protein, 244 aa, Zea mays
  VARIANT 107..244: note = Derived polymorphism lacks residues 107 to 244
  VARIANT 95..244: note = Derived polymorphism lacks residues 95 to 244
  VARIANT 83..244: note = Derived polymorphism lacks residues 83 to 244
  VARIANT 68..244: note = Derived polymorphism lacks residues 68 to 244
  VARIANT 67: note = Ancestral polymorphism is C, Derived polymorphism is Y
  VARIANT 46: note = Ancestral polymorphism is P, Derived polymorphism is L
  VARIANT 37: note = Ancestral polymorphism is H, Derived polymorphism is Y
  VARIANT 36..244: note = Derived polymorphism lacks residues 36 to 244
  VARIANT 33: note = Ancestral polymorphism is R, Derived polymorphism is C
  VARIANT 25: note = Ancestral polymorphism is S, Derived polymorphism is W
MEQEILKFIHDPSRTEYEFNGLPTSYLRLAAHRLAQHYFLQSIAIPDNSLPDGTGSHIILRKTTFDCRLPAVRLADIPVNLPQEDISVAKVAIKQRPQKNFHGMNSSSAHSSRDNLQKSVEELEQSRRDDMESLGYVLMYFLRGRLFTGLKAGNKKQKYEKINERKIAFNTPNIWEGFQFDYVFNWTILKYQQAQMTTAPPRAIAPAVGQSSGMAPVLQGREATRVRLLQSGKRVQHAPWYDPR

SEQ ID NO: 15958 - protein, 359 aa, Zea mays
  VARIANT 94: note = Ancestral polymorphism is D, Derived polymorphism is V
MVSMSTTPKPLDSAVVSAAVDGGDEGGGGGGGGKKQAHGAVMAPPPMVVPAAAPAAEEEVRKVRKPYTITKSRESWTEPEHDKFLEALQLFDRDWKKIEAYVGSKTVIQIRSHAQKYFLKVQKNGTGEHLPPPRPKRKAAHPYPQKASKNVSQAILSQEQPTQREQGSVMPMDTATVRNTNANVAVPSWDNTLAQPFSAGHVQGAAATNNCSSSMESPSGTWPTSEAVEQENMVPPLRAMPDFAQVYNFLGSIFDPDTSGHLQRLKAMDPVDIETALLLMRNLSMNLRSPDFEQHLLVMYKHAINDILFWVISGGCYHHIAMVARTMSNLKPWKILDLLRVAIFHPCKPSVTLHVHMWS

SEQ ID NO: 15959 - protein, 114 aa, Zea mays
  VARIANT 55: note = Ancestral polymorphism is A, Derived polymorphism is T
  VARIANT 43: note = Ancestral polymorphism is E, Derived polymorphism is K
  VARIANT 29: note = Ancestral polymorphism is R, Derived polymorphism is H
  VARIANT 21: note = Ancestral polymorphism is A, Derived polymorphism is V
  VARIANT 15: note = Ancestral polymorphism is V, Derived polymorphism is I
MVEAGSPSRNIMPPILVADVAVVRLTISRRAAVKIVALRLQLENKDREEAEKHSARSCFDEDGYCSSPRTSGFNEDTASSLECSIGEAETPNYGSPDEMFSKDLNPCLTNYFGE

SEQ ID NO: 15960 - protein, 122 aa, Zea mays
  VARIANT 101..122: note = Derived polymorphism lacks residues 101 to 122
MAWGEDEAIDPDVASMGLHVSERIGRDAVSSPPPRPSSASSSANSPRAQKHTARHVTTERARRWWPVSTFLHACEGEAMTKLTNEKVPYFNVPIYLQNKTQIGKVEEIFGPINESMSTSSPP

SEQ ID NO: 15961 - protein, 838 aa, Zea mays
  VARIANT 267: note = Ancestral polymorphism is P, Derived polymorphism is S
MGQSKAEFLEQFGGDYGYPDAPRGIDDLRAAEFKRLEGMVYLDHAGATLYSEAQMTDVARDLMSNVYGNPHSQNDPSMATSDIVTSARHQVLKYFNASPKDYKCIFTSGATAALKLVGECFPWSRDSCYMYTMENHNSVLGIREYALSKGATASAVDVQEVIDPSKSHESDSMFKVSKHLNQRRGDDVLLHKYQNGSLAPISGNSLNLFAFPSECNFSGHKFNLSLVKFIKEGKFMDLPSQQQGQWMVLIDAAKGCTTEPPNLTLYSADFVVCSFYKIFGYPTGLGALIVKNVFFCNSYGIGTVAASIADIDFVQKRKSIEQALEDGTISFLSISSLRHGFKIINMLTISAIARHTASLATYVRNKMLELKHSNGKNVCMIYGQTSKVNHLKMGPTITFNLKREDDTWFGYREVEKLASLSRIHLRTGCFCNPGACAKYVGLSHSDLVSNFEAGHVCWDGNDVINGKPTGAVRISFGYMSTYEDAEEFLKFLRSSFVSKPVGLNNEYMVNMDTLNLVDDWSQQALSVIRLKSITIYPVKSCQGFSVQSWPLTTGGLKYDREWLLQGLGGEILTQKKVPELSSICTLIDLELEKLFLESPKCKDKLQISLLDNLAHLSEEVDVYGQRYEVQSYGDKVNSWFSVAIGRPCTFMRCSSSKYRSCTINGGRDRLCRDTRSKLSFVNEGQLLLVSEESISDLNSRLSSSHGNGKQGVLVDAMRFRPNIVVSGSTPYNEDNWKRLRIGEAYFTSMGGCNRCQMINQYQSSGQVIKSKEPLATLASYRRKKGKILFGVLLNYEDGMEGEDDAVVERWIKVGQEVHTYLNDDLCTYIPGSFTCTRG

SEQ ID NO: 15962 - protein, 266 aa, Zea mays
  VARIANT 60: note = Ancestral polymorphism is S, Derived polymorphism is C
  VARIANT 98..266: note = Derived polymorphism lacks residues 98 to 266
MRGFERKGVRQYNRSEVPRMRWTEELHRQFVLAVECLGGQDEATPKQILQLMGVKGVSICHIKSHLQMYRSSSSSSSSTHNQSSSLQKLTSTTASNSKRVFLSREDHASQADGSTPASDENIYTTMLCGCSHSTPYQIRPSLEGVFRGLEQTRMLATTEKKMSLNRMLLKSISRPSHTEKQHTGCDLTLSIGLWAEDASSNDVDGSSSISEELMPAAPAAGARRAAAVKEESEAAALNLDLTISSSYWLALTSDDGARRRTAGWRR

SEQ ID NO: 15963 - protein, 348 aa, Zea mays
  VARIANT 76..348: note = Derived polymorphism lacks residues 76 to 348
  VARIANT 98: note = Ancestral polymorphism is A, Derived polymorphism is V
  VARIANT 108..348: note = Derived polymorphism lacks residues 108 to 348
  VARIANT 125: note = Ancestral polymorphism is I, Derived polymorphism is N
  VARIANT 134: note = Ancestral polymorphism is A, Derived polymorphism is T
  VARIANT 178..348: note = Derived polymorphism lacks residues 178 to 348
  VARIANT 216: note = Ancestral polymorphism is S, Derived polymorphism is C
MGGYENGESTAAAALADGGVILGVDGGTTNTVCVCLPAAMTPPESPATVPVLARAVAGCSNRNSVGENAALETLEQVMTQALALANTDRSAVRAVCLAVSGVNHPSDQLRMLEWIRDLFPDNAKNYVENDAVAALASGTMGKLHGCVLIAGTGCIAYGVTEDGKVARAAGAGPVLGDWGSGYGIAAQALTAVIKAYDGRGPQTRLTRDILEKLDLSSPDEIIGWTYADPSWARIAALVPVVVSSAEDGDEVANKILHDSVQELADTVIAVVQRLRLCGEDGKDMFPLVLVGGVLEGNKKWDISGEVIKCISKVFPGTDPIWPEVEPAIGAALLAWSHHHKGLKLENGS

SEQ ID NO: 15964 - protein, 99 aa, Zea mays
  VARIANT 89..99: note = Derived polymorphism lacks residues 89 to 99
  VARIANT 90: note = Ancestral polymorphism is E, Derived polymorphism is G
MEALDNMWAKKEAFDKEIEKAKEERFNIALELEKKRVSAEEKKAEAKLIKVSAEDKKAEAELIKEEKEIMSIDMTSLSPLQRQYYETMQEKIVARRLAN

SEQ ID NO: 15965 - protein, 262 aa, Zea mays
  VARIANT 49: note = Ancestral polymorphism is R, Derived polymorphism is I
  VARIANT 64: note = Ancestral polymorphism is A, Derived polymorphism is D
  VARIANT 67: note = Ancestral polymorphism is A, Derived polymorphism is V
  VARIANT 79: note = Ancestral polymorphism is P, Derived polymorphism is A
MAWMTAVSAPVVLKSSQVGGLCAPSDSNERMLVYERLYHGSLDKLLFGRSDGHFMDWSKRLKVALGAARGLAFLHDEGPFQAMYNEFSTLNIQIDKGFTAKLSGYGCVGFNTEEISNAPVICFLRSAANHSVETLEKGLLTQFVYCCNKSGLDRSKVNVNGGTIALGHPLGATGARCVATLLNEMKCRGRDCRFGVVTMCIGSGMGAAAVFELCSARLEVSTITRHCNPMVIDDRELPCYCVLILETFIITMYEILSLISTG

SEQ ID NO: 15966 - protein, 379 aa, Zea mays
  VARIANT 43: note = Ancestral polymorphism is H, Derived polymorphism is R
  VARIANT 59: note = Ancestral polymorphism is H, Derived polymorphism is Y
  VARIANT 232: note = Ancestral polymorphism is E, Derived polymorphism is V
MEHDGTTNLAVTEAVRSVQLLKIDGYCATATMGASEFIKFRWHIDGHEWEVRFYPDYWYFFEDEDCFGTYGDDDHSEWVGLKLILVSEPQRDDDKVRVNLSCRLVCPSPTSQRPHLDTCWSEEKRVSHVFASDSKCSPELLLILKHELPSSGYLVDDSLTVECTVTVLRDLDAATDKALSSLPVPPPSDLHQHLGDLLQSEDGADVTFRVSGESFAAHRAILAARSPVFKAEFFGGMEERSSASVEVKGMEAAVFRSMLRFIYTDTAPELDGAQDQEPEAAVAMAQHLLVAADRYGLNRLKLMCECKLSGGIDIGTAAATLALAEQHNCSLLKAKCLEFVTRSPETLDAILATDGYEHLVASCPSVLAELLRAARGRKI

SEQ ID NO: 15967 - protein, 363 aa, Zea mays
  VARIANT 251: note = Ancestral polymorphism is D, Derived polymorphism is G
  VARIANT 246: note = Ancestral polymorphism is R, Derived polymorphism is C
  VARIANT 217..363: note = Derived polymorphism lacks residues 217 to 363
  VARIANT 179: note = Ancestral polymorphism is E, Derived polymorphism is D
  VARIANT 111: note = Ancestral polymorphism is H, Derived polymorphism is Y
  VARIANT 110: note = Ancestral polymorphism is S, Derived polymorphism is F
  VARIANT 55: note = Ancestral polymorphism is D, Derived polymorphism is Y
  VARIANT 14: note = Ancestral polymorphism is V, Derived polymorphism is L
MEHDGTNLAVAEAVRSVQLLKIDGYSATKAMGPSEFIKSRWNIDGHEWEVHFYPDYLYYFEEEGPYFLELTSEWVALKLILVSEPLKDKLRVNLSCRPVCQFVIEEKSVSHVFASGSRCSPELLLILKHKLPSSGYLVNDSLTVECTVTVLRNLGAAETTKGQHLPVPPPSDLHQHFGELLESKDGADVTFRVSASGESFAAHKVILAARSSVFKAEFFGGVQEQERSSAYVIRDMEAAVFRSMLRFIYTDMAPELDGAQEPDAAAAMAKHLLVAADRYGLNRLKLMCECKLSGGIDIGTAAATLALAEQHNCSLLKAKCLEFVTKSPETLDAVLATDGYAHLVARCPLVLTELVRAACGRKI

SEQ ID NO: 15968 - protein, 356 aa, Zea mays
  VARIANT 306: note = Ancestral polymorphism is C, Derived polymorphism is R
  VARIANT 254..356: note = Derived polymorphism lacks residues 254 to 356
  VARIANT 107: note = Ancestral polymorphism is H, Derived polymorphism is Y
  VARIANT 100: note = Ancestral polymorphism is S, Derived polymorphism is F
  VARIANT 86: note = Ancestral polymorphism is S, Derived polymorphism is R
  VARIANT 83: note = Ancestral polymorphism is V, Derived polymorphism is A
  VARIANT 76: note = Ancestral polymorphism is D, Derived polymorphism is Y
MDHDGTNLAVNEAVRSVQLLKIDGYSATATMSELDFIKSRRNLAGHEWEVLFYPQFSRYGGCIALKLVLVSEPPRDKDKLLRASLRCRLVCPSQPHLHASIEKSVSHVFTSDSRCSSEVILIPKYELPSSGYLVNDSLTVECTVTVLRDLDATAKVLSLPVPLPPPSDLHQHFDELLQSKNGADVTFRVSGKSFAAHKAILAARSPVFMAQFFGGMKERSSAHVEIRDMDSAAFSSMLHFIYTDMVPELDGAQEPEAAAIMAQHLLVAADMYGLNRLKLICECKLSGGIDIGTAASTLALAEQHDCSLLKAKCLEFITRSPETLEAVLATDGYAHLAASCPLVLAELLMAARGRKI

SEQ ID NO: 15969 - protein, 319 aa, Zea mays
  VARIANT 235: note = Ancestral polymorphism is P, Derived polymorphism is L
MAIKRTKAEKKIAYDKKLCSLLDEYTKVLIALADNVGSKQLQDIRRGLRGDSVVLMGKNTLIRRCIKVYAEKTGNHTFDPLMDLLVGNVGLIFTKGDLKEVREEVAKYKVGAPARVGLVAPVDVVVPPGNTGLDPSQTSFFQVLNIPTKINKGTVEIITPVELIKKGEKVGSSESALLAKLGIRPFSYGLQVTSVYEDGSVFSPEVLDLSEEDLIEKFATGVSMVASLSLAISYPTLAAVPHMFINGYKNVLAVAVETDYSYPHADKIKEYLKDPSKFAVAAPVAAGDSGAAAAPKEEEKAAEPEEESDEEMGFSLFDD

SEQ ID NO: 15970 - protein, 340 aa, Zea mays
  VARIANT 304: note = Ancestral polymorphism is M, Derived polymorphism is V
  VARIANT 292: note = Ancestral polymorphism is E, Derived polymorphism is D
  VARIANT 84: note = Ancestral polymorphism is V, Derived polymorphism is L
  VARIANT 72: note = Ancestral polymorphism is T, Derived polymorphism is P
MTNQPASWRGTASDSSLSKHKAGPAAGHIRRTLAFSEKLSHTSPCSGSHVRRRTLLLASGSYLASIMEHDGTNLLAVNEVLRSVQLLKIDGYCATATMSELEFIKSRWCTNGHEWEVRFHPTYKWNGRWVAVKLILISEPLRDKLRVSLSCRMRPNNFQRDLGASYEQSLSHIFPSDSKCSPVLLLMSRAELGSSDYLVEDSLTVECTLTELRGFDASVKDPPLPVPQPQPLRSDLHQHLGELLQSKDGADVTFRVSGESFAAHRVILAARSPVFKAEFFGGMKERSSAYVEIRDMDAAVFRSMLHFIYTDMVPELDGAQDQEPEAAAGGGHGSAPTRSC

SEQ ID NO: 15971 - protein, 240 aa, Zea mays
  VARIANT 74: note = Ancestral polymorphism is G, Derived polymorphism is R
  VARIANT 11: note = Ancestral polymorphism is A, Derived polymorphism is E
MAMSDTGSSFAQWAALYHHHDPAGGPVLPDDDAADAGNGIGSGTATAASPTSGGSSGGSPTTKAAWGQQHLLHGVEGPRVAGKPAAARRRSRASRRAPVTLLNTDAANFRAMVQQFTGVPAPLAGAFRVGDGAPVISFAADYGFPPASSSSAVNVSFFDHQLHRSQQHPAAPPVHRQQQQYAGASPFGGYSSGLVQGGGASDVFPASAEDRMLLQSILAAQMPHMPPVSGANTSSHGFFA

SEQ ID NO: 15972 - protein, 197 aa, Zea mays
  VARIANT 84: note = Ancestral polymorphism is G, Derived polymorphism is S
MAKWASAARATTTTDRLDALNRIPNLPSPSTMQQLCPPRPNQRSCLAMRYEALLLRDAKYCNDLHLQVSRQEWLTFAMDCLDNGFYTIASKVWDVTRSQVFVEMREHERRVWSVDFSIMDPTKLVSGSDDGSVKLRDMNQAILFLHLLLGVLALLKQGQMCVLCNFNLILLAPLPSALQTTKFTAMIYVTYELLIVH

SEQ ID NO: 15973 - protein, 436 aa, Zea mays
  VARIANT 58: note = Ancestral polymorphism is C, Derived polymorphism is S
  VARIANT 366: note = Ancestral polymorphism is V, Derived polymorphism is A
MMHSHHPHYHPRFHPPSSSSSEAVDMDPRVWSRLPQPLVDRVLACLPTPSFLRLRAACRRFGNLIYSSPFLHSHLLLSPHLPFFAFAVPSAGYPYLLLLDPTTQAPAPSWSRLPLPLPAAPGAVQAAFSPAAASAGLLAFLSDASGHKTLLLANPITRLLAPLPLCPTARLSPTVGLAAGPTSFIAVVAGDDLVSPFAVKNISADTFVADAASVPPSGFWASSSILPRLSSLDPRAGMAFASGRFYCMSSSPFAVLVFDVATNVWSKVQPPMRRFLRSPALVELGGGREREAVVALVSAVEKSRLSVPRSVRVWTLRGEHGAAAGGSNGGGAWTEVARMPPDVHAQFAAAEGGRGFECAAHGDFVVLAPRGPASPVLVFDSRHDEWRWAPPCPYPYPYAAGGAGFRVFAYEPRLATPAIGLLDATAPAAFLHGMQG

SEQ ID NO: 15974 - protein, 491 aa, Zea mays
  VARIANT 72..491: note = Derived polymorphism lacks residues 72 to 491
MGGCFSQEEHRLQSRPAEAAGPDGLQKSKSDSKATASVLAPPKAVVDLQVEGYGNVNIFTYDELSAATKNFRPDQILGEGGFGVVYKGVIDENVRAGFPSRQVAVKELNPEGFQGDKEWLAEVNYLGQLSHPNLVELIGYCCEGSHRLLVYEYMACGSLEKHLFRRVCLNMPWSTRMKIALGAARGLETVREVKGSGEVVSRGGASGEGQIGKQGAGQGWRRNDSSEIERARDAGSRDYNAKLSDFGLARTGPSGDQTHVSTRVMGTYGYAAPEYVMTGHLTARSDVYGFGVVLLEMIIGRRAVDDSRPSREHNLVDWARPLLVHNRKLFRIIDPRMEGQYSTKAATEVASLAYRCLSQNPKGRPTMSQVVETFEAVQNMPECQDILLQNGITGAVTLYEVPKEPADRVELEKAKQEPAVKTAAIPPVNGKPAPQSRRTRPGNGRSKSEPSLECKMYIPSPDSDEQQLGLEALASPNGSMKDHPDEDLYKI

SEQ ID NO: 15975 - protein, 144 aa, Zea mays
  VARIANT 62: note = Ancestral polymorphism is N, Derived polymorphism is Y
  VARIANT 58: note = Ancestral polymorphism is C, Derived polymorphism is R
  VARIANT 56: note = Ancestral polymorphism is T, Derived polymorphism is M
  VARIANT 30..144: note = Derived polymorphism lacks residues 30 to 144
  VARIANT 29: note = Ancestral polymorphism is A, Derived polymorphism is T
  VARIANT 25..144: note = Derived polymorphism lacks residues 25 to 144
  VARIANT 24: note = Ancestral polymorphism is T, Derived polymorphism is M
  VARIANT 15..144: note = Derived polymorphism lacks residues 15 to 144
MNRTDHAKKQLRVMQELDEDHTLTQLANAWVDLVLGGSKIQEARLIFQDLSDKYPTTCTILNGKALCSTHMGNFEDAEGLLLESLNKDAKDTETLTNLTVCSLNLGKPATRYLNQLKLAHPDHALVKRMSSAAESFDRACQAMV

SEQ ID NO: 15976 - protein, 599 aa, Zea mays
  VARIANT 127..599: note = Derived polymorphism lacks residues 127 to 599
  VARIANT 427..599: note = Derived polymorphism lacks residues 427 to 599
  VARIANT 430..599: note = Derived polymorphism lacks residues 430 to 599
  VARIANT 454: note = Ancestral polymorphism is R, Derived polymorphism is C
MAAANGVRRVWVGQNSLMSTPVVSAVIRERIGADGSKATGAFILTASHNPGGPKEDFGIKYNMGNGGPAPESVTDKIFSNTTTISEYLISEDLPDVDISVVGVTSFSGPEGPFDVDVFDSSVNYIKLMKTIFDFEAIKKLLTSPKFTFCYDVLHGVAGAYAKHIFVEELGADESSLLNCVPKEDFGGGHPDPNLTYAKELVERMGLGKSSSNVEPPEFGAAADGDADRNMILGKRFFVTPSDSVAIIAANAVQSIPYFASGLKGVARSMPTSAALDVVAKNLNLKFFEVPTGWNFFGNLMDAGMCSICGEESFGTGSDHIREKDGIWAVLAWLSIIAFKNKDNLGGDKLVTVEDIVHIYHSKYISLFMKNVDAGAAKELMANLVSMQSSLSDVNKLIKEIRSDVSEVVAAVEFEYKDHVDGSVSKNQGIRYLFGDGSRLVFRLSGTGSVGATIRVYIEQYEKDSSKTGRDSQEALAPLVVGIRETVLTSSSEQSISALPCDIPSTIAFPREFEGKGSTVGLEELGLRVALVDSMLHKFVNFRIEGEVAEAVADAVDGLASKMVRIPVCKSCFRKQEALSLPLFLELLQVIQLSHPYTKE

SEQ ID NO: 15977 - protein, 378 aa, Zea mays
  VARIANT 123: note = Ancestral polymorphism is I, Derived polymorphism is S
MTVMMPQRHRATAKKPMWIIVLLSMVCIMLIGAYVFPPRRFSKCYLSASSVCTSFKDWLPSMGHRERADEEIISSVVIRDILSMPMPMSKNPKIALMFLTPGSLPFEKLWETFLQGHEGRYSIYVHASREKPVHTSSLFAGRDIHSDAIVWGLISMVDAEKRLLANALEDVDNQVFVLLSDSCVPLHSFDYVYNYLMGTNVSFIDCFKDPGPHGSGRYPIEMYPEIDESDFRKGAQWFAVTRRHALMILADSLYYKKFKLYCKPAEGRNCIADEHYLPTLFNMVDPGGISNWSVTHVDWSEGKWHPRSYSADDVTYDLLKNITTTDENFHVTSDDKKLVMQKPCLWNGSKRPCYLFARKFNPEALDNLLKLFTSYTSV

SEQ ID NO: 15978 - protein, 148 aa, Zea mays
  VARIANT 23..148: note = Derived polymorphism lacks residues 23 to 148
  VARIANT 80..148: note = Derived polymorphism lacks residues 80 to 148
  VARIANT 92: note = Ancestral polymorphism is P, Derived polymorphism is S
  VARIANT 94: note = Ancestral polymorphism is R, Derived polymorphism is W
  VARIANT 114: note = Ancestral polymorphism is G, Derived polymorphism is D
MARVLCSRSAVLARRLGAQPQPQPGVVLSRRHNHTRRRAVKVLEEDAAGPSSPATDASEQSRRLEEAIDSAMARMAEPDWAPFRPGTSYFAPPRPAGAALGVLALIGHAGGFMGSSAAPRRGLSADEARAVAASSRGYPCSTYFIEGI

SEQ ID NO: 15979 - protein, 472 aa, Zea mays
  VARIANT 2: note = Ancestral polymorphism is V, Derived polymorphism is F
  VARIANT 16: note = Ancestral polymorphism is E, Derived polymorphism is K
  VARIANT 60: note = Ancestral polymorphism is A, Derived polymorphism is V
  VARIANT 92: note = Ancestral polymorphism is C, Derived polymorphism is Y
  VARIANT 185..472: note = Derived polymorphism lacks residues 185 to 472
  VARIANT 195..472: note = Derived polymorphism lacks residues 195 to 472
  VARIANT 277..472: note = Derived polymorphism lacks residues 277 to 472
MVVALSESFESLYKTEESSLCYALKVALFLDRFLVRNFTPKMVQLFLQVPVECDSVNTVAVEGRRSLCHNVESIIKSLTKSAGRYEARLWLCATVSLVHSLSDCGQRDLFLDLLERKNSRRDVAARLLRMIFDKKPRMVGSILARKGHIREDFFRGNPNRIMQWFGHFAVTRESTHRKGAKALSQFAFVNRDRCWEELEWKGKHGQSPAVVATKLHYFRDLDVLETVENFLEYVPDFWSSDELANSIKDGEILQIDEEYFVDQFLYLMYEENSKDAWHVVEDFLMDGQFSSLCQHLLIHLDEERLLGFLNSLGKLINPTMQCKELTFPCCWLEVLLPGHYDHISLDDLVFLNCVIAKGRQLWRLMNDEEQHEEWGQMEELLKDVNHLTDADHFALMKELVETELPGVLKWVGIQSWIIFCELSKECKSGDSCESFFSHNKIEFHKADDYSLVRNYGFSISHMPDIDVDWKQP

SEQ ID NO: 15980 - protein, 201 aa, Zea mays
  VARIANT 115: note = Ancestral polymorphism is G, Derived polymorphism is W
  VARIANT 107: note = Ancestral polymorphism is A, Derived polymorphism is T
  VARIANT 86: note = Ancestral polymorphism is P, Derived polymorphism is R
MGHRRHEGSCRCELCGAPAAVHCAADEAFLCAACDAKVHGANFLASRHRRTRLRLAAAGPPPPDDEAGYGSAASSCVSTADSAPRPRRGARAPAGSVRPEAVLEAWAKRMGLGAGARRRVPPRVAVAAALWWEAAGRGGVGGHAQALRRLEACAHVPARLVLAVAASLARARALLRRAATDAVEGWDECAWAGPKSSPSRS

SEQ ID NO: 15981 - protein, 790 aa, Zea mays
  VARIANT 67: note = Ancestral polymorphism is S, Derived polymorphism is F
MQRAPGCRRGAGPILLLALVALAAAAPRLVRAVTDAADGQVLCNAGSVDYFSNTNCFFMLLLSYVVFAINGLYISLGSPPLPGWTGDGGDPCGEGWQGVLCTGSSITGITMNAANLGGQLGSLGNFNAITSIELNNNNIGGSIPEDLPVTLQSLFLSANQITGSIPSSLSKLENLSAMSVNGNHLSGGLPDTFDSLNRLVNLDISSNNLTGVLPSSMKSLASLTSLNIENNIFSGPVPASLLNIPNFKLSRLYELVKRLIVYHHRKDGNPFNTTSASPPSTGPDPTLTPAPNTSNSTPPAPAPPSPSRATPPPKTTSNYPEGSTTRDSTSSSRKHNTSTLKIVGFVLAGVVLFIVIVFLVLFCLSKYQGRQSRYDRNRSQLGGVHHRVEPQIKPPPVQQSNDIKEGETPDRRVHQLSSSAAALPKKSPENQKEHIINFDQTDSDLFHVSLPPPPPPPPLTPIERVAANLIVPLEKRYIPPPKTSSSTSSASFSVASLQQYTDSLREENVIRESRLGRVYLAELPDGKLLEVLKIGNANGRISVDDFLEQIECISDIKHPNILELVGYCAEYGQRLLVYEHFSRTTLDDAIHDGKDTESALSWNARLQVALGSGKALEYLHHSFHSPIVHQNFEPANVLLDKKFSVCVAECGLAELMTSSSVTQLSGRMRASLDYEAPEFQDYGVISERGDVYSFGVVMLELLTGRKPYDSSRPRHEQHLVRWASWQLHDIESLSKMVDPPIRGQCSEKALSHFADIISRCIQRQPEFRPPMSDIVQDLTRLVNATGEESE

SEQ ID NO: 15982 - protein, 258 aa, Zea mays
  VARIANT 1: note = Ancestral polymorphism is M, Derived polymorphism is I
MSMTLKATNENLPPNVIRQLAKELKNLNESPAEGINVTVNDDDFTTIFADIEGPAGTPYENGVFRMKLLLSHDFPQSPPKGFFLTKIFHPNIATSGEICVNTLKKDWNPSLGLRHVLLVVRCLLVEPFPESALNEQAGKMLLENYEEYARHARLYTGIHALKNKSKTGAISESTTALNVDKSSTAPNENAPSMPPAIPTSAASRALGTNLQDQSPTVSDPTVGAAAAAAARRKDGPMPSKVPVDRKKMDARKKSLKRL

SEQ ID NO: 15983 - protein, 307 aa, Zea mays
  VARIANT 294..307: note = Ancestral polymorphism lacks residues 294 to 307
  VARIANT 257..307: note = Derived polymorphism lacks residues 257 to 307
  VARIANT 249: note = Ancestral polymorphism is T, Derived polymorphism is I
  VARIANT 117: note = Ancestral polymorphism is G, Derived polymorphism is R
  VARIANT 96: note = Ancestral polymorphism is G, Derived polymorphism is S
MANGLVLRGILMRGEKGLGLVDTPLRPMRWGSALFPHVLLKNVIVEMQFSREDGLLPVDGYEPWASAFSQRNSEFGPSFEQNKCEVMMMVGLPATGKSTWAEKWVKEHQEKRYILLGTNLVLEQMKVPGLLRKNNYGERFERLMDCATWIFNKLLTRAANTPRNFIIDQTNVYKNARIRKLRPFANYRKTDVVMFPTPSELKSRAAKRFNEMGKEIPAEAVNEMTANFVLPLSKDMPHSKEPFDEVIFTELSRDEAQRTLDDMQRVLPRNVTPSYGNSGNQKHVMVPLLLFLKQCLVCFMSSWIRLV

SEQ ID NO: 15984 - protein, 151 aa, Zea mays
  VARIANT 25: note = Ancestral polymorphism is R, Derived polymorphism is Q
MGGVQLDDLSELAVLRPIQTAAAARPPGDDAEDGPDAADTGCVTPTASSSRLMPMPRLDGGCGALDSTDAAAAACVTPAASPCLLRPATVCPPAPRKPARPAAPPPDNKRKRCCCARAFFPVPHDLSAVFVPRRSPPRAATAKKVRLHLVG

SEQ ID NO: 15985 - protein, 97 aa, Zea mays
  VARIANT 10: note = Ancestral polymorphism is A, Derived polymorphism is V
  VARIANT 35: note = Ancestral polymorphism is G, Derived polymorphism is S
MAWWRARVVASVRRAWLAVAVAAARARVRKGECGGVLSLHRDVQTCGYQDVQVMWNMLSSEKEAAAGALPKPPRRKRPSSVWRLPLWPVRSPRAAPG

SEQ ID NO: 15986 - protein, 38 aa, Zea mays
  VARIANT 19: note = Ancestral polymorphism is V, Derived polymorphism is I
  VARIANT 23: note = Ancestral polymorphism is E, Derived polymorphism is K
  VARIANT 28: note = Ancestral polymorphism is E, Derived polymorphism is K
MDVEGKGSKVNIFGSIFIVGWQETNQGEIPCNGLFSCS

SEQ ID NO: 15987 - protein, 136 aa, Zea mays
  VARIANT 117: note = Ancestral polymorphism is P, Derived polymorphism is S
  VARIANT 114: note = Ancestral polymorphism is D, Derived polymorphism is Y
  VARIANT 110: note = Ancestral polymorphism is V, Derived polymorphism is I
  VARIANT 84: note = Ancestral polymorphism is G, Derived polymorphism is R
  VARIANT 36: note = Ancestral polymorphism is T, Derived polymorphism is M
  VARIANT 27: note = Ancestral polymorphism is G, Derived polymorphism is E
  VARIANT 23: note = Ancestral polymorphism is G, Derived polymorphism is E
  VARIANT 21: note = Ancestral polymorphism is R, Derived polymorphism is W
  VARIANT 20: note = Ancestral polymorphism is R, Derived polymorphism is Q
  VARIANT 17: note = Ancestral polymorphism is P, Derived polymorphism is L
  VARIANT 13: note = Ancestral polymorphism is P, Derived polymorphism is L
  VARIANT 3: note = Ancestral polymorphism is D, Derived polymorphism is H
MWDFDEDPPPSPPRPRPEGRRRGTRRGGWELVEAPMVAPTATLMEAEEYGEMMESVDEVTFTLDGLRPAAQKRTRRASLLALLGICASAERHRVLRSQGLVQQIINAILVLDIDDPPCAIAAGALLFVLASDVSTS

SEQ ID NO: 15988 - protein, 142 aa, Zea mays
  VARIANT 1: note = Ancestral polymorphism is V, Derived polymorphism is M
  VARIANT 10: note = Ancestral polymorphism is P, Derived polymorphism is S
  VARIANT 14: note = Ancestral polymorphism is P, Derived polymorphism is S
  VARIANT 16: note = Ancestral polymorphism is R, Derived polymorphism is H
  VARIANT 17: note = Ancestral polymorphism is R, Derived polymorphism is C
  VARIANT 20: note = Ancestral polymorphism is G, Derived polymorphism is S
  VARIANT 24: note = Ancestral polymorphism is G, Derived polymorphism is S
  VARIANT 34: note = Ancestral polymorphism is S, Derived polymorphism is C
  VARIANT 96: note = Ancestral polymorphism is E, Derived polymorphism is K
MGASTSSHPPLLVPRRRPSGRGRGGDGGGSSSKSHIEEDSCDGGSGSGCEADDTSKSAASSQSNASCEDETPPAVGEGAGSAHVRSQDHGVHAVVEARREIGIGRCLGVFGASFASRCGRFGNEAMRGSCRAAWGILGSGEP

SEQ ID NO: 15989 - protein, 186 aa, Zea mays
  VARIANT 43..186: note = Derived polymorphism lacks residues 43 to 186
  VARIANT 65: note = Ancestral polymorphism is P, Derived polymorphism is L
  VARIANT 109: note = Ancestral polymorphism is S, Derived polymorphism is Y
MGLKATGARSNTMKLDNNVDMNSVDTAGVEDLMDTIEEVKPYWTKPSPKNQPSNGFVTFSLTMGPEYHISRITDVVVVARYLGATFVLPDIRGNELGNKRGLELKHEYSEVARKMLDRLQELSKKSDWKDDIMPAENKGEFLKSSNADLARALDLEICSQSDMFIPAVAGLFYGYVTGKRIASGRT

SEQ ID NO: 15990 - protein, 786 aa, Zea mays
  VARIANT 122..786: note = Derived polymorphism lacks residues 122 to 786
  VARIANT 107: note = Ancestral polymorphism is I, Derived polymorphism is T
  VARIANT 77..786: note = Derived polymorphism lacks residues 77 to 786
  VARIANT 63..786: note = Derived polymorphism lacks residues 63 to 786
MEATGRGLFPNKPTLPAGPRKRGPLLPAAPPPPSPSSLPLDSLLLHLTAPAPAPAPAPRRSHQTPTPPHSFLSPDAQVLVLAISSHPLPTLAAFLASRRDELLRADITSLLKALELSGHWEWALALLRWAGKEGAADASALEMVVRALGREGQHDAVCALLDETPLPPGSRLDVRAYTTVLHALSRAGRYERALELFAELRRQGVAPTLVTYNVVLDVYGRMGRSWPRIVALLDEMRAAGVEPDGFTASTVIAACCRDGLVDEAVAFFEDLKARGHAPCVVTYNALLQVFGKAGNYTEALRVLGEMEQNGCQPDAVTYNELAGTYARAGFFEEAARCLDTMASKGLLPNAFTYNTVMTAYGNVGKVDEALALFDQMKKTGFVPNVNTYNLVLGMLGKKSRFTVMLEMLGEMSRSGCTPNRVTWNTMLAVCGKRGMEDYVTRVLEGMRSCGVELSRDTYNTLIAAYGRCGSRTNAFKMYNEMTSAGFTPCITTYNALLNVLSRQGDWSTAQSIVSKMRTKGFKPNEQSYSLLLQCYAKGGNVAGIAAIENEVYGSGAVFPSWVILRTLVIANFKCRRLDGMETAFQEVKARGYNPDLVIFNSMLSIYAKNGMYSKATEVFDSIKRSGLSPDLITYNSLMDMYAKCSESWEAEKILNQLKCSQTMKPDVVSYNTVINGFCKQGLVKEAQRVLSEMVADGMAPCAVTYHTLVGGYSSLEMFSEAREVIGYMVQHGLKPMELTYRRVVESYCRAKRFEEARGFLSEVSETDLDFDKKALEAYIEDAQFGR

SEQ ID NO: 15991 - protein, 275 aa, Zea mays
  VARIANT 108: note = Ancestral polymorphism is A, Derived polymorphism is T
  VARIANT 151: note = Ancestral polymorphism is V, Derived polymorphism is A
MMAPTTSLLALVFLFLLPAAAVAAPPATGDAAAFNVTEILSRYPEFKLFNLLLSKTRVAREVNRRSAVTVLVPDNSAVDWLLRRSARLPRAALVELVSVHVALDYIDAAKLAALPRSGQPAVVTTLFQTTGAALNRTGFLNVTAVGRAGAVFVSAAPGSLVSATFRRAVTARPYNISVLQISNFVVPPGVITRPRPPLPSPPAPRMRQMAIAPSPAPTLASLRPSPTTLPSSEGDAAEAPDTTAEAPTPSHGHVAEVTSWWIGAAVGVASMLGYL

SEQ ID NO: 15992 - protein, 591 aa, Zea mays
  VARIANT 430..591: note = Derived polymorphism lacks residues 430 to 591
MAAIPARLHHLVVVILLLVPSLTAAQSRAFEGAPAAYARYLVDAAAMPAVDLYDYIVVGGGTAGCPLAATLAGPGGGRVLLLERGGAPSEFPALATAGGFVRTLAMADPAPESDAPAQGFTSEDGVPNVRARVLGGGTAINAGFYSRAHPEWFRRGHAEDAGMTNVWDMPLVNASYEWVERQMTFQPAVHGWQAAVRAALLEANVTPWNGFTVDHVTGTKVGATTFDASGRRRSAADLLAVARPSRLRVAIRGTVTRIITNPVGLAARRGRSPLPTIAAIGVVYQDRLLDQHQALLRPGGEVILAAGALGSPQLLLLSGIGPAPDLSSLGIPVSADIPDVGKHMYDNPRNGISFIPSVPIDHSLIQVVGIPSANGTASYLEAASYIVPVAPALRSSVPFLGSSSPLYVTVATIMEKVPGPLSEGSLWLSSTNPLESPALRFNYLSRPEDLARCVLGVRHVARVLEGRALDGFRSAVVGSTTTGRRGSSVRREFRIAGTALPADWRTNDRALASYCQQTVATLWHYHGGCVAGKVVDGSFRVIGSHAIRVVDASTFSETPGTNPQATILMMGRYVGLKMIEERHSRRPVMPP

SEQ ID NO: 15993 - protein, 109 aa, Zea mays
  VARIANT 11: note = Ancestral polymorphism is E, Derived polymorphism is K
  VARIANT 14..109: note = Derived polymorphism lacks residues 14 to 109
  VARIANT 16: note = Ancestral polymorphism is L, Derived polymorphism is Q
  VARIANT 36: note = Ancestral polymorphism is V, Derived polymorphism is A
  VARIANT 40: note = Ancestral polymorphism is S, Derived polymorphism is P
  VARIANT 42: note = Ancestral polymorphism is T, Derived polymorphism is I
  VARIANT 43: note = Ancestral polymorphism is G, Derived polymorphism is R
  VARIANT 54: note = Ancestral polymorphism is H, Derived polymorphism is Y
MEAAELEMDSEAHRRLLWEATTGRRYISYDALRGDVVPCSRTGWWRCSGGDPGHMARSGKPRGGRRRRSGGEPGRMVRSGFGGRSDGFGLSSDGVSCLRGWLVRADDGA

SEQ ID NO: 15994 - protein, 326 aa, Zea mays
  VARIANT 205..326: note = Derived polymorphism lacks residues 205 to 326
MELANFQQQPNQAPGPGGKQRTSSLEAPIMLLTGHQSAIYCMKFNPAGTVIASGSHDKDIFLWLAHGECKNFMVLRGHKNAILDLQWTTDGTQIISASPDKTLRVWDVETGKQVKKMAEHSSFVNSCCPARKWPPLVVSGSDDGTAKLWDLRQRGAIQTLPDKYQITAVSFSEAADKVFTGGLDNDVKWWDLRKNEVTEHLKGHQDMITGMQLSPDGSYLLTNAMDNELKIWDLRPYAPENRNIKTLTGHQHNFEKNLLKCSWSPDNRKVTAGSADRMVYIWDTTSRRILYKLPGHNGSVNETAFHPTEPIIGSCGSDKQIFLGEL

SEQ ID NO: 15995 - protein, 365 aa, Zea mays
  VARIANT 273: note = Ancestral polymorphism is G, Derived polymorphism is D
  VARIANT 275: note = Ancestral polymorphism is W, Derived polymorphism is C
  VARIANT 282..365: note = Derived polymorphism lacks residues 282 to 365
MGVYLSTPKTEKVSEDGENDKLKFGVSSMQGWRTTMEDAHSALLDLDNDTAFFGVFDGHGGKVVAKFCAKYLHREVLRSEAYAAGDLGAAVHRAYFRMDEMMRGQRGWRELQALGDKINQFSGIIEGLIWSPKASDSNDRHDDWAFEEGPHSDFTGPNCGSTACVALIRNKQLVVANAGDSRCVISRNGQAYNLSRDHKPELEAERERIRSAGGFVLMGRVNGNLNLSRAIGDMKFKQNKFLPPDKQILTANPDINIVELCDDDEFIVLACDGIWDCMSSQQLVDFIREHIDTEESLSAVCERVLDRCLAPSTMGGEGCDNMTMILVQFKKPIAQVEDASGAEPAGDAGCCETHGAHENGSGKQV

SEQ ID NO: 15996 - protein, 321 aa, Zea mays
  VARIANT 229..321: note = Derived polymorphism lacks residues 229 to 321
MEFGFRAGNSTQRRPSPDRRVTAQQAGPFHGDHPPPSPLQWEAAARRERIKREVERRLIEEEVRLELALERARLHGGFGPAPFLGTDGSVVPVPPPPPPPGRFSRADGPSMTPAMSWDSPRRLARFEQPMLLSETGTWSLLPKPRHTLRLREIAPSESSEVLSSATKASGVKRKAAAAISATTTEQQPTGVQDPSSGQWSCAICQVSATSEANLNEHLQGKKHRAKLARCGATKATTDPPPNRSGDGAVAVAAGPSDAPKRIQILVDGEAHQVVQRSSCVWCERCRVGCTNAAAMVDHLRGKRHSLSNKVWTAIKAVRRSS

SEQ ID NO: 15997 - protein, 185 aa, Zea mays
  VARIANT 84..185: note = Derived polymorphism lacks residues 84 to 185
MFVAFAKRSRHGWRREGGYVAVTADVGFAAGRRAERLAGGSRGRACGSGGFRGTCIAAGRRACGWDSGVSRGRALRVGKPTHVQKPQQQAAPRPRVATRSEAQTSHRQGSSSSIARPRTPRRHDVPVVADLHTIVPLQGGRGGKQTTPAASTGGVDVQMALALALSNSGKRLRVLRRAVQDAGVR

SEQ ID NO: 15998 - protein, 430 aa, Zea mays
  VARIANT 20..430: note = Derived polymorphism lacks residues 20 to 430
MAAATATGDSVKEPLLHRAYPSQVASASSPALPSAPPGSAGRRFPGVLDVPNLKKRGGGTRSWIRVEAVTASVQTLEIDKATMMRRCELPARDLRLLDPLFVYPSTVLGRERAIVVNLEQIRCVITADEVLLLNSLDSYVLQYAAELQRRLLQRAEGDQLPFEFRALELALEAACSFLDAQAAELEIEAYPLLDELTSKISTLNLERVRRLKSRLVALTRRVQKVRDEIEQLMDDDGDMAEMYLTEKKMRMESSVFGDQSLLGYNSAGAAGASVSAPVSPVSSPTESRKLEKAFSLCRSRHDSTKSSDNTTTDHIQELEMLLEAYFVVIDSTLNKLTSLKEYIDDTEDFINIQLDNVRNQLIQFELLLTTATFVVAIFGVVAGIFGMNFETSVFKIENAFQWVLVITSVVGVFIFCSFIWFFKYKRLMPL

SEQ ID NO: 15999 - protein, 425 aa, Zea mays
  VARIANT 165: note = Ancestral polymorphism is G, Derived polymorphism is S
MDGEKKVSFRVREFDMESDLAAVEELERRCQVGLCGDDTAADDGSTGGSKMRKKTKRKKKGMSLCVEQVGDPLARVRHAPEHVMLVAEYGEAAEMVGLIKACVRVVSRGGGKKQKPSSSTKEEPSPPAYVKVACLLGLRVSPSHRRLGIATALVERAEEWCRERGAAHATMATTTSNAASLALFTGRFGYTPFRRPELLGRPVHAHRLPIPSAHRVFQLPPPLAAAAYARLSPPQATEFLPADMPALLAHKLTLGTFVAVESGPPEPDQSAPPSFAVLSVWDSTRSMRLRVRGARALLRASLAALRALDRGAPWMRVPSVPDIFRPFGAYLLYGLRMSGPAGPALLRSLCHHAHNVARNNPACAVVAADVAPDDPAAAAVPRWRRFSCDEDVWCIKNLNNADDEDGWPAPAVRNCPVRRSPRVLT

SEQ ID NO: 16000 - protein, 242 aa, Zea mays
  VARIANT 19: note = Ancestral polymorphism is R, Derived polymorphism is W
  VARIANT 27: note = Ancestral polymorphism is D, Derived polymorphism is Y
  VARIANT 33: note = Ancestral polymorphism is R, Derived polymorphism is H
  VARIANT 41: note = Ancestral polymorphism is S, Derived polymorphism is L
  VARIANT 42: note = Ancestral polymorphism is A, Derived polymorphism is V
  VARIANT 43: note = Ancestral polymorphism is V, Derived polymorphism is A
  VARIANT 50: note = Ancestral polymorphism is V, Derived polymorphism is I
  VARIANT 56: note = Ancestral polymorphism is H, Derived polymorphism is Y
  VARIANT 61: note = Ancestral polymorphism is A, Derived polymorphism is V
  VARIANT 90: note = Ancestral polymorphism is A, Derived polymorphism is T
  VARIANT 97: note = Ancestral polymorphism is V, Derived polymorphism is M
  VARIANT 108: note = Ancestral polymorphism is P, Derived polymorphism is S
  VARIANT 124: note = Ancestral polymorphism is L, Derived polymorphism is P
  VARIANT 141..242: note = Derived polymorphism lacks residues 141 to 242
  VARIANT 161: note = Ancestral polymorphism is S, Derived polymorphism is I
  VARIANT 170: note = Ancestral polymorphism is C, Derived polymorphism is R
MKSRHRPLRADLLPTALARYSTATRLDLTLCMRVPDTALASAVVSALHVVNLSYSHGFGAAGVSELAIAYPGLIDLDLSNVVDLGDAAATEVAWARVLRRLLLAHWKSLTDMGLGCVAVGCTEPRELSLKWCLGLTDLGIQILALKCRKLTSLDLSYTMVSVMRVSWFLCSFHGHKKEATNDSVFVSFCEAISDRMRKGIEEGGDTHARPRHHGGFEHEMSEAEGAGELWAKVVAAQLARKL

SEQ ID NO: 16001 - protein, 101 aa, Zea mays
  VARIANT 72: note = Ancestral polymorphism is E, Derived polymorphism is G
  VARIANT 71..101: note = Derived polymorphism lacks residues 71 to 101
  VARIANT 62: note = Ancestral polymorphism is R, Derived polymorphism is C
  VARIANT 40: note = Ancestral polymorphism is V, Derived polymorphism is D
  VARIANT 32: note = Ancestral polymorphism is C, Derived polymorphism is Y
MAGATVGAGARAATPGHPSLLPDGACCLPSLCCSDRAEVVNNDGGVAQRNKSDDDMVVEAFCVKWSLATAQEKVTKIEMVVKPLRKHGSKKIHQFVYSLIE

SEQ ID NO: 16002 - protein, 275 aa, Zea mays
  VARIANT 9: note = Ancestral polymorphism is A, Derived polymorphism is V
  VARIANT 184..275: note = Derived polymorphism lacks residues 184 to 275
MALSVSFLAAALSHLSLPSTSTPKPHPSSLLRLRSTYRRDVSLALRASAGEAAEAFEAGLPAEEVMAVEEEAEEDALSGNSMFHVYFRKYGLSDDTMDFVGHALALHRDDRYLDEPALDIVKRMKTLLHAFKEDHLISIHYMGWVSYHRGITGSSICLYSQQLSSACMSLGSAGFIIKIRNAEQITIWKAMTKTPASIALIIYTFIAVWFVGGLSVFHLYLMSTNQTTYENFRYRYDQRDNPYKRESWKTSKRSSLQRSLLPRTTSVVGSIRSMV

SEQ ID NO: 16003 - protein, 294 aa, Zea mays
  VARIANT 216: note = Ancestral polymorphism is S, Derived polymorphism is F
  VARIANT 25: note = Ancestral polymorphism is E, Derived polymorphism is V
  VARIANT 14..294: note = Derived polymorphism lacks residues 14 to 294
MDRCRAHWDDTTTRIFLDLCIAEKEKQNYNSKGLTKIGWHNLYRNFKEETRRSYDTKQLQNKFNGLKRMYSLWRLQNDKAGPGGGGGWDKSSSTVTQDADGWDNQITETSAAEDFRGKALAHEDALAVLFGPKDGTNSPSVGGGAGDRTPGGGGGGEEENHARASGDNAACPEESLGCYRSGRASPWSSQDHHIHMVGSRPAKKPKNTGYYAEGVSESMLGSRNESSSAIRREQEEVVELLQLVEKDGVSQGSELFFIATELFRSPIRRAAFRCITTPKNRVAWLRWTWDNVKM

SEQ ID NO: 16004 - protein, 179 aa, Zea mays
  VARIANT 147: note = Ancestral polymorphism is R, Derived polymorphism is L
  VARIANT 123: note = Ancestral polymorphism is K, Derived polymorphism is N
  VARIANT 117: note = Ancestral polymorphism is S, Derived polymorphism is T
MYATLAVSPGQSSLISDDADVVALIGTSKDLAKQINQKEVHWGLLEDSVEEQMEKALAESDKIEAESNDADAEDNKARKSFVVCNIKKEYRRWKAKYFSCVGTLAFSCEGALLASGSADCTVKLWDVAFSTKALKTEDTKGSSSANRLRLLKSLPTKSAPVYSLRFSRRNLLFASGALA

SEQ ID NO: 16005 - protein, 344 aa, Zea mays
  VARIANT 233: note = Ancestral polymorphism is F, Derived polymorphism is L
MDPWIGQPSLSLDLNVGLPTAARPPATTTTAEVLVEEDFLAVKKDREVQVQALEAELRRAGEENRRLSDMLRAVVAKYAELQGQVNGMAAPVVSTAGNSAAAAAANRQSSASSDDGGSAAGSPSRKRPVRSDSLDTAPQHHNRKPPSPYAAAPAPGPDQMECTSAAVTIVAAAAAYHHEPARRIREAERKPKVSRRFVHADPSDLSLVVKDGYQWRKYGQKVTKDNPCPRAYFRCSLAPSCPVKKKVQRSADDSAVLVATYEGEHNHARPPQHDGGAKRSSAPPAGEAARPPAPLPLQKQEAGPSSEVARKNLAEHMAVTLTRDPGFKAALVSALSGRILDQGL

SEQ ID NO: 16006 - protein, 542 aa, Zea mays
  VARIANT 154: note = Ancestral polymorphism is D, Derived polymorphism is N
MAAPDARPSSAGPPPARSLLLPLLLVLLLAAYSLPADSAARPSSNSNPRPAFTPPLLKRHQLRRPSSSSAELVAGPANASTKPFTAHYFPQLLDHFAFTPNASTVFRHKYLLNDTFWRRPGAGAGDDGPGPLFVYTGNEGDIEWFATNTGFMFDIAPTFGALLVFIEHRFYGESKPFGNDSYRSAETLGYLTSTQALADFAVVIRGLKRDLGAEAAPVVVFGGSYGGMLASWFRLKYPHVAIGALASSAPILQFDHITPWSSFYDAVSQDFKSESSNCFGVIRAAWDVLDERGATDKGLLDLSKLFRACKTVKYAYSIRNWLWTAFTYTAMVDYPTPANFLENLPAYPVKEMCKTIDAFPAGADVLEKAFAAASLYYNYTGDQACNKIEDGDDPHGLDGWQWQACTEMIMPMTISNESMFPPSAFSYDDRSDECFQSWGVRPRPHWITTEYGGYKIDKVLKRFGSNIIFSNGMRDPWSRGGVLKNISSSIIALVTEKGAHHLDLRSSTKGDPDWLIEQRRQEVEIIQGWIDQYHQDMAETSS

SEQ ID NO: 16007 - protein, 200 aa, Zea mays
  VARIANT 4: note = Ancestral polymorphism is D, Derived polymorphism is G
  VARIANT 32: note = Ancestral polymorphism is R, Derived polymorphism is G
  VARIANT 35: note = Ancestral polymorphism is S, Derived polymorphism is F
  VARIANT 45: note = Ancestral polymorphism is R, Derived polymorphism is H
  VARIANT 54: note = Ancestral polymorphism is G, Derived polymorphism is R
  VARIANT 62: note = Ancestral polymorphism is A, Derived polymorphism is T
  VARIANT 89: note = Ancestral polymorphism is K, Derived polymorphism is R
  VARIANT 90: note = Ancestral polymorphism is M, Derived polymorphism is V
  VARIANT 93: note = Ancestral polymorphism is L, Derived polymorphism is V
  VARIANT 99: note = Ancestral polymorphism is G, Derived polymorphism is D
  VARIANT 102: note = Ancestral polymorphism is N, Derived polymorphism is K
  VARIANT 109: note = Ancestral polymorphism is A, Derived polymorphism is V
  VARIANT 111: note = Ancestral polymorphism is G, Derived polymorphism is R
  VARIANT 114: note = Ancestral polymorphism is V, Derived polymorphism is A
  VARIANT 118: note = Ancestral polymorphism is G, Derived polymorphism is E
  VARIANT 124: note = Ancestral polymorphism is E, Derived polymorphism is K
  VARIANT 137: note = Ancestral polymorphism is K, Derived polymorphism is E
  VARIANT 144: note = Ancestral polymorphism is G, Derived polymorphism is R
  VARIANT 152: note = Ancestral polymorphism is V, Derived polymorphism is A
  VARIANT 155: note = Ancestral polymorphism is G, Derived polymorphism is R
  VARIANT 166: note = Ancestral polymorphism is A, Derived polymorphism is V
MTRDPNLLEFVRADAVFLDTTYCNPKFTFPSREDSVDYIVNAIKRVKEESSVSGERVLCLIATYAVGKEKILLEVAQRCGCSIHVDSRKMKILTLLGFGGKNSVFTEDATGTDVHVLGWNLLGETLPYFQPNFVKLKEIMMERGYAKAVGFVPTGWMYETKKEGFAVRVKDSLEIHLVPYSEHSSYNELRDYVKFCTQRV

SEQ ID NO: 16008 - protein, 269 aa, Zea mays
  VARIANT 21: note = Ancestral polymorphism is S, Derived polymorphism is L
  VARIANT 25: note = Ancestral polymorphism is S, Derived polymorphism is L
  VARIANT 28..269: note = Derived polymorphism lacks residues 28 to 269
  VARIANT 83: note = Ancestral polymorphism is P, Derived polymorphism is L
  VARIANT 127: note = Ancestral polymorphism is G, Derived polymorphism is E
MGRFGRHEVAATARYCEESESSRKSDFWKHELDINLAKRHASHWEQAGHFGSKSTGKPKEPMEPIERDVRHMMHVHGQPNLHLIAVVFAFTTAHRPAPKQRISPEYCGGKKGCSRGPAVRVARERVGMDVEWRPSFSGAYSKTTIHQLCVGRRYLIFQLLHADYVPNTLDEFLSDPDYTFVGVGSRTTTTWRASREPSWTPTSRSRSGLEVVNEEDLAELTAKEIGRSNLRNAGLQGIARAIMDAHVKKPQRVRTGPSDASSLSDEQIE

SEQ ID NO: 16009 - protein, 447 aa, Zea mays
  VARIANT 134: note = Ancestral polymorphism is A, Derived polymorphism is V
MRPPPPPLPSLRSSVLVLVLLPLLAACSSPASGRAVPLSPGTASVAPAPPPVVIIVERRNRFHRELVVASALASIAIAAIILSALYAWVLWRRSRRLPRGNKGARSADTARGIMLAPILSKFNSLKTSRKGVVAMAMIEYPSLEAATGKFSASNVLGVGGFGCVYKAVFDGGVAAAVKRLEAGGPECEKEFENELDLLGRIRHPNIVTLLGFCVHEGNHYIVYELMHKGSLDTQLHGASRGSALSWHVRMKIALDMARGLEYLHEHCSPPVIHRDLKSSNILLDSDFNAKISDFGLAVTSGNIDKGSMKLSGTLGYVAPEYLLDGKLTEKSDVYAFGVVLLELLMGRKPVEKMSQTQCQSIVTWAMPQLTERTKLPNIVDPVIRDTMDPKHLYQVAAVAVLCVQPEPSYRPLITDVLHSLVPLVPVELGGTLRVAEPPSPNLKHSAC

SEQ ID NO: 16010 - protein, 106 aa, Zea mays
  VARIANT 72: note = Ancestral polymorphism is A, Derived polymorphism is T
  VARIANT 46: note = Ancestral polymorphism is G, Derived polymorphism is V
MDAAAEASTPSSPSKLRDKLRTTVCCCFGVERARWRRRRGAATAAGEFRYDPLSYALNFDEGEDDDAYADPAAAFRYRNFNARLPPSPAAAAAVRTQRPQRATATA

SEQ ID NO: 16011 - protein, 356 aa, Zea mays
  VARIANT 204: note = Ancestral polymorphism is G, Derived polymorphism is A
  VARIANT 208: note = Ancestral polymorphism is A, Derived polymorphism is V
MSVAVLRVRAMELLARPAAAASSSCARPSLQLPAPGTSRPRRPGFPTLRAAAAAAAAIAAEPQSNEQQNIIMETEVFACPVCYEPLMRKGPPGINLPAIYRSGFKCSKCNKSFTSKDIFLDLTVTAGTKEYSEQKPARTELFRSPLVSFLYERGWRQNFNRSGFPGLDEEFQMAQDYFQPIAGGILLDVSCGSGLFTRKFAKSGTYSAVIALDFSENMLRQCYEFIKQDDSLLNVNLALVRADISRLPFASCSVDAIHAGAAIHCWPSPSNAVAEISRVLRPGGVFVGTTFLSSPRNNPFSVEALRPLRQIVGPVNTSYNYFTEGELEDLCKSCGLVNYSSNVQRSFIMFSGQKPY

SEQ ID NO: 16012 - protein, 1172 aa, Zea mays
  VARIANT 296..1172: note = Derived polymorphism lacks residues 296 to 1172
MDDVCEGKDFSFPEQEERVLELWAKLDAFHEQLRRTEGGEEFVFYDGPPFATGLPHYGHILAGTIKDVVTRHQSMRGRHVSRRFGWDCHGLPVEFEIDKLLGITNRQQVFDLGIGKYNETCRSIVTKYVSEWEAMVTRTGRWIDFKNDYKTMDLNFMESVWWVFAQLWEKDLVYKGFKVMPYSTGCKTALSNFEAALDYRTVPDPAVMVSFPIVGDMDNAAFVAWTTTPWTLPSNLALCINANLMYAKVRDKSNGKVYVIAESRLGQLPVKAKASGKKQAPSKGSNAEAAQDGLDKESYELLVKIPGPYLVGLKYTPLFDFFIELQETAFRVIADNYVTDDSGTGVVHCAPAFGEDDHRVCLAAGIFETAGLVVAVDDDGCFIEKISDFKGRYVKEADKDIISAVKDKGRLVSKGSIEHSYPFCWRSGTPLIYRAVPSWFVKVEKIKDQLLECNKETYWVPDYVKEKRFHNWLEGARDWAISRSRFWGTPLPLWMSQDRKEIVVMDSIEKLEKLSGVKVTDLHRHYVDDITIPSKRGPKFGTLKRVDDVFDCWFESGSMPYAYIHYPFENRELFEKNFPGNFVAEGLDQTRGWFYTLMVLSTALFGKPAFKNLICNGLVLAEDGKKMSKSKKNYPSPKDLIDEFGADSLRLYLVNSPVVRAESLRFKRTGVFAVVKDVFLPWYNAYRFFVQNAKRLEVEGLASFSPMEQAVLLKSSNVLDHWINSATESLVSFVHQEMDAYRLYTVVPYLVKYIDYLTNIYVRLNRKRFKGRTGEEDCRISLSTLYHVLVTTCVVMAPFTPFFTEVLYQNLRKVSSKSEESIHFCKFPSTTGERDERVEQSVNRMVTIIDLARNIRERHNKALKTPLKEMVVVHPDNDFLEDITGKLKEYVMEEINVKTVTPCNDPLMYASLRAEPNFSVLGKRLGKDMGKVSNVVKKMTQEQILDFEKSGEISFFGHCLKLDDIKVVRQFKRPENVSEKEIDAAGDGDVLVILDLRADQSLFEAGVAREVVNRIQKLRKTAQLEPADPVDVYYESVGSDKNTLEEILKSQDQYIRDALGSPIMPKEMAPTDDVILGEESHNVHDMSFVICIARSTPILAPDLLSHASGKSNHVEALRVYLLSRSLSRLKNQFQAGKGMITVDCIEGYPPVSLLLGKHVFLSAGDFYLASRS

SEQ ID NO: 16013 - protein, 322 aa, Zea mays
  VARIANT 302: note = Ancestral polymorphism is P, Derived polymorphism is S
  VARIANT 260: note = Ancestral polymorphism is G, Derived polymorphism is E
MEFAAALVANRMKVIVVFPGKHLMANLFTPKIAEFYENYYASKGVTFIKGTAVSSLQISSEKVTAAILRDGRRLPADMPRSTAPRSSSTGRPSSSSPTLTTPTSTVPRNRSSVPSGSRRTPIETHAKQCHFRLASCAAGGGLRTTAECVKIAIGYSDLLEARGLSLSSVLMKQFRPSVEQALDSNLRRIEESTAALAAADDWILTYPPTGIRPLARSSGNLALQPKLSSSAHRFNSMVQDFFGDVGPLVSLQLGGSAMDGLLKIFNSYVNDILDIGCSVGVSTRYLTEKFPSAQAVGLDLSPYFLVVAAQKEEKLSRPKPIR

SEQ ID NO: 16014 - protein, 347 aa, Zea mays
  VARIANT 22..347: note = Derived polymorphism lacks residues 22 to 347
  VARIANT 75..347: note = Derived polymorphism lacks residues 75 to 347
  VARIANT 105..347: note = Derived polymorphism lacks residues 105 to 347
  VARIANT 125: note = Ancestral polymorphism is R, Derived polymorphism is H
  VARIANT 127: note = Ancestral polymorphism is G, Derived polymorphism is C
  VARIANT 146: note = Ancestral polymorphism is M, Derived polymorphism is I
MWLGEQSQFFSQISAMQLSTQSFMSSGHRQISLLPQLHWQNYFTKLCIKITYHFFHWKKGTPFADDQGMYNALTWWEQMDNGKQLTRNRKFLIVVHVVLYVVDGREAGHGWRGASRGAAISIGRRRGVDVGAAGGALAIHVEEAGMHVEVGALDNEEGGGDTRTFRYLAKDAMRFGDSAENTGKTAGTRGGSRIRWHGREEARIGGVRFLQWTEEGRSAHLVVFVAGNRPDEDPAKGPTKALGIGQRTPNCDLVNGCLGRRGHRFRPRRQHRSWHHRRGRPLASGHGRRRLDEGRAGEEGVAMDDWAMDECWRIQPREGDGRADGGPRIERRGFVMNDGGGGTDGVD

SEQ ID NO: 16015 - protein, 210 aa, Zea mays
  VARIANT 74: note = Ancestral polymorphism is R, Derived polymorphism is K
  VARIANT 24: note = Ancestral polymorphism is A, Derived polymorphism is T
  VARIANT 22: note = Ancestral polymorphism is A, Derived polymorphism is V
  VARIANT 14: note = Ancestral polymorphism is L, Derived polymorphism is I
  VARIANT 4: note = Ancestral polymorphism is M, Derived polymorphism is V
MATMAASSCHGQLLLFLLVAVASACLGSAAAHQAGSGEGYTIAGRVKIDGTSVKGFGLATKTSNTKVILNGGQRVTFARPDGYFAFHNVPAGTHLIEVSSIGYFFSPVRVDISARNPGYIQAALTETRRVLNELVLEPLKEEQYYEVREPFSVMSLLKSPMGLMVGFMVLMVFVMPKMMENIDPEEMKQAQEQMRNNPVSLSGLLARAQG

SEQ ID NO: 16016 - protein, 394 aa, Zea mays
  VARIANT 9: note = Ancestral polymorphism is A, Derived polymorphism is V
  VARIANT 61: note = Ancestral polymorphism is K, Derived polymorphism is N
MPELPEVEAARRALQAHCVGRRIARCAVADDAKVVVAAAGRAAFERAMVGRTIVAARRRGKNLWLQLDAPPFPSFQFGMAGAIYIKGIPVTNYKRQEIISSQGCRSVVNSEEEWPSKHSKFFAELDDGLEFSFTDKRRFARVRLFEDPETLPPISELGPDALFEPMSVDSFLDSLGRKKIGIKALLLDQSFISGIGNWIADEVLYQSRIHPLQIASNLPRESCEALHQSIEEVVKYAVEVDADMDRFPKEWLFHHRWGKKPGKVDGKKIEFITAGGRTTAYVPQLQKLVGTQSSKTISVAENGDAKDSGTEGEDADADVLKPRKRAATSRGQRNKDTAGSRKARGNGADAEAAEPATGVVGSNSEQAFGQANSDAVDKSDRATRRSSRKVKARK

SEQ ID NO: 16017 - protein, 103 aa, Zea mays
  VARIANT 92: note = Ancestral polymorphism is R, Derived polymorphism is W
  VARIANT 68: note = Ancestral polymorphism is E, Derived polymorphism is Q
  VARIANT 67: note = Ancestral polymorphism is W, Derived polymorphism is L
  VARIANT 65: note = Ancestral polymorphism is H, Derived polymorphism is Y
  VARIANT 52: note = Ancestral polymorphism is E, Derived polymorphism is K
  VARIANT 38: note = Ancestral polymorphism is T, Derived polymorphism is M
  VARIANT 19..103: note = Derived polymorphism lacks residues 19 to 103
  VARIANT 10: note = Ancestral polymorphism is P, Derived polymorphism is L
MAGSTSLSMPETKVNILMQQVADDYGLEVFVGLPQATTHAIPAAKDKEKVYEYDLSCRLAELKVYDWEGLSVFSGDDRFILAPAHLACALLWLPSNVVEELLV

SEQ ID NO: 16018 - protein, 238 aa, Zea mays
  VARIANT 180: note = Ancestral polymorphism is C, Derived polymorphism is S
  VARIANT 89..238: note = Ancestral polymorphism lacks residues 89 to 238
  VARIANT 70..238: note = Derived polymorphism lacks residues 70 to 238
  VARIANT 25..238: note = Derived polymorphism lacks residues 25 to 238
  VARIANT 2..238: note = Derived polymorphism lacks residues 2 to 238
MQVIGKSMQSIVKSLNSMLATRNLQKMFETMDNFERQFVNMEVADDYGLEVFVGLPQATAHAIPAAKDKEKVDEYDLSRRLAELKAHDWEGLSVFSGVLALSIGDLAMAAGHWALCLASGRRKALGGHRTSHLRGRHGLELGVGARALRQQHKHHQQAGDGVGGGGGGGGDREPQAQHECHVCGLGFEMGQALGGHMRRHREETTTGAADAWVWRAADALQRARGGAADPPVLLELFA

SEQ ID NO: 16019 - protein, 115 aa, Zea mays
  VARIANT 3: note = Ancestral polymorphism is Q, Derived polymorphism is R
MLQFFIFFKEFGPYFCQPVIAGLGDDNVPFICTMDCLGAKELAKDFVVSGTASESLYGACESMYKPDMQPDELFETISQALNSSVDRDCLSGWGGYVLIVTPTEVREHVIKSRMD

SEQ ID NO: 16020 - protein, 282 aa, Zea mays
  VARIANT 210..282: note = Derived polymorphism lacks residues 210 to 282
MSAVVCGKRSSSIFADELLPPSPSSPHSSHQPAAKRSRRSPSHRGGSDGLRPEALVDYLLALFPDMDPQLLEKALEASGDDLDSAIKSLNLLRLESAEAILSSTGFKPENCLQTAIQPSLEGIPNGGVDTATEHPPSVDNYQTSYNGSEWVELLVTEMRNASDINDARARASRALEALEKTIVERAGAEATQNLHKENMMLKEQLTVVLRENSVLKRAVAIQHERQKEFDERSHEVQNLKQLVLQYQEQVRTLEMNNYALTMHLKQAQQNSSIPGRFNPDVF

SEQ ID NO: 16021 - protein, 178 aa, Zea mays
  VARIANT 8: note = Ancestral polymorphism is R, Derived polymorphism is H
  VARIANT 12: note = Ancestral polymorphism is V, Derived polymorphism is I
  VARIANT 15: note = Ancestral polymorphism is V, Derived polymorphism is I
  VARIANT 16: note = Ancestral polymorphism is V, Derived polymorphism is I
  VARIANT 18: note = Ancestral polymorphism is M, Derived polymorphism is I
  VARIANT 23: note = Ancestral polymorphism is V, Derived polymorphism is D
  VARIANT 38: note = Ancestral polymorphism is T, Derived polymorphism is A
  VARIANT 40: note = Ancestral polymorphism is V, Derived polymorphism is M
  VARIANT 54: note = Ancestral polymorphism is D, Derived polymorphism is E
  VARIANT 99: note = Ancestral polymorphism is A, Derived polymorphism is T
  VARIANT 100: note = Ancestral polymorphism is R, Derived polymorphism is W
  VARIANT 130: note = Ancestral polymorphism is D, Derived polymorphism is N
  VARIANT 144: note = Ancestral polymorphism is V, Derived polymorphism is A
MISPEDPRKWLVKRVVGMHGGSVTYLVDPGNNDSSSRTVVINYAYARDNETLFDIISVKVWSLSGYPGNFLQFISFVAEMAAAAGPYKEMLEVVNACATRIRWRLSPASKRRLLNGCAVVVDEQTQLLPNILFLCTRLRPVVLVDYGGTMPQLQENLCGLLYLARQFKLYKVRSVQFG

SEQ ID NO: 16022 - protein, 504 aa, Zea mays
  VARIANT 183: note = Ancestral polymorphism is V, Derived polymorphism is G
MGLAPPELGQFDGWESSGEEERERERWGWCRRSRRGSSRRRAAPKGTDDDTAVDTGCCIRLWPVGTCPPPPQRSKVDTSTSSASTHGAEKSTENGSRNQPVALVVSGSTTTSNAESSSSASKVGEEIKVASQLRKFAFNDLKCATRNFRPESLLGEGGFGCVFKGWIEENGTAPVKPGTGLTVAVKTLNHDGLQGHKEWVAEVDFLGNLHHPNLVRLIGYCVEDDQRLLVYEFMPRGSLDNHLFRRSLPLPWAIRMKVALGAAKGLAFLHEEAERPVIYRDFKTSNILLDAEYNAKLSDFGLAKDGPVGDKTHVSTRVMGTYGYAAPEYVMTGHLTSKSDVYSFGVVLLEMMSGRRSMDKNRPNGEHNLVEWARPLLGERQRFYKLIDPRLEGNFSVKGAQKAAQLARVCLSRDPKARPLMSQVVEVLKPLQNLKDMASASYFFQTMQAERMAHSSSMNGRSSMNGGFKTQSPFGRHGQPPPVRSLSDGPRASPFRYSPKPNVK

SEQ ID NO: 16023 - protein, 98 aa, Zea mays
  VARIANT 49: note = Ancestral polymorphism is K, Derived polymorphism is R
MAPPRQGGEQAEAGVRDSAPALRPPAHVMARVFSQLDCVDLLSCSLVCKQWYRDSAELREDWRMEYLDAWNQFGLSVTREPQPLCATCAIRSLRSLCP

SEQ ID NO: 16024 - protein, 322 aa, Zea mays
  VARIANT 2: note = Ancestral polymorphism is E, Derived polymorphism is G
  VARIANT 31: note = Ancestral polymorphism is P, Derived polymorphism is S
  VARIANT 40: note = Ancestral polymorphism is T, Derived polymorphism is A
  VARIANT 52: note = Ancestral polymorphism is R, Derived polymorphism is M
  VARIANT 53: note = Ancestral polymorphism is P, Derived polymorphism is Q
  VARIANT 75: note = Ancestral polymorphism is I, Derived polymorphism is V
  VARIANT 90: note = Ancestral polymorphism is W, Derived polymorphism is R
  VARIANT 91: note = Ancestral polymorphism is D, Derived polymorphism is N
  VARIANT 100: note = Ancestral polymorphism is A, Derived polymorphism is V
  VARIANT 107: note = Ancestral polymorphism is G, Derived polymorphism is S
  VARIANT 115: note = Ancestral polymorphism is A, Derived polymorphism is V
  VARIANT 116: note = Ancestral polymorphism is R, Derived polymorphism is C
  VARIANT 181..322: note = Derived polymorphism lacks residues 181 to 322
  VARIANT 214: note = Ancestral polymorphism is G, Derived polymorphism is R
  VARIANT 220: note = Ancestral polymorphism is P, Derived polymorphism is R
  VARIANT 239: note = Ancestral polymorphism is R, Derived polymorphism is I
  VARIANT 241: note = Ancestral polymorphism is G, Derived polymorphism is V
  VARIANT 265: note = Ancestral polymorphism is P, Derived polymorphism is S
  VARIANT 300: note = Ancestral polymorphism is T, Derived polymorphism is I
MEGGEEVEKEGNMSQLAGVQFLLSNEGKEVPLSSIEERTACICLFFSAHWCRPCRSFTPTLLQAYTALRSAGKSVEIIFVSLDRDEASFRDHFQGMSWLAVPFDAAGLLRQKLCVRFAIERIPTLIPLSVSATPSSGLGCGEDAVRLVGEYGVDAYPFSAQRRRELESMDDARRGGGRLQELLGCEERDYVISADDIKIPIADLAGKTVGLYFGAHWCPPCHVFTKQLKEVYNELKILRPGSFEVIFVSIDRSKGEFQASMSSMPWLAIPYSDAARKKLTRIFAVKGILGLLILGKALKTDVHRPELLPTYACPSPAPYSAR

SEQ ID NO: 16025 - protein, 113 aa, Zea mays
  VARIANT 1: note = Ancestral polymorphism is V, Derived polymorphism is M
  VARIANT 13: note = Ancestral polymorphism is Q, Derived polymorphism is H
  VARIANT 25: note = Ancestral polymorphism is T, Derived polymorphism is I
  VARIANT 26: note = Ancestral polymorphism is V, Derived polymorphism is I
  VARIANT 31: note = Ancestral polymorphism is K, Derived polymorphism is N
  VARIANT 37: note = Ancestral polymorphism is E, Derived polymorphism is K
  VARIANT 43: note = Ancestral polymorphism is L, Derived polymorphism is M
  VARIANT 53: note = Ancestral polymorphism is Q, Derived polymorphism is R
  VARIANT 61: note = Ancestral polymorphism is T, Derived polymorphism is I
  VARIANT 107: note = Ancestral polymorphism is R, Derived polymorphism is H
  VARIANT 111: note = Ancestral polymorphism is A, Derived polymorphism is S
MKSERKCALVYGQMNVPPGAHVGLIVLTVAKHFRDAKGQDVLLFIDNIFCLTQVKSVIFKIRSFRHTVDPSTIKFHDRLVLCMCDNSSAQESAERGGIELYAEVNNRGLCAIA

SEQ ID NO: 16026 - protein, 812 aa, Zea mays
  VARIANT 119: note = Ancestral polymorphism is A, Derived polymorphism is V
  VARIANT 230: note = Ancestral polymorphism is D, Derived polymorphism is G
  VARIANT 233: note = Ancestral polymorphism is P, Derived polymorphism is L
  VARIANT 234..812: note = Derived polymorphism lacks residues 234 to 812
  VARIANT 369..812: note = Derived polymorphism lacks residues 369 to 812
  VARIANT 568..812: note = Derived polymorphism lacks residues 568 to 812
MASPSPSSPTDRRRRHTIYHGHRRASPHRPTVRGGLFTDLRFPSTIHRPSSSPSTATAFRLRDWDPHSPSSSSSARSPSPPSASSSSSTSASARRLSPLARFLLDALRRHQRWGPPVVADLSKLRRVPPSLVAEVLTARPPPPPPLALPFFLWAGRQKGFRHCFPAFHALASLLSAAGLPAAADQLPDLMRAHGRPISHPQLTLLVRLHTAARRPLRALHALRRFRHEFDVQPQVHACNRVLGALAAAGHVEDALKLFDEMSEGGVQPIPVTFAIMVRALAHAGMVDRLLEMIGRMRNEVCRPDVFVYTALVKTMVRRGYMDGCMRVWDEMEKDGVEPDTMAYATMVGGLCKAGMVEEAAELFKEMRSKGLLVDRMVYASLIDGYVAVGRVGDGCRLLNELVDAGYRADLGIYNTLIIGLCGIGREDKAHKLFQIVLQEDLMPSSDTVSPLLACYAEKGEMVTFFGLVNKLAEMGLSVVEMLVDFMKLLAGKDGRVLKAVEVFDALRQKQYCSVGIYNILIENLLKIKDRKKSLLLFEEMQSSVDFKPDSCTYSHMIPCFVDEGNVKEACSCYNTMMKENWIPSMSAYCVLVKGLCKMGEINTAISLVKDCLGNIENGPAEFKYTLTILEACRSKRPEKVINVVYEMIEVGCSMEEIVYSAIIYGFCKYASSTEARQEKVEFLRGQNWSVTLTRSRASPSSSQPPGPRILRCTFRSWIAHVDCCAKVFCLVKVEKMGVTALFQQEGEGSNNIGFVVNLRLNSLTEFGTPPVHRGQTSASREEKGCSQWERDQVMAAWQCMKLSTHWIALGEG

SEQ ID NO: 16027 - protein, 926 aa, Zea mays
  VARIANT 545: note = Ancestral polymorphism is G, Derived polymorphism is D
MQRLPTATAAGAGMTSLLVVLLLVSVLPGASGADSGPLDGRKMVFAGETAGVLARYSFNKFRGQAQLPRFAAPRRYDLRLRPDLVTCTFSGTAAVTVAVSAPTRFLVLNSADLSIDSASIRFRDLAPKEVVFFADDEILVLGFSKDLVLGEGVLSMKFNGTLNDQMRGFYRSKYQYKGKMKNMAVTQFESVDARRCFPCWDEPAFKAKFKLTLEVNVGMVALSNMPIANQTVAGPIRTVHYVESPLMSTYLVAIVIGLFEYIEGVTPEGTKVRVYTQVGKSSQGKFALDVGIKSLHLYKDYFGTPYPLPKLDMVAIPDFAAGAMENYGLVTFREVALLFDEESSMESSKQSIAITVAHELAHQWFGNLVTMEWWTHLWLNEGFATWMSNLAVNSFFPQWNIWTQFLDDTTAGLKLDSLEESHPIEVEIHHATEVDEIFDAISYDKGASVIRMLHNYLGAERFQKALASYIRKFAYSNAKTEDLWAVLEENSGEPIKNMMTTWTKQQGYPVINAKLQGNYLELEQAQFLLDGSSGPRMWIVPITADCGSYYTQKKILLKGKSDRLDIRDIASQCGNQEKGGNFWIKLNINQTGFYRVQYDDKLAAALQNALQAKKLSVMDKIGIVEDSLALSMACKQTLTSLLRLLYAYREEADYSVLSHINTASLSIAKISVDATPGLVGDIKQLLIKLLLPPAVKLGWDLKNGESHLDSLLRPVLLVALVKLGHDKSINEGARRFSIFVHDRNTSLLRPDTRKAAYLAAMQNVTASYRSAYNDLLKVYRESDEAEERGRVLSTLCFCKDENIVLESLNLLFTNEFRKQDAYYVLQGLDVETRDTAWVWLKDNWDRVTRKYGDTQAGGFIRYVVTLFTSNEKAAEFSRFFATRKKPEFERTLKQSLENVRISARWIQGIKSEPRLAQTVQELLRRP

SEQ ID NO: 16028 - protein, 405 aa, Zea mays
  VARIANT 372: note = Ancestral polymorphism is P, Derived polymorphism is R
  VARIANT 364: note = Ancestral polymorphism is V, Derived polymorphism is E
  VARIANT 341..405: note = Derived polymorphism lacks residues 341 to 405
  VARIANT 329..405: note = Derived polymorphism lacks residues 329 to 405
  VARIANT 258: note = Ancestral polymorphism is V, Derived polymorphism is I
  VARIANT 158..405: note = Derived polymorphism lacks residues 158 to 405
MEGDRLRCTPALLPRIVVGRGGDIRNTVSGEDPVWPLGRSASLCPESRSSPTLSMEGDSVYRERIMVGRGGGIQSAASGEDLVWPLSRLASMCPGSRSSPTLCPGSRSSPTLSIEGDPVYRKQTVVGRGGGIRSMTRTPVSVRGYGDLRMKGQINGAQGDSGADQLNTTIDDSEEVREICFLCWASRDGSIVAVGYITGDTLLWDMTTKSSRQEKQSDVSSNVVKLQLVSGSSRLPVIVLHWSAGSAVHSNKGGHLFVYGGDDMGSEEVLMVLSLESTAGLESVRCMSRTDLKLDGSFADMILIPDTGRLWNCEFYRYLFYLGKIRTIQLEYTDAKESLLQVARKAPTTAHGFRIQCNKWVIIERLLLGEIPERTVFMQKGINAFNHIMIKYDLYGMSFSIVSNL

SEQ ID NO: 16029 - protein, 152 aa, Zea mays
  VARIANT 3..152: note = Derived polymorphism lacks residues 3 to 152
  VARIANT 23..152: note = Derived polymorphism lacks residues 23 to 152
  VARIANT 33: note = Ancestral polymorphism is S, Derived polymorphism is C
  VARIANT 37: note = Ancestral polymorphism is P, Derived polymorphism is L
  VARIANT 62: note = Ancestral polymorphism is A, Derived polymorphism is S
  VARIANT 71: note = Ancestral polymorphism is H, Derived polymorphism is D
  VARIANT 74: note = Ancestral polymorphism is K, Derived polymorphism is N
  VARIANT 76: note = Ancestral polymorphism is F, Derived polymorphism is Y
MGYHLLTLVCHCLILTLAILFLWSSAMVFINKCPNIPEVKIPNDLTLNVARSLRYEINMGFATLWVIGQDHELKKFLIVVAGLWILSVHGSCCNFLTLSYIVLSSYGFLYAFFVVLYIVPVLYEQHGDKVDAFGDKAMLELKYYTIFDEKCL

SEQ ID NO: 16030 - protein, 68 aa, Zea mays
  VARIANT 49: note = Ancestral polymorphism is P, Derived polymorphism is L
  VARIANT 32: note = Ancestral polymorphism is Q, Derived polymorphism is R
MQELDVSNVRELEDFLINECMYSGIVRGKLDQLRRCFEVQFAAGRDLTPDQLNNMIEILSDWRRQPPA

SEQ ID NO: 16031 - protein, 132 aa, Zea mays
  VARIANT 44: note = Ancestral polymorphism is I, Derived polymorphism is T
MGSAMNKDKVHDKETHGTSSDITEKTPVETVKGPNLLERAKEEIEALAGAVHTKMEHHSSPHAKKDESHKEGKEGSLHKIKAHTDETHGTSADINENTPVDKVKGPNVFERAKEEIEAIVEAIHPKNGSDSK

SEQ ID NO: 16032 - protein, 705 aa, Zea mays
  VARIANT 423..705: note = Derived polymorphism lacks residues 423 to 705
MPKVKNPHVFMDISIGGGSAERITFELFANVVPKTAENFRALCTAYVRVLSLKPVPCAQHIGERGLGASTQKPLYYKGTYIHRIVKGFVAQGGDFSSGDGKGGESIYGGKFPDENFKLLHNQPGVLSMANSGPGTNGSQFFITFKALPHLDGYCFLFFSRWALFDSQFSNHNQKLNTARKLINDIVACNDLNKHVVFGKVVSGIALLKNLEAAGSETGNPSCQVKIVDCGEVSNTNSQDLLKGEKEKKLRTADGNSNAEGRAKLKKASGDYKQRKKRKHYSSDSYSSDTSDSSSYSSDSGSDSESQSSMNTSSSSDHRRKRRKGSKKDKRKLTKRKGKHTRSKRKSRGSKRRPRRSYGSSSDDSVSSKTDNSSSDSENGGHYTKRSLPKDKESTKMTNSEQGRTFPDVDKVKQTVTTINRSQSHDGSKPSNKDDNGADDRSGNYSSKDRNDPGASSRISPIQTDVNLTKPVNVYGNIGGDNADAGMSITGTERHLPSNEPVSTNGKDLAVGSADNGQPQRIRKGRGFTQKYGFARRYRTPSPERPPVRPRYDGGREDRWNNFNRYGRTGPYSRRSPVRRYHGSPRANSPSRYQRRGRSRSRSPATRHDRGGYRRPSPRRSRSPADPRRDANDRPRSGHGGGGPDHRGHIPPANNRSRSKSRDPLRSRSPDAAPAKRESSRYNRRRSSSSRSSSPDADGNKGLVSY

SEQ ID NO: 16033 - protein, 577 aa, Zea mays
  VARIANT 520: note = Ancestral polymorphism is H, Derived polymorphism is N
MAATSPAPAPPRILLAGDAHGRLHQLFKRVKSVNQSTGPFHALLCVGQFFSPEGAAEGSPEDVTDYLEGRASVPIPTYFTGDYGPAAPRLLSKAAAGARGFAPGGIEICPNVFWLRGSNRFTLHGLSVVYLSGRKGLGGPGCYSQDDVDALRALAEEPGIDDLFLTYPFFPYTVLDPNGYDPIVAELVAEIKPRYHIAGTKGVFYSREPYVNDSAAHVTRFIGLANVGNKEKQKFIHAISPTPASVMSSADINAKPPNATLSPYVGSAKSVPIEEAPKRAAENIDSQYWRYDVKRQRHGEAGGGGLCFKFVSSGSCQRGSRCSYRHDEEAVEHYQRNVCFDFLNKGKCERGPECNERRRVESSCWFCLSSPDVESHLVISIGEGYYCTLAKGPLVPNHVLMIPVEHCPSTLMMPPEAEAELGRYKIALSKYFEKQGKTAVYFEWVSPRSHHANLQAVPVPLSKADAVNKIFHLAAKKLGFEFSMVNPDGAKTARESLMSQCESKSGLFYVELPEGRILLHMVDSNEKFPVQFGREVLAGLLSMADRADWRNCKISKEEEIKLVDDFKQGFREFDPAE

SEQ ID NO: 16034 - protein, 113 aa, Zea mays
  VARIANT 59: note = Ancestral polymorphism is N, Derived polymorphism is S
MNVAVPPQSPHLHLYDFAKSAIINFFAFPYATVCGLYCDGGMDTDKWCDSQVGHYIGISASASGVNYARELWENRRKPFTAEFIELDPSDVDSPSMPSNTNKCAKALARSLSS

SEQ ID NO: 16035 - protein, 242 aa, Zea mays
  VARIANT 11..242: note = Derived polymorphism lacks residues 11 to 242
  VARIANT 34: note = Ancestral polymorphism is A, Derived polymorphism is V
  VARIANT 40: note = Ancestral polymorphism is S, Derived polymorphism is L
  VARIANT 86: note = Ancestral polymorphism is S, Derived polymorphism is F
  VARIANT 121: note = Ancestral polymorphism is D, Derived polymorphism is G
  VARIANT 129: note = Ancestral polymorphism is D, Derived polymorphism is N
MSLLYEACTSSVAEIEGISDIYPGKHSYVVEHSADECIKLIVEQLVMAVKTSQNSNEGSTKELKAIVLELQHELQAKDVQISTISFDLSCQLRAVESSAKQFLVDLEDARMELQNLEKQVGVLLNQKKNLETQLNELKNMESMASEQRGRIEKLTDELSRKDQEIECLVQALDEEEKELEILENKSLQLEQMLQEKEFALKTSEVSRTKALSKLATTVDKFDELHSLSENPLQETPKFSWAK

SEQ ID NO: 16036 - protein, 225 aa, Zea mays
  VARIANT 26: note = Ancestral polymorphism is N, Derived polymorphism is T
  VARIANT 198: note = Ancestral polymorphism is T, Derived polymorphism is I
MAAVWWWWAPLPAWLTSSALWFLVVNAVVAAVAVLSSRPLPLQSPRCGAGVSLTRRASSAVLQRLRSFSIFSFPSACLNYTTPSTFTQPDAATAAAQETEETSRTPTTAKPSPRALPLPLPPSPLSPSVRAPAADDDVPSGMSMDEAYALALEARRRPDREREEEARRSEVDARAEEFIRGFKEDLRQQRLNSILNYTKMLKQRAFGGGAGAGARRQPDARPDQL

SEQ ID NO: 16037 - protein, 173 aa, Zea mays
  VARIANT 102: note = Ancestral polymorphism is S, Derived polymorphism is W
  VARIANT 87: note = Ancestral polymorphism is A, Derived polymorphism is V
  VARIANT 66: note = Ancestral polymorphism is R, Derived polymorphism is W
  VARIANT 51: note = Ancestral polymorphism is A, Derived polymorphism is V
  VARIANT 47: note = Ancestral polymorphism is T, Derived polymorphism is I
  VARIANT 44: note = Ancestral polymorphism is V, Derived polymorphism is M
MESSRLTYPDRFYAVAAYAPHKDEAIVGSPSPSFLWDEPFPSSVTATAAAAGGMGQLLLMCSFGGRIIPCSTGKSLCYLCGEIHIMAVDQHASRADIHACLSRLLLGGRPVMLKYQLPTRNLTPLSQSLRTRTMTTSSTRSHYPMDDQEPDGRHPWVGSSLRRQSWGWNCLCR

SEQ ID NO: 16038 - protein, 255 aa, Zea mays
  VARIANT 202: note = Ancestral polymorphism is S, Derived polymorphism is R
MRRAATPRWKGQVALAVAVKSLSREAITVVGSPTWVRRCGLSQVHRCWCGSACQGRRASWIGSFVGRLQEVMHTFMERVCVKNRRPSPRRVWLPAATRPTILHWESCNDCCTQKFGSHTRSQLFPKMECFSDLDVNLYKLWHLYLTIYISQYTYCLFNVHLVEVYAGLLRYSGYAGLIMLLSLVYAKIRYVEDKKVHLLQERMATRFTDVISGLSVSWAPKPESSIVKLQNRQQCLRYCWYAQPKLDGSDFPTSM

SEQ ID NO: 16039 - protein, 81 aa, Zea mays
  VARIANT 71: note = Ancestral polymorphism is S, Derived polymorphism is P
  VARIANT 64: note = Ancestral polymorphism is I, Derived polymorphism is S
  VARIANT 63: note = Ancestral polymorphism is C, Derived polymorphism is W
  VARIANT 60: note = Ancestral polymorphism is T, Derived polymorphism is I
  VARIANT 57: note = Ancestral polymorphism is G, Derived polymorphism is S
  VARIANT 56: note = Ancestral polymorphism is A, Derived polymorphism is D
  VARIANT 50: note = Ancestral polymorphism is T, Derived polymorphism is I
  VARIANT 49: note = Ancestral polymorphism is T, Derived polymorphism is M
  VARIANT 46: note = Ancestral polymorphism is A, Derived polymorphism is V
  VARIANT 38: note = Ancestral polymorphism is T, Derived polymorphism is M
  VARIANT 36: note = Ancestral polymorphism is V, Derived polymorphism is A
MILPFQPLTMMFHKINYFVDMPKLLSEGSGVFRPCVLTALVSSNSAGRTIHLDVLAGRKTCGCIEGDIKISGHKNKELLPR

SEQ ID NO: 16040 - protein, 569 aa, Zea mays
  VARIANT 207..569: note = Derived polymorphism lacks residues 207 to 569
  VARIANT 12: note = Ancestral polymorphism is F, Derived polymorphism is S
MGCPPRLLCCLFLSLSLAAVVARAATRHQEWEISYQFKSPDCVRKLAVTINGETPGPTIRATQGDTVVVRVKNSLLTENVAIHWHGIRQRGTPWADGTEGVTQCPILPGDTFTYAFVVDRPGTYMYHAHYGMQRSAGLNGLIVVAAAPGGPDAEPFRYDGEHDVLLNDWWHKSTYEQAAGLASAPLVWVGEPQSLLINGRGRFVNCSAAGACDAAHPECATPVFAVVPGRTYRFRIASVTSLSALNFEIEGHEMTVVEADGHYVKPFVVKNLNIYSGETYSVLIKADQDPNRNYWLASNVVSREPGTPAGTAVLSYYGGRSSPRRSPPTAPPAGPAWNDTAYRFRQSVATVAHPAHVEPPPPRADRTILLLNTQNKIDAHIKWALNGVSFTLPHTPYLVAMKRPGLLDTFDQRPPPETYAHRGYDVYAVPPNPNATTSDGLYRLRFGSVVDVVLQNANMLAPNKSETHPWHLHGHDFWVLGYGIGRFDPAVHPASYNLRDPILKNTVAVHPYGWTALRFRADNPGVWAFHCHIESHFFMGMGIAFEEGVDRVAPLPPQIMGCGKTRGGH

SEQ ID NO: 16041 - protein, 574 aa, Zea mays
  VARIANT 459..574: note = Derived polymorphism lacks residues 459 to 574
  VARIANT 386: note = Ancestral polymorphism is I, Derived polymorphism is T
MALLPGAARRLLCSLFLCLWLSTLARAATRRYEWEVSYQFKSPDCVRKLSATINGQTPGPTIRATQGDTVEVKVRNSLLTENLAIHWHGIRQIGTPWADGTEGVTQCPILPGDTLTYAFVVDRPGTYMYHAHYGMQRSAGLYGVVVVVVAAAPGAKADDAEPFAYDDEHHVLLNDWWHNSTYELAVGLASVPMVWVGEPHSLLINGRGRFNCSAAAVPGTCNATSPECDTPVFAVVPGQTYRFRIASVTSLSALNFEIEGHEMTVVEADGHYVKPFVVKNINIYSGETYSVLIKADQDPNRNYWLASNVVSRQPATPTGTAILSYSGDRAPPSTTPPTGPAWNDTMYRFQQSVATVAHPAYVEPPPPRADRTILLLNTQNKIDAHTKWALNGVSFTLPHTPYLVAMKRGLLDTFDQRPPPETYAYQGYDVYAPPQNPNATTSDGLYRLRFGSVVDVVLQNANMLAPNKSETHPWHLHGHDFWVLGYGIGRFDPAVHPASYNLKDPVLKNTVAVHPYGWTALRFKADNPGVWAFHCHIEAHFFMGMGIVFEEGIQRVASLPPEIMGCGETNGGHR

SEQ ID NO: 16042 - protein, 73 aa, Zea mays
  VARIANT 65: note = Ancestral polymorphism is P, Derived polymorphism is L
  VARIANT 63: note = Ancestral polymorphism is T, Derived polymorphism is S
  VARIANT 37: note = Ancestral polymorphism is T, Derived polymorphism is M
  VARIANT 16: note = Ancestral polymorphism is Y, Derived polymorphism is C
  VARIANT 13: note = Ancestral polymorphism is D, Derived polymorphism is N
  VARIANT 10: note = Ancestral polymorphism is G, Derived polymorphism is R
MRSDAIRDAGITDVTYTDDHHPWFLKNLLADLMDDNTMSKQYEEPEQLMQSMNKFMQILVEATIPAVGSRGLN

SEQ ID NO: 16043 - protein, 181 aa, Zea mays
  VARIANT 115: note = Ancestral polymorphism is L, Derived polymorphism is V
MMVGKRERDCKNPMRRTTSMTEFAPPDALAAVMEDEEGPQLSDDSSRDGGQQDWLSALGGGGGGVGGAAAQEDWLAAYHARAAPARAGLRRNSADYSAVETAAFLRACGLCRRRLGPGRDTFMYKGEAAFCSLECRERHMTQEEWKDKCAVTSIKDAAAGSAKVKGRRAGSGKAGGTVAAA

SEQ ID NO: 16044 - protein, 180 aa, Zea mays
  VARIANT 73: note = Ancestral polymorphism is R, Derived polymorphism is W
  VARIANT 147..180: note = Derived polymorphism lacks residues 147 to 180
MPPARSSGRTTKAAVFCRIRINHCKVKAVAATTSPRADHRLRSSEGSKKDYYKVLSLEHPAAVGAEEIRRAYRRLALRYHPDVCPPSRRAESTELFLELRRAYETLSDPAQRLRYDAELRASGDDPGAAFARDVWEAQLCALRARSEQRQSARSAGVRARGAPRAVADSHPGLPGLQPRS

SEQ ID NO: 16045 - protein, 169 aa, Zea mays
  VARIANT 135: note = Ancestral polymorphism is A, Derived polymorphism is V
  VARIANT 121: note = Ancestral polymorphism is R, Derived polymorphism is G
MPIARCAATVNNTACIPGRKRRCCNVTARATATSSAAGGRAPGSTRRDYYTVLSLEQHPAAEDVGAEEIKRAYRRLALRHHPDVCPPSRRAESTELFLELRRAYETLSDPARRVRYNADLRGGTGGEVASPGGVVFARHVWESQLAVLRAHSEQRQRARSSQSQPQRPV

SEQ ID NO: 16046 - protein, 374 aa, Zea mays
  VARIANT 40: note = Ancestral polymorphism is S, Derived polymorphism is L
  VARIANT 44: note = Ancestral polymorphism is P, Derived polymorphism is L
  VARIANT 63: note = Ancestral polymorphism is R, Derived polymorphism is Q
  VARIANT 92: note = Ancestral polymorphism is W, Derived polymorphism is S
  VARIANT 292..374: note = Derived polymorphism lacks residues 292 to 374
MAMASRDGGGAAGRAALRVGRTREYRTGMETELLSIDAGSSGGPAVSLFVLCGDGFEAARLFRSGTLSLHMARVEGLVPMSMATVAVGDHRWMLARDALVARVDERTFVFELPGFFYAVAMPPDAERECASMAEILSRFCSYHDLAADAAADGGGELAGELDTNPWAGAHARISRLKRQHTSPAAADAPSDPARQMERAVRTSAVVKLLTRSLLSGVLQPGRHLTVTTGTASAIAGTSSWPSTAALPSRSVVADLLDAIETNRAVPRCGGSGGDGGLGLGWWNLNVEGVMLLLRVVQAVRGRNNLAAPAPGGKRPRDEGPAGRDTMRGGVVGGSSAARRWCGAGGRPGKIGNAPLAPVAVGSRPSSNRCLIDDR

SEQ ID NO: 16047 - protein, 123 aa, Zea mays
  VARIANT 33: note = Ancestral polymorphism is A, Derived polymorphism is V
MVGGALADKYGGKKVMAGDAALWSLATVLTPWAASRSTLMLLAVRALFGLAEESDPIDSRTISKSELQLILDGRIGSKVQGSKFPSVRELFSKTQFLAVTLANVVNNWGYFVLLSWMPVYFKT

SEQ ID NO: 16048 - protein, 83 aa, Zea mays
  VARIANT 79: note = Ancestral polymorphism is D, Derived polymorphism is G
  VARIANT 56: note = Ancestral polymorphism is A, Derived polymorphism is T
  VARIANT 47: note = Ancestral polymorphism is V, Derived polymorphism is M
  VARIANT 45: note = Ancestral polymorphism is R, Derived polymorphism is Q
  VARIANT 43: note = Ancestral polymorphism is K, Derived polymorphism is M
  VARIANT 40..83: note = Derived polymorphism lacks residues 40 to 83
  VARIANT 10: note = Ancestral polymorphism is S, Derived polymorphism is F
MLYFLKDKGSDEVVLKAMGRAINKIVMTVELIKISIGRGWDLKGRPVLLFYTSYPAGTEMLTNTAKLYKAALGNCFETDDIGC

SEQ ID NO: 16049 - protein, 349 aa, Zea mays
  VARIANT 7: note = Ancestral polymorphism is V, Derived polymorphism is M
MKKTMAVGGGGKGGTAATDLLVCFPARQHLALMPKPICSPSRTTMDKAAAARRRQLQLPGASAAAGGGRARGSSSAMFWGSKARQRPEEEEEPQSPKVTCAGQIKAGRPRKVKPGSEAATKHGKGGAKSWLAVVEEIERLRGRRKKVGWLETLGIRRDALPFLGGALRSLRSKACCFGSLHAGAAAVDSSVDSDHDAGERGSEHGAGGSAAASVFSKWLMVLEGGQEPMEQDETSLDHGQEEDVELERQQCEETAPPPNALLLMRCRSAPARGRLSVSRTRRECEQLAGEVDQEKEAADGMPGDGETEDELVFLSTAPGFMKLSLDIAKETWVVGGGADPIARSRSWKR

SEQ ID NO: 16050 - protein, 85 aa, Zea mays
  VARIANT 37: note = Ancestral polymorphism is S, Derived polymorphism is I
  VARIANT 46: note = Ancestral polymorphism is N, Derived polymorphism is T
MRTRQQCRSSMMSITSRKSTLVLILIVVLVASKDEASIGADAECNNLPVSCYIKCLRPGACNSCCKQNHFVRGECIGWDCWCCRA

SEQ ID NO: 16051 - protein, 76 aa, Zea mays
  VARIANT 40: note = Ancestral polymorphism is D, Derived polymorphism is G
MPRLCLPRSSSVCLCLPSCNKSKYGMKITPLFITIDPQRDSPSQLKAYFSEFESRIVGLTGPISAVRQIAQVKASE

SEQ ID NO: 16052 - protein, 502 aa, Zea mays
  VARIANT 207..502: note = Derived polymorphism lacks residues 207 to 502
MAEAGRRTLALVNLAAIMERADEALLPAVYREVGAALGATPVALGALTLYRSAVQAACYPLAAYAAVRYNRAHVVAVGAVLWAAATFLVAVSDTFAQVAIARCLNGIGLALVTPAIQSLVADCSDDNTRGAAFGWLQLTGNIGSIIGGLFSLMLAPTTVMGIAGWRVAFHIVAVISVVVGVLVGLFAVDPHFLHVESGEQLLRKSAWAEMKDLVREAKAVVKISSFQIIVAQGVTGSFPWSALAFAPMWLELMGFTHNRTGLLMVTFALASSLGGLLGGKMGDHFATRFPNSGRIVLSQISSASAIPLAALLLLGLPDNSSGSLHGLVIPIFAEIVPERSRTSIYALDRSLESVLASFAPPVVGFLAEHVYGYNPVPYGAADNNVGRDKSNAGALAKALYTSIAIPMLLCCFIYSLLYRTYPRDRERARMDSLITPELQQIELERCHGQADYYSGRKDKDGSTVFDMDYRGIDAYDDEKGLIDQQAKQSGNVKWHRSHSQNL

SEQ ID NO: 16053 - protein, 506 aa, Zea mays
  VARIANT 390..506: note = Derived polymorphism lacks residues 390 to 506
MGPPPEKRRTLVLVNLASIMERADEALLPAVYREVGAALHATPTGLGALTLYRSIVQAACYPVAAYAASRHNRAHVIALGAFLWAAATFLVAVSDTFLQVAISRGLNGIGLALVIPAVQSLVADSTDDDNRGTAFGWLQLTSSIGSVFGGFFALLLAQTTVLGIEGWRIAFHLVAIVSVIVGTLVWFFAVDPHFPTNDAAPPSSKKSALDEARELIMEARSIVQIPTFQVFVAQGVSGSFPWSALSFLSMWLELVGFSHEDTAVLTTTFAVATSVGGLLGGKMGDSLARRYPNAGRIVLSQISAGSAVPLAAVLLLGLPDNPSTSSGVAHGLVLFVMGLIISWNGAATNCPIFAEIVPEKQRTSIYALDRTFESILASFAPPVVGLLSQQVYGFKQDDGRGSSPGQDRENAASLAKALYTAISIPMVICTSIYTFMYRTYPRDRERARMQSVIQSELDQIELLGGPSLGGGGDGDGDKPDEVDGSYGSERSAEADAGTEKLLGRKP

SEQ ID NO: 16054 - protein, 291 aa, Zea mays
  VARIANT 124: note = Ancestral polymorphism is R, Derived polymorphism is H
  VARIANT 201: note = Ancestral polymorphism is V, Derived polymorphism is I
  VARIANT 205: note = Ancestral polymorphism is G, Derived polymorphism is A
  VARIANT 214..291: note = Derived polymorphism lacks residues 214 to 291
  VARIANT 216: note = Ancestral polymorphism is L, Derived polymorphism is P
  VARIANT 233: note = Ancestral polymorphism is E, Derived polymorphism is D
  VARIANT 236: note = Ancestral polymorphism is A, Derived polymorphism is V
  VARIANT 239: note = Ancestral polymorphism is A, Derived polymorphism is V
  VARIANT 260: note = Ancestral polymorphism is L, Derived polymorphism is I
MAGKGAKATAAKSADKDKGKKTDGPVSRSSRAAPQTTAVDFKPYVGPIYNAILGRLVNQDQDQEVKECAISCMSLVVSTFGDGLERELPACLPILVDRMGEDFDQRIMEYFIKLIKKKYSKDNRALGKLRREAKRAKRALSNQHQVRVEIESLFDGTDFSEPLTRARFEELNNDLFRKTMGPVKKAMEDAGLEKSQIHEIVLVGGSTRIPKVQQLLKDYFNGKEPNKGVNPNEAVAFGAAVQGSILSGEGGDETKDILLLDVAPLTLGIETVGGVMTKLIPRNTVIPTKKS

SEQ ID NO: 16055 - protein, 473 aa, Zea mays
  VARIANT 306: note = Ancestral polymorphism is F, Derived polymorphism is S
  VARIANT 286: note = Ancestral polymorphism is S, Derived polymorphism is L
  VARIANT 284: note = Ancestral polymorphism is S, Derived polymorphism is L
  VARIANT 215: note = Ancestral polymorphism is L, Derived polymorphism is P
  VARIANT 173: note = Ancestral polymorphism is P, Derived polymorphism is L
  VARIANT 90: note = Ancestral polymorphism is Y, Derived polymorphism is C
MAQPPEEHHEQEKQASKGEYDPPNDKLIEMMVGLSIYNQQAAVALPLSIYNQQTTAAQPRLCEVHDAAAADSFSSAFLEARRSIIDPRAYVPPPPIGQKAGPSAPSQMHPGLVRMPLPPYDRSVPDARSFAEGRLRRSIARGPRNEAVGMLSPGAIGAACGAHPGGHAYMAPPPYLHGGTEEALLLALSEETPESIVSYACDLLESRHGQRLFRLVLNHCCQQLRDRIVATITWDRKSFGSLCTRRPDEVVHIISSCETRRSMQLLGDAMLQWMSHNQMRYLLSDSKRLKVLQAFIMSSPPDIAQFILKAVAQNCTRLAYQPDGLSLLQNCLERVSRKQKDDIFTQLSYQSLFLAQNSRGNWIVQDVLRKGDPSHVEIIASCLRNHYVTLAKNKYSSNVVEWCLRVFHEGERSVIICEFINYPHFRDLVTDEFANFALSTALQTCEIPLRNVLANAILSQNITVRNQHYVVKT

SEQ ID NO: 16056 - protein, 373 aa, Zea mays
  VARIANT 11: note = Ancestral polymorphism is S, Derived polymorphism is C
  VARIANT 38: note = Ancestral polymorphism is G, Derived polymorphism is R
  VARIANT 88..373: note = Derived polymorphism lacks residues 88 to 373
  VARIANT 96: note = Ancestral polymorphism is L, Derived polymorphism is R
MLYMARTFPPSAACKYHFACINVSFRFSTTQVLKRVWRPAGSPVSAGHTSGYNKECEYQTNSKHLDSNLKAIRQRHYNYLQLLKERPRYMEGRQKLSDTLDNYSHTEYSLRERGSFFVAGSGTPVIHGGVRSGATLGESTVASTVDLERGTGRCGRKGGREKGEQWGKAAARPGGRFVSKRNGGKAAMDGRAWRERGCHEGGAGRDSHGWKLCGRFVADLGDQVGAWADQRFAADLGELSCHGWKRDLGGRVPWHSWGSGARLGERGAVVGLEASRLGERAICGRFAADPSRLPWIGVICGQSRRSISCKERGSGARRQPWMEAQHVEKKARRGERQKARRAGGMLFRQNRAPSASVDVYIRHLSSSRDLTCS

SEQ ID NO: 16057 - protein, 231 aa, Zea mays
  VARIANT 23: note = Ancestral polymorphism is L, Derived polymorphism is F
  VARIANT 104: note = Ancestral polymorphism is M, Derived polymorphism is K
  VARIANT 135: note = Ancestral polymorphism is L, Derived polymorphism is R
  VARIANT 166: note = Ancestral polymorphism is H, Derived polymorphism is D
MAAIPSLLRRLAIVVATTAMVILLPSPSVAGDPDLLQDICVADLTSTVKVNGYACKAAAAVTADDFYFSGLGGAGNTSASAYGSAVTGANVEKVPGLNTLGVSMSRIDYAPGGGLNPPHTHPRATEMVFVLQGTLDVGFVTAANNRLVARTLAPGDVFVFPRGLVHFQRNAGDGPAAVLSAFNSQLPGTQSLAAALFAASPELPDAVLAKAFQVGTKEVDKIKARLAPKKA

SEQ ID NO: 16058 - protein, 161 aa, Zea mays
  VARIANT 109..161: note = Derived polymorphism lacks residues 109 to 161
  VARIANT 97..161: note = Derived polymorphism lacks residues 97 to 161
  VARIANT 65: note = Ancestral polymorphism is G, Derived polymorphism is R
  VARIANT 33: note = Ancestral polymorphism is A, Derived polymorphism is V
  VARIANT 28..161: note = Derived polymorphism lacks residues 28 to 161
  VARIANT 21: note = Ancestral polymorphism is P, Derived polymorphism is L
  VARIANT 12..161: note = Derived polymorphism lacks residues 12 to 161
MPPALQRRAFCCAHDELAAMPHFPRRLEPKRLALALKKELMVVCEWELGTKEPLKWKVRFKIALGIAEGLLYLHEGCHRRIIHRDVKASNILLTEDYQPQISDFGLAKWLPDKLTHHVVYPIEGTFGERLCVRVTRTWDFYDPGDDKKLLHSDLVPLDEEV

SEQ ID NO: 16059 - protein, 143 aa, Zea mays
  VARIANT 1: note = Ancestral polymorphism is T, Derived polymorphism is M
  VARIANT 24: note = Ancestral polymorphism is A, Derived polymorphism is T
  VARIANT 47: note = Ancestral polymorphism is S, Derived polymorphism is L
  VARIANT 53: note = Ancestral polymorphism is L, Derived polymorphism is V
  VARIANT 55: note = Ancestral polymorphism is L, Derived polymorphism is H
  VARIANT 88: note = Ancestral polymorphism is A, Derived polymorphism is P
  VARIANT 91: note = Ancestral polymorphism is S, Derived polymorphism is N
  VARIANT 118: note = Ancestral polymorphism is R, Derived polymorphism is Q
  VARIANT 120: note = Ancestral polymorphism is G, Derived polymorphism is S
  VARIANT 138: note = Ancestral polymorphism is G, Derived polymorphism is S
MSLGPPAASTCWTWTSACARSGVADAGAGAALPAATLKVTALVSPASHHSLELNLIHENLSGFARELGVFLQFVAYNVDALDPAELVAITSDDAVAVHLRVGSAHVTTMSTVLRLVKRLGVKVVVSVDRGCDLSALGGEIYTG

SEQ ID NO: 16060 - protein, 379 aa, Zea mays
  VARIANT 201..379: note = Derived polymorphism lacks residues 201 to 379
  VARIANT 227: note = Ancestral polymorphism is A, Derived polymorphism is D
MLGQVVTDNASNNMGAKKLLLVKTPQIFWTSCAAHTINLMLQGIGNLPRFRKVIDQAFWKDVKLMLAVFEPLVKVLRLVDGDVKPSMGFLYGELLKAKREVKEAFGNVESRFKDVMAVIEKKMNGRLDSPLHLTAFLLNPHYSYANPSIFDEPKMNEAFISCVEQFYYHDEDQQEQATNFELKKFQNREGPFSKKLARTFQNYDYIPGRESWWRLYGTETPALQKMATRILSLTSSSSGCERNWSGFEGIHTKKRNRLTTTRLNKLVYIQFNNRMMNKREKIKSKKITNVLLSSDTTEAQGFLQEGGDDCAQIVFRDGEEDEMEGTGIPWSVIGEAVGAEEQLEPRRSARVRELYEGEEFESEEEEYEDEDLCYSEDEI

SEQ ID NO: 16061 - protein, 370 aa, Zea mays
  VARIANT 275: note = Ancestral polymorphism is D, Derived polymorphism is V
  VARIANT 241: note = Ancestral polymorphism is P, Derived polymorphism is A
  VARIANT 79: note = Ancestral polymorphism is M, Derived polymorphism is T
MEHKKARAVEDPARLICDDALTEVFRRLPARALAACRLVCKSWMSVLTDPHFIHEHLSRGQQKLLLFATDRGNDRSLAMVLADNNASMYQLSRPAASRSVFVHNSCNGLLCLGDSTGAVEVLNPTTGESLMLPMPMYTAGSSQFSSCNWHCLGFCPQKREHKVVHFYPGAHNDPFKVHCEIYTIGVGVWRQVGSCHGAPTDRGVHVNGMVYYLTKFRYIASSRINCLNLESEKFDVMMLPPHKSYGGHCSLAELEGKLCLLIVDGALEGPPRTMDILMLNSHDKQGWTHRYHFSLPWLMPSCYFTPKHTLFHGGKIWVQLLARNLYCFDPSSSSEELTTAWPELDFSFSTHTFIESIVPLRKDYYFKQIQ

SEQ ID NO: 16062 - protein, 343 aa, Zea mays
  VARIANT 30..343: note = Derived polymorphism lacks residues 30 to 343
  VARIANT 33: note = Ancestral polymorphism is K, Derived polymorphism is N
  VARIANT 106: note = Ancestral polymorphism is P, Derived polymorphism is L
  VARIANT 129: note = Ancestral polymorphism is D, Derived polymorphism is E
  VARIANT 314: note = Ancestral polymorphism is S, Derived polymorphism is F
MAAAATRSLHSFLALLLLLAAAAAAAALSYETKSIDPGLVVMTLPEPVSGPESLAFDGRGGGPYSGVSDGRVLRWQGPLRGWTEFAYNSKHRSVALCAPDKKLVVPESLCGRPLGLQFHRQSGDLYVADAYLGLLRVAARGGLAQVVATEAAGGPFNFLNGLDVDQRTGDVYFTDSSATYRRSDYLLVVAMGDETGRLLRYERRTGRVGVLQAGLSYPNGVAVSADGTHVVVAHTALCELRRYWIRGARAGTSDTFAELPGYPDNLRADGRGGYWVALSSGVAADEAAAAPTVAVRVSRDGNVTEALDGFSFVSVSEVAQRGGALWVGSVDTPYAGQLKRRAS

SEQ ID NO: 16063 - protein, 206 aa, Zea mays
  VARIANT 28: note = Ancestral polymorphism is V, Derived polymorphism is L
  VARIANT 99: note = Ancestral polymorphism is Y, Derived polymorphism is H
MEAPSTLLQLSLSSSSSLGLLLLLLLLVQLPSMASCHEEMKSIYVGQRVLPVRLGRPAFGPESLAFDHRGDGPFTGVSNGRILRWRGAQRGWTEFAHNHKHETVAMCAAKKRLVVPESACGRPLGLQFHRASGDLYYGDAYLGLMRVGRRGGLAEAVATEAGGAPLNFVNAVEVDQETGLVYFTDSSATYQRSGSNVAVYNSVSRN

SEQ ID NO: 16064 - protein, 341 aa, Zea mays
  VARIANT 23: note = Ancestral polymorphism is P, Derived polymorphism is L
MDAGGGGVLAAVLCMLLVFAIFLLLLWRRRSDAATADNHRVPPQPLQEDQVLHGRAAARRMRRRPGAAGAGSSTASTSRNGTTIASCQSPKLCLFFRFPFLLFALTLASVLGCAAVEDDAESDDEEVPEGRNVPRSSKKEKKRQEREMQRQAEEPARDSWRSKQDRYDEMRRKKDEEREAQERQLEEEARARKAKEEAAAALEFEKWKGAFSVDAEGTTESETQDDGQGLLHNFVEYIKKQKCVPLEDLAAEFRMRTQDCINRIVTLESMDRLSGVMDDRGKFIYISTEEMKAVAEYIRKQGRVSISHLANNSNQFIDLEPKAQYEVESQQDDSAEAGTEA

SEQ ID NO: 16065 - protein, 178 aa, Zea mays
  VARIANT 29: note = Ancestral polymorphism is E, Derived polymorphism is K
MSMALSRFTQWLWPGSAAAPVAAHEHPNEGLTSSSFPDFPSGFREPDTVTFYTGRGAGGRRARPRRVRNRRRSRGEPRVDREYDMVIVPSDGGGCLSGSDSDDSDWSIGWLEPQAPELQTDGDPENCFAVLVPCYRHGRQEQQPGRHEGRFLGAGTLTNGGFSDGKNFVEQWLSSLQN

SEQ ID NO: 16066 - protein, 436 aa, Zea mays
  VARIANT 137..436: note = Derived polymorphism lacks residues 137 to 436
  VARIANT 328..436: note = Derived polymorphism lacks residues 328 to 436
  VARIANT 362: note = Ancestral polymorphism is L, Derived polymorphism is H
MDSVRSGPFGQIFRPDNFVFQSGAGNNWAKGHYTEGANNNRNRTRHPRSKSRCSLSKRGEEAGQLSRSASESSSSAGSIGRTPSGRRAGRRGSDVDGDRSSRESFEAQDQKRSMHEISRGERRSWSGQKRKPEPLVEKKSVRAAAEEFFAKASQELIGHSDCRTILLKNVIGHYSEDILRFDMHSVNQLPVPLVPLIGKGVLEEEVMVSFVATNGEPTTTTTSKLVWWNLLEQMTMTPTSCTSVMLSTRTRAPLLRALYKAGSIIVLGKTDFLRPDMSVHRQVIDNGILPILVKIEKKKEKLLSEKMEVIKGLRERFSHCNSNMDANQVQPVLAPEASDPQHSWLDCRLDISKRSPKQLGILQGWFTLHITFSCVLHYLETVGRLYGWKKCPNAPIVMALKQQNEDVKREFNTRLTYGDADSSLDRLWQKKAEIKQ

SEQ ID NO: 16067 - protein, 93 aa, Zea mays
  VARIANT 72: note = Ancestral polymorphism is V, Derived polymorphism is A
MEGRRRRSPCHGSRRRRLGEMALGRKVRELRRLVPGAAAMPAERLLLRTADYIVRLRARVELLRALSELIAVTNHGGIGGGDGHHDGDTTSHP

SEQ ID NO: 16068 - protein, 157 aa, Zea mays
  VARIANT 68: note = Ancestral polymorphism is S, Derived polymorphism is N
MATETGANRLLSYSSSGPRELWPDVSNYVLQVLSRGRRARGDGHDHDPALLMYFLDSGGGSYTEVVSSAQVRWFHTQSQFLNPDGGIPELIFWHIPSTAYTKIEKRLDKLNKSKTKDTQVKVKEQVEKSGLEKIQQALMEGEPTRSVDLPEHEKEAI

SEQ ID NO: 16069 - protein, 198 aa, Zea mays
  VARIANT 155..198: note = Derived polymorphism lacks residues 155 to 198
MVASPSAVRIPSVHTRRVLPLYSCLPARPLSSAILPQRVDPGSATNASAPRHPRRHQGISYRERVDPVNQASPAVNVAHLPPTPNAGLHQTKNAPSPTLLGPHRPSRRANPRCASGGAASRPPCSPPPLWFGPGGVFKVALFVDLHYGEDAWTDWGPAQDAASDRVMAAVLDAENPGVCLHTLSFCFPYPFPPKESKN

SEQ ID NO: 16070 - protein, 677 aa, Zea mays
  VARIANT 312..677: note = Derived polymorphism lacks residues 312 to 677
MAKAVAVTALAAALVVLLLLACCPCRARADESANVTASLVSFLTALAGDDGGQTAIRLRWNASINPCVPGTKASLWSGTVQCFDRGVNDGHIKRIDLDEQGLNGTIDAALLCAAPALRVLNFHNNSLRGGLPAGISACSGLTHLVVSGNRLSGNLPSSLAQSRSLRVIEVSGNNFSGELPGGLGRLNLERFLANDNHFDGTIPDFDLDSIVGLSFDVSNNNLTGPIPKDAVRFGKGRFWPNAAGICGEPLFAPCPSPTPPSSGSEAEDDGKGGDKDKEKKRTVPKIVMYLGYVLLGAAILAFVLYRFCFKKKRSKLGRNSKPSGGRAVYDSSRMTTTTTTTSATPSKTAYSLPTSGEHSTVAAEAGAPSASLVVLRRSGTASITSNAAAAAAKNLRFEDLLKSPAELLGRGRFGSSYKVVVPGGAALAVKRVRDAAVDEDEFRRRMERVGLAKHPAVLPPLAFYCAMQEKLLVYEFQSNGSLTKLLHESSQAPLDWPARLHIAAKVADGMAFMHTTLRGDGGTTNSSSGGPIAHGNLKASNVLFTAGMDPCISEYGVTAPGRDGAAAFRADVRALGVLLLELLTGKATSAQGDGAELARWVTSVIREEWTAEVFDRALLAGTGVGSSEHRMVRLLQVAMQCVDASPGSAPPPTMREVAGMINAIRGDEDDGSVSFGA

SEQ ID NO: 16071 - protein, 212 aa, Zea mays
  VARIANT 10: note = Ancestral polymorphism is S, Derived polymorphism is G
  VARIANT 80: note = Ancestral polymorphism is D, Derived polymorphism is Y
  VARIANT 82..212: note = Derived polymorphism lacks residues 82 to 212
  VARIANT 110: note = Ancestral polymorphism is W, Derived polymorphism is R
MAAQLRYMIGHYFGTPSGKVRGIAPRNVRLAVPNFFSFFPKSFSEEFSSNHVRFFGSGLTGFFVPNEAGGDPRSGLRLEDKGWGLGRTVSLDKVQRTVGHLASNIMSFLWLYFESSFPKCCTMDAVVMLLSSGHTRGKRIIFCFCYCSYFSRIFVCLPFAVAALLLLAFCNSTRERAILMMQTAAGCRKVPPELPEPAFDINFACDGIQHRG

SEQ ID NO: 16072 - protein, 150 aa, Zea mays
  VARIANT 133..150: note = Derived polymorphism lacks residues 133 to 150
  VARIANT 131: note = Ancestral polymorphism is K, Derived polymorphism is M
  VARIANT 129..150: note = Derived polymorphism lacks residues 129 to 150
  VARIANT 128: note = Ancestral polymorphism is S, Derived polymorphism is L
  VARIANT 123..150: note = Derived polymorphism lacks residues 123 to 150
  VARIANT 116: note = Ancestral polymorphism is R, Derived polymorphism is C
  VARIANT 111: note = Ancestral polymorphism is G, Derived polymorphism is R
  VARIANT 82..150: note = Derived polymorphism lacks residues 82 to 150
  VARIANT 56: note = Ancestral polymorphism is S, Derived polymorphism is Y
  VARIANT 53: note = Ancestral polymorphism is S, Derived polymorphism is G
  VARIANT 42: note = Ancestral polymorphism is K, Derived polymorphism is T
  VARIANT 33: note = Ancestral polymorphism is R, Derived polymorphism is T
  VARIANT 27: note = Ancestral polymorphism is K, Derived polymorphism is N
MDAKQTWLFAMEASDIISKAGGLEREKDYRYTRSDGKCKFDKSKIIASIQNFGVVSVDEGQKVANLIKHGPLAIGINAAYMQTYIEGMPCPYICGRHLDHVVLLVGYGAAGFAPIRLKDKPYWIIKNSWGMNWRENGYYKICRVPTFATS

SEQ ID NO: 16073 - protein, 152 aa, Zea mays
  VARIANT 7..152: note = Derived polymorphism lacks residues 7 to 152
  VARIANT 17..152: note = Derived polymorphism lacks residues 17 to 152
  VARIANT 29: note = Ancestral polymorphism is T, Derived polymorphism is K
  VARIANT 33: note = Ancestral polymorphism is D, Derived polymorphism is N
  VARIANT 35: note = Ancestral polymorphism is Y, Derived polymorphism is C
  VARIANT 36: note = Ancestral polymorphism is S, Derived polymorphism is N
  VARIANT 43: note = Ancestral polymorphism is E, Derived polymorphism is Q
  VARIANT 48: note = Ancestral polymorphism is R, Derived polymorphism is K
  VARIANT 82: note = Ancestral polymorphism is A, Derived polymorphism is T
  VARIANT 102: note = Ancestral polymorphism is A, Derived polymorphism is T
  VARIANT 115: note = Ancestral polymorphism is G, Derived polymorphism is R
MLVMEEYHTKVVCMHKQNSKEVPFPGHLTSKSNVCSFRVVLLELMIGRRSMDKSRSAGLPLEVSFMLDLWYEETLLRYYAPALGFLMFAVGVNSSAKDFIEAIKRPDAIAAGYIGQFVKLVTVDDPFITMDYMVSGGSAGSWPGSPSSPRTT

SEQ ID NO: 16074 - protein, 698 aa, Zea mays
  VARIANT 121: note = Ancestral polymorphism is R, Derived polymorphism is L
MPPPPPTGEPKRRRLLSLMAVYPCESIAPAPLFSSLLALAADLASQGLGADAGAFPVLRRGLRQAVRIAGLLLAFLEEVQDVSVTKTAPLPSSAVLGLTELHVAMQKLRLLLTDCARRGARLWVLVNAGLAASELRVILGSVAAAMDALPKDVVDASVEAGELARLMSEHAWRVAVRPDASDERAARSVRSILEQFKSGVSPDAEDARRVLEHIGVRSWTECSEEIAFLEDELRTRLDGAGGDSSSDAVLINSLMAILVYCRVVLFDQTDANPKADAASRPARCPDWLRPEMLQCPIALDLMTDPVTVSTGQTYDRESITRWIKAGCHTCPVTGERLRTADVVPNAALRGIIERMLLSNGVSLPDPSSSGHRHGALGNTAVPFGPAAAGAARLAVAYVVAQLSMGSTAERRKATCEARKLCKHNMFYRACLVEANAVPWLLCLLSSTDASVQDNAVASLLNLSKHPRGRAALFEAGGVGLVVDVINVGARAEARQNAAAVLFYLSSNAEHAEEIGRIPEAIPTLVQLIRDGAHRGRKNAMVSLYGLLQCASNHGKAVGAGAVSALAGLLSGDRDDLASDAVTLLARLAEQPAGAQAVLARPGLVARVVEALATSASRSGKDHCVALLVSLCRHGGDKVVALLGRMPGLMSSLYTLVADGSPQTCKRARALLNLIHRHYEMDGQQPTSEVPGERVVRVL

SEQ ID NO: 16075 - protein, 79 aa, Zea mays
  VARIANT 3: note = Ancestral polymorphism is A, Derived polymorphism is V
  VARIANT 22: note = Ancestral polymorphism is V, Derived polymorphism is I
  VARIANT 43: note = Ancestral polymorphism is P, Derived polymorphism is S
  VARIANT 46..79: note = Derived polymorphism lacks residues 46 to 79
  VARIANT 52: note = Ancestral polymorphism is R, Derived polymorphism is H
  VARIANT 56: note = Ancestral polymorphism is F, Derived polymorphism is I
MEAISNTRLALGILVVDIVVLVGEKVTSKLFLISRSADVRRPSPLWDLLLIHKVCFIAQFGQSIVRADYLILRKGFIMD

SEQ ID NO: 16076 - protein, 492 aa, Zea mays
  VARIANT 20: note = Ancestral polymorphism is A, Derived polymorphism is T
  VARIANT 23: note = Ancestral polymorphism is H, Derived polymorphism is N
  VARIANT 35: note = Ancestral polymorphism is R, Derived polymorphism is C
  VARIANT 229: note = Ancestral polymorphism is G, Derived polymorphism is D
MTTSPVPSQADHVAIFPLMAKGHTMPLLDLACVLRGRGLAAVTFVTTPGNAAFVRAALRQGGAGDAAVLELAYPASSAPAGGEGAEGVASAASFAAFAEATSALRPRFQEALAALRPPASLLVADGFLYWAHASAAALGVPSVSFLGTSAVAHVVREACVRDRPGAGADVGASAGATTCYTVPEFPHLQFSLRDLVPPPPQMIHLDAKMAAAVAASRGLIINTFRQLEGRYIEHWNQHIGPRVWPIGPLCLARQSYSPGGTGSQQRHDAKPSWMQWLDDMAAAGKPAVYVSLGTLASISQAQLKEVSDGLDSAGVNFLWAVRRPDNADDLGTGYEDRVVGRGKVVREWVDQRRVLRHPSIRGFLSHCGWNSVLESVAAGVPLVAWPCDFEQPMNAKFVVDELRIGVRVHTSDGAVGGLVKSEEIATAVKELMFGEAGKAMALRAKGIAAQARLAVSDGGSSWKEVEEMISELRLRGVDMNGKANGGTCASIL

SEQ ID NO: 16077 - protein, 519 aa, Zea mays
  VARIANT 70..519: note = Derived polymorphism lacks residues 70 to 519
  VARIANT 47: note = Ancestral polymorphism is L, Derived polymorphism is P
  VARIANT 31..519: note = Derived polymorphism lacks residues 31 to 519
MDTSNAFAVVTLLLLPLLLALAQLVRRGSPQYPPGPMALPVIGHLHLHLFERPLHRTLACLAARHGTVFQLWFGSRRVIVVSSADAAKECLATLDVAFANRPRLPSGRILSYDWTTMGTSNYGPYWRRVRRITVTHILSVHWVQQFADVHERETRAMVRGLYRPTARNGVRRARVELKSRLFELLMNAMMGMVCAKRYYGCDGKENETEAEVSEEARWFREMVEETMELSGASTVWDFLPAWARWLDVGGVGRRLWRLRESRTKFLQGLIEEQRKEMENGPQPQARKTMIGVLLTLQNEDPDACPDNLIRTMCISSLEAGTSTSADAVEWAMSLLLNNPGALAKAQEEIDACVGQPARLIEAADLPKLQYLWCIIMETLRLYPPTPLLLPHESANDCTVSGFHVPMGTMLLVNTFAIHRDPEIWDRPGSFMPERFLGENSEGKMFNPFGMGRRRCPGENLGTQMVGLALGTMIQCFNWERVGDDLVDMTEGAGLTIPKKVPLEAFYEPRASMANLLSKI

SEQ ID NO: 16078 - protein, 731 aa, Zea mays
  VARIANT 273..731: note = Derived polymorphism lacks residues 273 to 731
  VARIANT 281..731: note = Derived polymorphism lacks residues 281 to 731
MATTLHKPLGAITVDDLAAAAPGSDATALHAALRRALDSHGPTEVWGELCRSVLCPSVPFAVHRMLYYGCFAGFPSPTPPAWTPDPKESVLTNVGRVLEARGRNLIGDAYKDPITSFPDLHKFSNENPEAYWKMVFEDMGIQFSVEPSCIWRENTAYPGGEWLPGAELNAAVNCLTAKPGRSSDGPAIVWRDEGKDSDPLNFMSLEDLRKKSSLVANAIDALELPKGSAIAIDMPMDVNAVVIYLAIVLAGYVVVSIADSFAAPAISMRLKLSEAKAIFTQDYILRDDKELPLYSRVVEAKAPMAIVIPVRGSLLIKGLRVDDLSWQDFLGRVNYTEAENYTAVNQPAYAFTNILFSSGTTENSDSSPYSGEPKAIPWTHITPLKAAADGWCHMDIRKGDVVAWPTNLGWMMGPWLVYASLLNGASMALYNGSPNSSGFAKFVQDAKVTMLGLVPSIVRTWKNTDCTAGLDWSSIRCFSSSGEASSVDDYLWLMGRAGYKPVIEYCGGTEIGGGFVTGSMLQPQALSAFSTPAMGCNLFILDSSGNPLPQDSVGIGELALDPTLFGSSTTLLNADHQEVYFNGMPEWHGKILRRHGDEFERTSDGYYRAHGRADDTMNLGGIKVSSIEIERICNRVHDAILETAAIGVPPVGGGPEQLTIAVVLKDQSSQIEDLNQLKLACNMALKKLNPLFKVSSVVIVPSLPRTASNKVMRRVLRKEFSQAAQAKHSKI

SEQ ID NO: 16079 - protein, 680 aa, Zea mays
  VARIANT 605..680: note = Derived polymorphism lacks residues 605 to 680
  VARIANT 351..680: note = Derived polymorphism lacks residues 351 to 680
  VARIANT 348..680: note = Derived polymorphism lacks residues 348 to 680
  VARIANT 266: note = Ancestral polymorphism is L, Derived polymorphism is P
  VARIANT 66..680: note = Derived polymorphism lacks residues 66 to 680
  VARIANT 29: note = Ancestral polymorphism is D, Derived polymorphism is H
  VARIANT 21..680: note = Derived polymorphism lacks residues 21 to 680
MDEPPCPPPRPALNSAAATSWPELLAPFDLSRLRATLSSHPLTPRRLARLLALPLAPATSLLLLDWYASSHPALSLSSLPLRPILAAADPDRALALLDSLPASRLPPLRESLLLRSLPPGRALHLLDQMPRRFAVSPSFRSYNVVLSTLARADCHADALLLYRRMLRDRVPPTTFTFGVAARALCRLGRAGDALALLRGMARHGCVPDAVLYQTVIHALVAQGGVAEAAMLLDEMLLMGCAADVNTFNDLVLGLCGLGRVREAARLVDRMMTQGCMPSVVTYGFLLQGLCRTRQADEACAMLGRLPEVNVVMLNTVIRGCLTEGKLARATELYEMMGSKGCPPDVHTYSILMHGLCKLGRFGSAVRMLDEMEEKGCAPNIVTYSTLLHSFCRNGMWDDARAMLDQMLAKGFSMNSQGYNGIIYALCKDGKLDQATRLVQEMKSQGCKPDICTYNTMIYHLCNNDLMEEAEHIFRNLIEEGVVANGITYNTLIHALLRNGRWQEGLRLASEMLLHGCQLDVISYNGLIKALCKEGNVDRSMALLEEMVTKGIKPNNFSYNMLINELCKAGKVRDALELSKEMLNQGLTPDIVTYNTLINGLCKVGWTHAALNLLEKLPNENVHPDIVTYNILISWHCKVRLLDDAAMLLDKAISGGIVPNERTWGMMVQNFVRQTVNLEGY

SEQ ID NO: 16080 - protein, 204 aa, Zea mays
  VARIANT 171..204: note = Derived polymorphism lacks residues 171 to 204
  VARIANT 161: note = Ancestral polymorphism is G, Derived polymorphism is S
MAYDGDNKPEYDQDPHRQALVDWVDRVGGAASPATVFDFTTKGILNAAVEGELWRLIDPQGKAPGVIGWWPAKAVTFVDNHDTGSTQAMWPFPSDKVMQGYAYILTHPGNPCIFYDHFFDWGFKDEIAALVAVRKRNGITPTSELTILEHDGDSYVAEIDGKVIVKIGSRYDVGHLIPAGFEVAAHGNDYAVWEKAGAEQVTRA

SEQ ID NO: 16081 - protein, 433 aa, Zea mays
  VARIANT 390: note = Ancestral polymorphism is G, Derived polymorphism is R
  VARIANT 23: note = Ancestral polymorphism is L, Derived polymorphism is Q
MGNRHLCCLCLLLLLGLASGQVLFQAFNWESWKQSGGWYNLLMGKVDDIASAGVTHVWLPPPSHSVSTQGYMPGRLYDLDASKYGTAAELKSLIAAFHGKGVQVVADIVINHRCADYKDARGIYCIFEGGTPDGRLDWGPHMICRDDTIYSDGTANLDTGADFAAAPDIDHLNDRVQRELTDWLLWLKSSDLGFDAWRLDFAKGYSPEVAKVYVDATAPTFAVAEVWNSMAYDGDNKPEYDQDPHRQALVDWVDRVGGAASPATVFDFTTKGILNAAVEGELWRLIDPQGKAPGVIGWWPAKAVTFVDNHDTGSTQAMWPFPSDKVMQGYAYILTHPGNPCIFYDHFFDWGFKDEIAALVAVRKRNGITPTSELTILEHDGDSYVAEIDGKVIVKIGSRYDVGHLIPAGFEVAAHGNDYAVWEKAGAEQVTRA

SEQ ID NO: 16082 - protein, 137 aa, Zea mays
  VARIANT 46: note = Ancestral polymorphism is V, Derived polymorphism is M
  VARIANT 62: note = Ancestral polymorphism is S, Derived polymorphism is L
  VARIANT 67: note = Ancestral polymorphism is G, Derived polymorphism is D
MHDVGPDPSSSVAAGGGGFHHATDGSSPGMGEGSVAGARPVSSLAMVMDPYPTPTPGQYDSSHFFHGHPRYGPMVFSTLGKLEEPFELTFVSNSAVMVKHSFACMYQQLKCKYDIIIVQYRNNYLSYLIVKSKTVLV

SEQ ID NO: 16083 - protein, 653 aa, Zea mays
  VARIANT 259..653: note = Derived polymorphism lacks residues 259 to 653
MGCAPVVWAAVWLLAAAVAGFADPGGLERAFPIVKPDYGHTKLQLAKEGLEAIQRIRTPIAAVSVIGPYRSGKSFLLNQLLSLSCDNGFGVGHMRDTKTKGIWVWGSPVEVDIGGSKVSVLYLDTEGFESVGKSNVYDDRIFALATVLSSVLIYNLPETIREADISRLSFAVEIAEEFYGRFMKYRSISKSCRGALQGQDVAFEPAKLLWLIQRDFLQIVSILQIISFVAVSFLFYKSICLNLSLQGVPTFLKEGKSVQQMVDEALQRVPNNNGDTNIDELNQIRDSLAVMGDNSTAFSLPQPHLQRTKLCDMEDQELDPLYVKKRDQLKEVVASMIKPKIVQGRTLNGTEFVSFLGQIVDALNKGEIPSAGSLVEIFNKAILERCLKVYSEIMGRAGLPVSVDELREFHDLAKDEARRLFNKQHFGKHHAARSILKLDEEIKKVYRNLGQANEYQSSKLCEARFSECEDKMERLQVLKLPSMAKFDAGFLLCNRSFETDCVGPAKESYRHRMSKMLARSRALFIKEYNNKLFNWLAIFSLAMVVVGRFLVKFFLLEVAAWVMFAFLETYTRLFWSSESLYYNPAWHAIVSSWETVVYSPVLDLDRWAFPICAVLLFLAFYWRCLGGRRGIARSLLPLYNGAYYRSSSRTRTD

SEQ ID NO: 16084 - protein, 307 aa, Zea mays
  VARIANT 244: note = Ancestral polymorphism is A, Derived polymorphism is S
  VARIANT 234..307: note = Derived polymorphism lacks residues 234 to 307
  VARIANT 142: note = Ancestral polymorphism is R, Derived polymorphism is G
  VARIANT 66: note = Ancestral polymorphism is V, Derived polymorphism is I
  VARIANT 64: note = Ancestral polymorphism is I, Derived polymorphism is F
  VARIANT 32: note = Ancestral polymorphism is A, Derived polymorphism is V
  VARIANT 23: note = Ancestral polymorphism is G, Derived polymorphism is S
  VARIANT 2: note = Ancestral polymorphism is A, Derived polymorphism is T
  VARIANT 1: note = Ancestral polymorphism is M, Derived polymorphism is T
MAVASNRPATTLLPLAALVAVAGSLFLAGPAAAAGKTGQVTVFWGRNKAEGTLREACDTGTYTIVVISFLNVSAGPGNSPPSLDLSGHPVAGIGADIKHCQSKSIMVFLSLGGRQHSLPSAEAAADLADYLWYAYFPAPAPRAGVRRPFGDAYVDGLDFFLDRGGRPPPDHLDALAARLWSYNRQFRARTPVQLSATPRCAFPPDGPALRLLATGLVTRVNVRLYGDARCAAYWQQEWDKWAAAYPGSGLYVGLPASERTVGYVHPKNLYYGVLPVVQKAPSYAGIMIWDRYADKQTNYSSYAIQWA

SEQ ID NO: 16085 - protein, 331 aa, Zea mays
  VARIANT 131: note = Ancestral polymorphism is R, Derived polymorphism is Q
  VARIANT 13: note = Ancestral polymorphism is D, Derived polymorphism is H
MPGDAYDLLCAEDDAAGSALLCTTDDDDGCCSAVEDDSAAAAAASIAELIGGEAQYSPRPDYPDRLRSRSIDPAARAESVAWILKVQEYYGFLPLTAYLAVNYMDRFLSLHRLPVEGTSRYDCFEPGTVGQMELLVLMALNWRLRSVTPFTFVDFFACKVDPGGRHTRCLIARATQVILAAMHGNIIMHCLCLGLGAAGVNLVLRCSACSSNLQCTNCGTATDVEFLDHCPSSMAAAAVLCAIGETPSLESVSPGAAVSWCIGLAEEGISSCYRLMQRLVIGNVRTRVASTTTITMAAVNLCCSDEALSSHSSATSSPPPAKRRKRSPTAT

SEQ ID NO: 16086 - protein, 1256 aa, Zea mays
  VARIANT 460..1256: note = Derived polymorphism lacks residues 460 to 1256
  VARIANT 547..1256: note = Derived polymorphism lacks residues 547 to 1256
  VARIANT 548..1256: note = Derived polymorphism lacks residues 548 to 1256
  VARIANT 592..1256: note = Derived polymorphism lacks residues 592 to 1256
  VARIANT 640..1256: note = Derived polymorphism lacks residues 640 to 1256
  VARIANT 651..1256: note = Derived polymorphism lacks residues 651 to 1256
  VARIANT 718..1256: note = Derived polymorphism lacks residues 718 to 1256
  VARIANT 741..1256: note = Derived polymorphism lacks residues 741 to 1256
  VARIANT 814..1256: note = Derived polymorphism lacks residues 814 to 1256
  VARIANT 832..1256: note = Derived polymorphism lacks residues 832 to 1256
  VARIANT 886..1256: note = Ancestral polymorphism lacks residues 886 to 1256
  VARIANT 918..1256: note = Derived polymorphism lacks residues 918 to 1256
  VARIANT 919..1256: note = Derived polymorphism lacks residues 919 to 1256
  VARIANT 997: note = Ancestral polymorphism is T, Derived polymorphism is I
  VARIANT 998: note = Ancestral polymorphism is R, Derived polymorphism is I
  VARIANT 1000: note = Ancestral polymorphism is T, Derived polymorphism is N
MDQMGYNVDHTPFTNISNTIITVSFPDDCSTIDFKKLSTQGIAGGDEQVNLDPDDDSDWLHRNETFQANNIVASNDLLTTGCVHESVDNTPNHTMKRVAYFSEWYKNLTPVGRESRRERLRLYNNTPRRKDAKIKYGEKRRALQSDTLNQESIAMEDPTYALEVARHTTDATQPYGSSVTTCDWVILEFVGTPFLPTSTQTEDVGSLTMSTEPLSRKHHVLSGARPTISGSRNQQFEAAISRNVATVAEDTISDVVEGDDWTQPHTTAEIHNNVQCTNPCQGATLATNVSEGMVEQRVEHTHTKPKKSKLIFSRSGGDDEGVIFEEDDDENDGYLFAGQYDEIDEDIEIDGTQDESIDTDLPDPYNKVYSNVPEETHMLKSVPNCGYCNAKKFEYEPPGFCCRGGKVELAPLETPPQLQRLWDSADFDARHFRDNIRIMGHVENLDDYRITLNLDQSLNQKTYNTPLTLEVAAVWIEGSERRGQFSKSVMLHGKDRSSHGIRSYHVCYDALSYPLFFPRGELGWHANIPKIRPGVFNPILQGKRLFQQFTVDTYIKIESSRLDFICKNQDWLRADLYQGLVDTMLDGDIRAEKVGKRTVLSSSFIGGPRDMRRRYMDAMALVRKFGKPDIFLTMTCNPNWDEIRRELLPGQTPKDRPNLVVRVFHAKLQELKYRLTKQDILGKVRAYVYVVEFQKRGLPHAHFLLIMQRKYKLTCPKQYDLLISAEIPDKKYHELRKMVIKHMMHGPCGSLNPNCPCTKGHASCKNHYPRPFCETTLQGKDSYPVYRRRDDGRKEKLHLPNMHMVAFHERQMVQRVVNRPGADRSMLTAYFEANRLHEEARGILYRDFPEWFTWQSGKGKMPSTLRRLFATILVYCEPSDVAVIWWKHLDAMSEDYQRRSESKTHVEQMVLIDIRNMLQSMGKDIKIFPLPPIIDTYDDVIGTAREVYEEESIEPTVADVALKDSLNKEQRVAYDKIMSTVDTNQGGLFFVDGPGGTRKTYLYRVLLATLRSQNKIVVATTTSSVAASIMPGGRTVRSRFKIPLTIDDGADEASMTKRKVVEALDNSMHDIMGRSGLPFGGKTIVFGRDFRQVLPIVRKGSRAQVVASSLRMPYLWESMSHLKLVSSMRAKNDPWFAEFLLRIGGGTEVTNSDGDIHLPDEFKRKLFPICLSFAMTVNKAQGQTIPNVGVYLPESVFSHGQLYVALSRATARSNIKILVIPTVDGKKRSRKGVRKNPTVDCGTYTKNIVYKEVLTN

SEQ ID NO: 16087 - protein, 561 aa, Zea mays
  VARIANT 111: note = Ancestral polymorphism is G, Derived polymorphism is C
MGAARPRRWKLPFHRTVSAVGGGGGAPCSPSSRSSSSPARSEAWAAEAVPEEFLCPISGALMADPVILPSGKTFERACLQACAELAFLPPGVEAGDADTVIPNSALKAAICTWCARSGREVPAPPSAEAARQAVQRAMPPAAAKSVRTTTTRRAVVMAASTSNSSTSSYGSASEITAAEDEAKAKEEAPRRRTVKEAEVEPAAAPPADPLEDDVVGKVMDADDDGVVAAAMGALREATREGEERRRALCTPRLLGALRRVLLLPRHAAARVDAVAALVNLSLEPANKVRIVRAGAVPALVEVLRSGASAPEAREHAAGALFGLALNEDNRAAIGVLGAVPPLLDLLTSPTHAPRARRDAGMALYHLTLAAVNQSKVARFPGAPKALLAVASGAAEPGPIRRLALMVACNVAACAEGRNALMDAGGVASVSGILLSPSHDTTNGGGGTADLEEWCLSAMYAMSRGSLRFRGLALASGADRALRRVVADEGGGVRREIARKTLRAMRSDLDEDGGEYNDLTGSSAECGDGEDCGGSIVSDGLMSFRRRQRELGVSSCGNTAEF

SEQ ID NO: 16088 - protein, 428 aa, Zea mays
  VARIANT 372: note = Ancestral polymorphism is V, Derived polymorphism is G
MAAYLSMGEAQRRIGDYLSRVTNAISCSDAAALASLLSVSSAPASTPLSDALAAIPDFPRLAGDRYPDLADLLVPLLRAIHFHSIQRFADAYSSFEKASNAFLQEFRNWETPWAMEAMHTVALEIRLIAEKADRELATNGKNPDKLQAAGSFLMKVFGTLAVCYRSKDLCSLLNQNLVKGPKRIGALYVTCQLFKIYFRLGTVNLCRSVIRSIETARNFDFEDFPVKDKVTYMYYTGRLEVFNENFLVVSSADQKLTYALMHCNPQSESNLRRILKFLIPVKLSIGVLPKRTLLERYSLLEYADVVTALKRGDLRLLRQALDRHEDQFLKSGVYLVLEKLELQVYQRLVKKIHIIQRQKEPAKAHQIKLDVVVKALKWLEIDMDVDEVECIMACLIYKNLIKGYFAHKSKVLVLSKQDPFPKLNGKPV

SEQ ID NO: 16089 - protein, 355 aa, Zea mays
  VARIANT 173: note = Ancestral polymorphism is D, Derived polymorphism is Y
MVNLVHVAKKQLVQRLAKMAGLRQRAVDVDDAGTVISIWVPKDKLPAGPTAEEMETERRKKETKRNGGRLSVVLLHGFAGDGILTWVLQVVALARHYDVYVPDLLFFGGSVSPAGADQTPGFQAECVASALRRLGVERCVAVGFSYGGFVAFKMAEADPALVVSVVATGSLVYMTRSTSEAMLRRLGAASFAEFLLPNDVAGLKSLFAAGTYRKWWLPDRVLSDYMKLMIFNRKERTQLLEGLVVSDEDAAVVVRSYRQWPRFLTLPVRIAGDTLALGRQRQHLQHGACEKPQRAARREGDAAKHSKGGPLGDAGAAARLQRLSQRVPVAAVTLMHHHDDGRGAAYAQACYLAKI

SEQ ID NO: 16090 - protein, 308 aa, Zea mays
  VARIANT 90: note = Ancestral polymorphism is G, Derived polymorphism is D
  VARIANT 208: note = Ancestral polymorphism is Y, Derived polymorphism is H
  VARIANT 225: note = Ancestral polymorphism is I, Derived polymorphism is T
MAALGGRRRRASSAALQLALFAVALVSLAGPATAAGNKTGQVTVFWGRNKAEGTLREACDSGLYTMVIMSFLDVYGPQRGGYQYHLDLSGHPTAGIGDDIKHCQFVGVPVTLSVGGFGSGYSLPSTQAALDLFDYLWNAFLGGSKPGVRRPFGDAWLDGVDLFLERGSPADRYDVLALELAKHNIRGGPGKPLHLTATPRCGFPPAGYLRRALDTGIFERVHVRIYDDADCEARWHLAWDEWTAAYPATRFYVGLTASEMTHGWVHPKNVYYDVAPSAQKADNYGGFMIWDRYYDKLSNYTSMVKDYA

SEQ ID NO: 16091 - protein, 143 aa, Zea mays
  VARIANT 67: note = Ancestral polymorphism is R, Derived polymorphism is L
MEEDGGSGSDSMEFVAGAETSAGAGTNAGRNRGVGAGTSVGGGGGTKLPHVLQKSFGEVQGILEHNRVLIQEISQNQETRDADGLSRNVALIRELNTNIARVVDLYGDMSGSFARAVAAKKDAAGDKSGPKRPRSAGAGGQQQ

SEQ ID NO: 16092 - protein, 564 aa, Zea mays
  VARIANT 352..564: note = Derived polymorphism lacks residues 352 to 564
  VARIANT 399..564: note = Derived polymorphism lacks residues 399 to 564
MAASSPRKRLPAARLIFALLLMSSVLPRDAGAVELGLKLPFSPGDVLPVLPRQVAWPVMNTLHSAVDLLPSFVAAVAPGAPAPAAWKGACFSENEAAIELTPGDRNGTDVGGAVLRLKTASAHSWACMDLYVFATPYRITWDYYFAAREHTLEIKSWEEEAELKYVKEHGISIFLMPSGMLGTLLSLIDVLPLFSNTAWGQHSNLAFLEKHMGASFEKRTQPWVANIRKEDIQSGDFLALSKIRGRWGGFETLEKWVTGAFAGHTSVCLKDEKGDLWVAESGYENEKGEEIIAIVPWDEWWAMALKDESNPQIALLPLHPDVRARFNESAAWEYARSMVGNPYGYHNMIFSWIDTIGDNYPPPLDANLVMAVMSMWTRLQPVYAANMWNEALNKRLGTEVVDYWQLNGDVSAIFSVSTSGSCREWEKDFDLQGIIMEIERRGMSFDQLLTIPEQDEWVYSDGKSTTCVAFILAMYKEAGIFTPFSESIQVTEFTIRDAYMLKIFEDNPARLPGWCNAGTDKLPFCQILGEYRMELPEYNTIEPYAKMNENCPSLPPTYKRPARC

SEQ ID NO: 16093 - protein, 539 aa, Zea mays
  VARIANT 269: note = Ancestral polymorphism is W, Derived polymorphism is R
  VARIANT 163..539: note = Derived polymorphism lacks residues 163 to 539
MSRGRARRPVPGSGTRAGALEVLLLLASAVLLAACPAAAVEAEAGDEEAVDYGAALSKSLLYFEAQRSGRLPHNQRVPWRGHSGLTDGLQQGVDLVGGYYDAGDHVKFGLPMAFTVTMLSWGAIDFADDVAAAGEWGHALEAIKWGTDYFVKAHTEPFVYWAEVGDGDTDHYCWQRPEDMTTSRQAYRIDKDSPGSDLAGETAAALAAASIVFRRSNPHYSHLLLHHAQQLFEFGDRYRGTYDSSIEEVRSYYASVSGYRDELLWAALWLHRATGRDEYLRYAVDKADSFGGVGWAMTEFSWDVKYAGVQVLAAKLLLEGDPGAQEHGAVLEKYKAKAEHYLCACLGRNGGNGSDDVERSPGGMLYVRQWNNLQYVSSAAFLLTAYSRYLGGGLLRCPAGAPAAPSDLLALARSQADYILGRNPLRLSYMVGYGRRYPVRVHHRGASIVAHKANSRFIGCMQGFDDWFGRGRPNPNVLAGAIVGGPNSRDEFRDERENYMQTEACTYNTAPMVAVFARLHRLARDGGPAGGVPERNDAR

SEQ ID NO: 16094 - protein, 316 aa, Zea mays
  VARIANT 98: note = Ancestral polymorphism is G, Derived polymorphism is V
  VARIANT 232: note = Ancestral polymorphism is A, Derived polymorphism is T
MASLTLPPAPPNPRQDAIDLQKAFKGFGCDSTTVINILTHRDSVQRGLIQQEYRAMYHEELSHRISSELNGNHKKAMLLWILDPAGRDATVLREALSVDTMDLRAATDIICSRTPSQLQIMKQTYYARFGTYLEHDIGHHTSGDHQKLLLAYVGIPRYEGPEVDPTIVTHDAKDLYKAGEKRLGTDEKTFIRVFTERSWAHLASVSSAYHHMYDRKLEKVIKSETSGNFEFALLAILRCAENPAKYFAKLLRKAMKGLGTDDKTLIRVVVTRTEIDMQYIKAEYFKKYKKPLAEAIHSETSGNYRTFLLSLVGPGH

SEQ ID NO: 16095 - protein, 192 aa, Zea mays
  VARIANT 119: note = Ancestral polymorphism is H, Derived polymorphism is Y
MIFALVYCTAGVSGRPHQPGRHVRPPPRRKLSLTRAVYYVVMQCLGAVCGAGVVKAFGSALYESAGRRRQRRQPRVHQGRRPRRRGRGHVRARVHRLLRHRRQAHRQGLPRPRAGPAAHRLRRIPGAPRHHPHHRHRHHPARSLGAAIIYDNPHGWHGHWIFWVGPFAGAALAAVYHQVVLRAIPFKSSAHY

SEQ ID NO: 16096 - protein, 275 aa, Zea mays
  VARIANT 199..275: note = Derived polymorphism lacks residues 199 to 275
  VARIANT 145: note = Ancestral polymorphism is C, Derived polymorphism is Y
  VARIANT 138: note = Ancestral polymorphism is D, Derived polymorphism is H
  VARIANT 126..275: note = Derived polymorphism lacks residues 126 to 275
MNPIPSSSTRESSSSNFQVPDFTDGLQTSPTDSRNLDFFVGMSSSSGEFGRRRQDNVEVIFLESQVVGSSNPSSVADNTVLASASSASAAADSAALVDKAIAKLSADVRAHATDSKRKAKSQDPGWKFGWWPNPTKKDFIRCIFCLKVVPSGIKRFKQHLAGGFSDTTKMFNGSRSSFEGHVCLFEKEHKAWDFVESEEGGQEDGDATEPEQKVHEPSSGTKHKQAKKKATQAAISSFVVSAHPTQNQKSGNSVAAMFCKTPEEVVADRHKNKTT

SEQ ID NO: 16097 - protein, 354 aa, Zea mays
  VARIANT 11: note = Ancestral polymorphism is P, Derived polymorphism is S
MAMEEDDDYEPPLMATYKHLLDSHPHRQLGAGAAQDDEDCFLLPVIDLSSLLPPVHHRKQSSSAAAAEQCRASIVRAASEWGFFQVTNHGVPQVLLDELHQAQAGVFRRPFQLKAHQPLLDFSPESYRWGTPTATCLEQLSWSEAYHIPTTTTTTGNDDKTRLVVEEVSTAMSKLAQRLAGILVAELGEDSAAAVVSRCTRSTCFLRLNRYPPCAAAASGVVYGLCPHSDSDFLTILHQDGVGGLQLVKDGQWVAVKPSPGALIVNVGDLLQAWSNDRYRSVEHRVMASATRERFSAAFFLCPSYDTLIRPRCGAGGPPPRYESFTFGEYRNQIREDVRLTGRKLGLQRFRKAE

SEQ ID NO: 16098 - protein, 253 aa, Zea mays
  VARIANT 184: note = Ancestral polymorphism is G, Derived polymorphism is V
  VARIANT 71: note = Ancestral polymorphism is R, Derived polymorphism is M
  VARIANT 44..253: note = Derived polymorphism lacks residues 44 to 253
  VARIANT 5: note = Ancestral polymorphism is A, Derived polymorphism is T
MSMVAKMLQGPFGGPGCQNQEHEKHFEHFTPNMSKARNESAFPQDEIDSHREHFYNELTSDSIASKKPKIRKRENNNSVSSSAPNIPNTQDFITTFCEVVEDFCGKPKFLKMEIAVTVSMNKVEALYRLFKKIGNTFIDDGLINKALSNGKPTVVEFYANCGIEAKQPNSAIRKCARVQLVKDGKKIAAFVPNDGCLNYIEENDEVLIVGFGRNSSVWKKHSPLFTNYVDFLTKCPSIQIHRKYSTGGSTEKM

SEQ ID NO: 16099 - protein, 160 aa, Zea mays
  VARIANT 16: note = Ancestral polymorphism is P, Derived polymorphism is Q
  VARIANT 31: note = Ancestral polymorphism is S, Derived polymorphism is L
  VARIANT 33: note = Ancestral polymorphism is G, Derived polymorphism is D
  VARIANT 34: note = Ancestral polymorphism is H, Derived polymorphism is R
  VARIANT 41: note = Ancestral polymorphism is G, Derived polymorphism is V
  VARIANT 60: note = Ancestral polymorphism is V, Derived polymorphism is M
  VARIANT 72: note = Ancestral polymorphism is V, Derived polymorphism is M
  VARIANT 75: note = Ancestral polymorphism is V, Derived polymorphism is M
  VARIANT 76: note = Ancestral polymorphism is P, Derived polymorphism is S
  VARIANT 77: note = Ancestral polymorphism is G, Derived polymorphism is D
  VARIANT 85: note = Ancestral polymorphism is V, Derived polymorphism is M
  VARIANT 125: note = Ancestral polymorphism is A, Derived polymorphism is V
  VARIANT 134: note = Ancestral polymorphism is R, Derived polymorphism is W
MTELFDTAVTSLLHLPEVLDRLAAADGDRRSAGHHAAHGHGHGRIHGLGGGGGGGGGAPMDIVESPREYAFVLDVPGLSKSDIQVTLEEDRMLVMKGGSGKRKRDEEEDMNGEGCRYIRLERGAAPRSFVRKFWLPEDFVGKVDNWWGVAALLWRVRLLG

SEQ ID NO: 16100 - protein, 105 aa, Zea mays
  VARIANT 93..105: note = Derived polymorphism lacks residues 93 to 105
  VARIANT 76: note = Ancestral polymorphism is E, Derived polymorphism is K
  VARIANT 75: note = Ancestral polymorphism is A, Derived polymorphism is V
  VARIANT 68: note = Ancestral polymorphism is Y, Derived polymorphism is H
  VARIANT 48: note = Ancestral polymorphism is G, Derived polymorphism is R
  VARIANT 44: note = Ancestral polymorphism is T, Derived polymorphism is I
  VARIANT 42..105: note = Derived polymorphism lacks residues 42 to 105
  VARIANT 9: note = Ancestral polymorphism is R, Derived polymorphism is L
MTASLPTRRARSEACDGSNGTAPILGLCSRDRTRSSPNGRTWRTIRSRTGVSAVSCRSPGGLLSATGYTKYYFGAESGKMCRYWKLICTCVQRSYKGLTSIQAYL

SEQ ID NO: 16101 - protein, 342 aa, Zea mays
  VARIANT 256: note = Ancestral polymorphism is S, Derived polymorphism is L
  VARIANT 112: note = Ancestral polymorphism is G, Derived polymorphism is D
  VARIANT 9: note = Ancestral polymorphism is L, Derived polymorphism is M
MASSASCTLLLPTLSLAVILLALCARGGEARPPPPLHGVRPLAFDEGYTQIFGSANLALLRDGRRVRLTLDESTGAGFASQDVFLHGFFSAAIKLPADYAAGVVVAFYLSNGDVYEKTHDELDFEFLGNVRGREWRVQTNVYGNGSTDAGREERYDLPFDPTDDFHHYSILWTSDRIIFYVDETPIREVVRTAAMGAAFPSKPMSLYATIWDGSAWATLGGRYRVNYKYAPFVAEFADLAIQGCAVDPAADHAVASCGAGLGLAPLAVSAEQRSAMAAFRRAHTSYSYCHDRRRYPVALSECGAGAGLLPGRMFGPDGMKQHRRHRGAARGHRGGAQDDDVM

SEQ ID NO: 16102 - protein, 469 aa, Zea mays
  VARIANT 252: note = Ancestral polymorphism is P, Derived polymorphism is S
MKGGCLHRLLVHKLCFGLSILTVPIIVLLLEGAPVLTIFSPTPGQLKVLSQGFLHQQEQEHLGDDGATLAGSPGPASRSRSQKSRGKVMKSNFFCACLFSNQTICDSVVESCLHIKAPFICFCIIEDCNYAKGKWIEDDKRPLYSGNECKQWLSKMWACRMMRRTHFSYENYRWQPHDCEMPEFTGPKFLKRMRNRTLAFVGDSLGRQQFQSMMCIATGGKYSPEVEDVGWKYGLVKAPGALRPDGWAYRFSSTNTTILFYWSATLSELEPLNTEHTVTRYALHLDRPVTFLKEYLNDFDVLVLNTGHHWNRGKFNGNHWELHADGKPVGNGSRLADLNRAKNLTLYSIARWMDSELTRHPKMKVFLRTISPRHFVNGDWNTGGTCGNTVPFTNGSEVLQDHSIDIPAENAVKGTRVKLLDITAISKLRDEGHISNSSFKKASTGINDCLHWCLPGIPDMWNELLFVQI

SEQ ID NO: 16103 - protein, 231 aa, Zea mays
  VARIANT 169: note = Ancestral polymorphism is V, Derived polymorphism is M
MAGGKEAHGWAARDVSGHLSPYHFSRRVQRDDDVTIKVLFCGLCHTDLHVIKNEFGNAKYPVVPGHEIVGVVTDVGSGVTSFKPGDTVGVGYFVDSCRSCDSCSKGRDPEQMRAAAGTLDGVIDTVSADHPVVPLLDLLKPMGQMVVVGLPTKPLQVPAFSLVAGGKRVAGSAGGGVGECQAMLDFAGEHGITADVEVVGMDYVNTAIQRLERNDVRYRFVVDVAGSKIGG

SEQ ID NO: 16104 - protein, 641 aa, Zea mays
  VARIANT 343..641: note = Derived polymorphism lacks residues 343 to 641
  VARIANT 60: note = Ancestral polymorphism is W, Derived polymorphism is R
MRWAPGRAAYVLLAAALWCASLTPRAAPDLAADRAALLAFRDAVGQRLPWDAAAASPCGWRGVRCDPAASRVTALQLPGASLVGAVPLGTIGNLTALRTLSLRLNALSGGIPADIGSCTELRHLYLQGNQLDGQVPEGFFDLGLLQRLDLSNNRIAGGVSPGFNRLQRLATLYLENNSLNGTLPSNLDLPKLQLFNVSRNNLTGPVPKSLARMPASAFDGTGLCGNPLAPCPTPPPPPSVPAAANGSISAKLSTGAIAGIAAGAAVAFLVLIAVILFLCFRCQRTMAEKSAETAADADLDGSPVSVTVASMDMKNATRRSSQATAGNSDKKLVFLGAAPDAPYDLESLLHASAEVIGKGWLGTTYRATLEGGATTVAVKRLRAAPIPEREFRDKVIALGALRHENLVPVRAYFYSREEKLIVYDFVGGGSLCSLLHGGSPERLDFEARARIALAAARGVAFIHGAGPRSCHGNIKSSNVLVADARDGAYVTDHGILRLVGAHVPLKRVTGYRAPEVTDPRRASQETDTYSFGVLLLEALTGKPPVNSVPGSTGGVELPLWVRTVVQEEWTAEVFDASIAVEERVEEEMVRLLQLAVECTDDRPDRRPRMAEVVARIEVIVRSAELKAKADTEDDDFHSISP

SEQ ID NO: 16105 - protein, 277 aa, Zea mays
  VARIANT 45..277: note = Derived polymorphism lacks residues 45 to 277
  VARIANT 97: note = Ancestral polymorphism is P, Derived polymorphism is Q
MGRQPCCDKVGLKKGPWTAEEDQKLVTFLLINGQCCWRAVPKLAGLLRCGKSCRLRWTNYLRPDLKRGLLSEEEERTVIDLHAQLGNRWSKIASHLPGRTDNEIKNHWNTHIKKKLKKMGIDPVTHKPLHQPAPPPPLEEPAGSSGEEKQIVTAITSGYDDASFCTDDVPMALLLDDIDIVLPGDDVVSAQAAACFGTVYSPESSSSSSSSNSASAAASSGGTSSVDGEWLDWPPMMDWPEPMWQLEDVVTARKPWEFEDPFVTYQRIALFEHQETL

SEQ ID NO: 16106 - protein, 137 aa, Zea mays
  VARIANT 7: note = Ancestral polymorphism is G, Derived polymorphism is E
  VARIANT 29: note = Ancestral polymorphism is R, Derived polymorphism is I
  VARIANT 69: note = Ancestral polymorphism is R, Derived polymorphism is W
MEEGFIGARRRSCNGYQRLRAPPPPTPGIGTCRLGRRAVLGSGGWRFVRLRRCRASAPRWSSTLQLLSRILDTYITSMLSQPLNMPPPKLRRDASPGTGSSRRRDAGESGRCVLLAEAAPENATTEGGGGDSSSRKA

SEQ ID NO: 16107 - protein, 300 aa, Zea mays
  VARIANT 214: note = Ancestral polymorphism is P, Derived polymorphism is R
MGRQPCCDKVGLKKGPWSAEEDEKLVTFLLTNGQCCWRAVPKLAGLLRCGKSCRLRWTNYLRPDLKRGLLSSEEETTVIDLHAQLGNRWSKIASHLPGRTDNEIKNHWNTHIKKKLRKMGIDPATHKPLHPQPAAPPPTQQEQDTGGSPEEEGEKADAVMMAAATPIIGHETAPFFTDEEEMLAHLLDDIDDFPPAAYSPDDSSSPSSSSSASRSSHSASVVTAPSSSGAGGSSVADGERPLQMVEWPESMWLDDDVVPGLATTPWEFEDDNPFLAYQRNNALFDHQLEAWNNDGRVELF

SEQ ID NO: 16108 - protein, 202 aa, Zea mays
  VARIANT 22: note = Ancestral polymorphism is S, Derived polymorphism is R
MELDADNLSATELRLGLPGTSSSSSDDWQKKPSPSVGAKRALDDGTKSEASGTSPAARDLDFDHDHDTAAPPKAQVVGWPPVRAYRKNTFQAAAAAKKVEQKQKQQQQGGLYVKVSMDGAPYLRKVDLRMYKGYRELREALDALFTNSFSAAAEGGGDHHQHAIAYEDKDGDLMLAGDVPWDMFISSCKKLRIMKGSASEAR

SEQ ID NO: 16109 - protein, 232 aa, Zea mays
  VARIANT 73: note = Ancestral polymorphism is V, Derived polymorphism is L
MGNALAGRRRAAKVMTVDGATFRYKTPAAACAALRGHPGHQLLESEEVRRLGVRARPLDRDAPLKPGKLYFLVQIPRGGAGDGDDPRAPRKTWSGALRVGARERLEGLMLSRRTVSDVSSILPPPAAARLAAASPSPSPPSSVEVGADGAVRLRMRLPKADVARLMQESRDPAEAAERIMQLCVARDQGVVAAPPPSALMSGKNPAPAAAPAPALKKEKRTRFKAVPDEIIG

SEQ ID NO: 16110 - protein, 527 aa, Zea mays
  VARIANT 236: note = Ancestral polymorphism is R, Derived polymorphism is H
  VARIANT 70: note = Ancestral polymorphism is D, Derived polymorphism is V
MAFVTLMALASPVLLLLLRAAWVALSCYILTPLRIRRIMARQGVHGPPPRPLIGNLRDVSALMAQATADDMPALSHDIVGRLMPHYVLWSRTYGKLFVYWYGSEPRLCLTDAAQIKEFLSSKYAANATGKSWLQRQGTRHFIGRGVLMANGAHWSHQRHVVAPAFMPDKLKGRVGHMVECTKQTIRALQDAASAPSSGGGRRREVEICGYMTRLTGDIISRTEFDTSYDTGKLIFHLLEDLQRLTASSSRHLWIPGSQYFPSKYRREIRRLNGELEAVLTESIGRRREIADEGRTTSAYGRGLLAMLLAEMEKKKDVAAAERFSYDLQLVIDECKTFFFAGHDTSALLLTWALMLLATHPEWQDRARAEVARVCGEDPPSYDDLSKLTVLQMIIHETLRLYPPATLLPRMVFEDIHLTGGLHLPRGLSVWIPVLAIHHDVSIWGPDAHEFKPERFAAGRRPAFLPFAAGPRNCVGQAYALVEAKVVLAMLLSHFRIAISDDYRHAPVNVLTLRPKHGVPVHLRPLRP

SEQ ID NO: 16111 - protein, 457 aa, Zea mays
  VARIANT 35..457: note = Derived polymorphism lacks residues 35 to 457
  VARIANT 284: note = Ancestral polymorphism is S, Derived polymorphism is L
  VARIANT 289: note = Ancestral polymorphism is R, Derived polymorphism is Q
MKVSVKTLKGSSFHIEVDPTDKVADVKKVIESIQEQASYPADQQVLIHQGKVLKDDTTLEENQVVENNFLVIMLRQVGYLFIILVDTWAHDKSRVYDLKCSIYLINCNLSQNKGSSSAAPAKVTANQAPSTQTVPATPPQTSAAPDAPAPIVPVSAPAATATASAAPAVAVSTEADSYGQATSNLVAGSNLEGTIKSILEMGGGTWDRDTVLRALRAAYNNPERAVEYLYSVRMILCPRYFLGLTCDELSAIYVCPDTNVLHLLFRGFLNKWRFLHRLRVPNQSTLFRRYNQLKLDQMLTLSTSFPNLFRMIPLMPTQEILMFCVITHSSKTYLVWFRLTLKFCRSPLLQELRKQNPRVMQLIQENQAEFMRLISEPLEGDEENEMMLDQMADATETIAVTPEENEAILRLEGMGFDRALVLEVFFACNKNEQLAANYLLDHMHEFDNDDGLGGPPL

SEQ ID NO: 16112 - protein, 91 aa, Zea mays
  VARIANT 11: note = Ancestral polymorphism is L, Derived polymorphism is V
  VARIANT 16: note = Ancestral polymorphism is D, Derived polymorphism is Y
  VARIANT 18: note = Ancestral polymorphism is N, Derived polymorphism is D
  VARIANT 30: note = Ancestral polymorphism is Q, Derived polymorphism is H
MDYRQSYCMTLRMNIDCNGCYQRIRRALLQMRELEKHLIDKKHGRVVVWGAFSPQDVAIKIRKRTNRRVEILDLSEASPAAPEGGPDGHMS

SEQ ID NO: 16113 - protein, 454 aa, Zea mays
  VARIANT 312: note = Ancestral polymorphism is S, Derived polymorphism is F
MASLIPPCLSVPTAPGRARLAAPGAPRRRRMAVVRAKIREIFMPALSSTMMEGKIVSWTAAEGDRVGKGDPVVVVESDKADMDVETFHDGIVAVVLVPAGGTAPVGAPIALLAESEEEVALARARAQALSQGQSQAPSPPHAAAALGPPPPAPVAPPATKGIATPYAKKLAKQHRVDIAGVVGTGPHGRVTAADVEAAAGIKHKRPPPPPPPASVDAAPLVPASAVLPPVPGGTVVPFTTMQAAVSKNMVESLRVPTFRVSYSMITDKLDALYEKVKSKGVTKTVLLVKAAAVALTQHPVVNASCRDGKSFSYNNDVNIGVAVALEGGLLTPVLEDADKMDIYLLARKWRVLLKKARMKQLQPNEYNSGTFTLSNLGMFGVDKFDAILPAGQGAIMAVGASRPTVVADKDGFFSIKSEMLVNVTADHRIIYGADLAAFLQTFAKIVEDPECLTL

SEQ ID NO: 16114 - protein, 269 aa, Zea mays
  VARIANT 4: note = Ancestral polymorphism is Y, Derived polymorphism is D
  VARIANT 26: note = Ancestral polymorphism is E, Derived polymorphism is D
  VARIANT 31: note = Ancestral polymorphism is A, Derived polymorphism is T
  VARIANT 38: note = Ancestral polymorphism is G, Derived polymorphism is D
  VARIANT 43: note = Ancestral polymorphism is D, Derived polymorphism is A
  VARIANT 67: note = Ancestral polymorphism is D, Derived polymorphism is N
  VARIANT 127: note = Ancestral polymorphism is P, Derived polymorphism is L
  VARIANT 139: note = Ancestral polymorphism is F, Derived polymorphism is S
  VARIANT 149: note = Ancestral polymorphism is G, Derived polymorphism is D
  VARIANT 153: note = Ancestral polymorphism is L, Derived polymorphism is P
  VARIANT 181: note = Ancestral polymorphism is L, Derived polymorphism is S
  VARIANT 215..269: note = Derived polymorphism lacks residues 215 to 269
  VARIANT 221: note = Ancestral polymorphism is A, Derived polymorphism is V
  VARIANT 222: note = Ancestral polymorphism is A, Derived polymorphism is V
MSRYDIKSILDSSALPFGDTAKHLKETEAAASARDHTGVLSYDIGGDAHSAVSMIEAYLRANKMFVDKHEPETERVFSSYLELDLSEVEPCVSGPKRPRDRVPLKEMKSDWHACLDNEVGFKGYAVPKEQQGKVVKFDFHGRPAEIKHGSVVLAAICSSTNTSNPSVMIGAGLVAKKACELGLEVKPWVKTSLTPGSVVATEYLKHSGLQDYLNQQGFHVAAHGCATCVGNSGDLDGSISVAITENDIVAATVLSANRNFEGRVNPHSG

SEQ ID NO: 16115 - protein, 489 aa, Zea mays
  VARIANT 267: note = Ancestral polymorphism is G, Derived polymorphism is S
  VARIANT 221: note = Ancestral polymorphism is G, Derived polymorphism is R
MATLYQHHLLPLQRLPNSPRRPPPRLRLPTKPSRHHNRQLRPRAAASTTATVSAMEDFRRWLASHGAGDGGKAIPAAVPEGLGLVAARDLPRGEVVAEVPKKLWMDADAVAASDIGRACGGGGGLRPWVAVALLLLSEVARGADSPWAPYLAILPRQTDSTIFWSEEELLEIQGTQLLSTTVGVKEYVQSEFDSVQAEIISTNKDLFPGSITFDDFLWAFGMLRSRVFPELRGDKLALIPFADLVNHSPNITSEGSSWEIKGKGLFGRELMFSLRTPVNVKSGQQIYIQYDLDKSNAELALDYGFVESNPSRDSFTVTLEISESDPFYGDKLDIAEANGLGETAYFDVILNEPLPPQMLPYLRLLCIGGTDAFLLEALFRNSVWGHLELPLSPDNEESICQAMRDACKSALADYHTTIEEDEELSGRENLQPRLAIAIGVRAGEKKVLQHIDGIFKQREEELDGLEYYQERRLKDLGLVSDNGEIIFWE

SEQ ID NO: 16116 - protein, 325 aa, Zea mays
  VARIANT 120: note = Ancestral polymorphism is S, Derived polymorphism is N
  VARIANT 156: note = Ancestral polymorphism is G, Derived polymorphism is R
  VARIANT 204: note = Ancestral polymorphism is G, Derived polymorphism is D
  VARIANT 298..325: note = Derived polymorphism lacks residues 298 to 325
  VARIANT 300..325: note = Derived polymorphism lacks residues 300 to 325
MAGKGAKATAAKSADKDKGKKTDGPVSRSSRAAPQTTTVDFKPYVGPIYNAILGRLVNQDQDQEVKECAISCMSLVVSTFGDGLERELPACLPILVDRMGEDFDQRIMEYFIKLIKKKYSKDNRALGKLRREAKRAKRALSNQHQVRVEIESLFDGTDFSEPLTRARFEELNNDLFRKTMGPVKKAMEDAGLEKSQIHEIVLVGGSTRIPKVQQLLKDYFNGKEPNKGVNPDEAVAFGAAVQGSILSGEGGDETKDILLLDVAPLTLGIETVGGVMTKLIPRNTVIPTKKSQVFTTYQDQQTTVSIQVRTRILPLSSLHCQLLAW

SEQ ID NO: 16117 - protein, 521 aa, Zea mays
  VARIANT 358: note = Ancestral polymorphism is C, Derived polymorphism is S
  VARIANT 305: note = Ancestral polymorphism is H, Derived polymorphism is Y
MRRASPSLSPARGPAVFAAAVVVFLPVLFPGLFSPLGHAFPSVFSEWNAPKPMHPSLLNEALRWTATDGQKKDLWSPLPYQGWKPCLTPSVSHKLPLEPSGYIQVFLDGGLNQQRMGICDAIAVAKILNATLVIPHLEVNPVWKDSSSFEEIFDVDHFINSLKDEVSIIKVLPKEFSWSTREYYGTGIRATRIKTAPLHASANWYLENVSPILQSNLISCCSTASYGIVAIAPFSHRLAFDDLPVDLQRLRCKVNFQALVFRSHIISLGETLVKRLRSPVRVHSSKSIHQVVGDTNQAEKYAVLHLRFDKDMAAHSACDFGGGRAEQLALAKYRQVIWQGRVLNSQLTDEELRNTGRCPLTPEEIGLLLVALGFDNRTRLYLASHKVYGGEARISSLRKLFPLMEDKRSLASEDELANVEGKASVLAALDYYISMHSDIFISASPGNMHNALVAHRSYENLKTIRPNMALLGRTFANKSMEWPEFQQVVQAGHKGRYGQIRLRKATQSIYTYPAPDCMCQG

SEQ ID NO: 16118 - protein, 81 aa, Zea mays
  VARIANT 24: note = Ancestral polymorphism is L, Derived polymorphism is Q
MAQQRLLALLLVAALLVLSCSQGLVEARKVQVRRAPLGGGRLLPEAMMAYTTTDYGPPTANTNTHGGMVPSPDDPSSPPTH

SEQ ID NO: 16119 - protein, 339 aa, Zea mays
  VARIANT 15: note = Ancestral polymorphism is S, Derived polymorphism is R
MKKSSMMAPMTIMARVAAVLVLSSAAMASAAGAAGLDMNFYGSTCPRVEAIVKEEMVAILKAAPTLAGPLLRLHFHDCFVRGCDASVLLDSTPTSTAEKDATPNLTLRGFGSVQRVKDRLEEACPGTVSCADVLALMARDAVVLANGPSWPVALGRRDGRVSLANETNQLPPPTANFTRLVSMFAAKGLSVRDLVVLSGGHTLGTAHCNLFSDRLYNFTGANSLADVDPALDAAYLARLRSRCRSLADNTTLNEMDPGSFLSFDSSYYSLVARRRGLFHSDAALLTDPATRAYVQRQATGLFTAEFFRDFADSMVKMSTIDVLTGQQQGEIRKKCNLVN

SEQ ID NO: 16120 - protein, 394 aa, Zea mays
  VARIANT 34: note = Ancestral polymorphism is R, Derived polymorphism is W
  VARIANT 64: note = Ancestral polymorphism is A, Derived polymorphism is S
  VARIANT 66: note = Ancestral polymorphism is T, Derived polymorphism is S
  VARIANT 87: note = Ancestral polymorphism is P, Derived polymorphism is R
  VARIANT 110: note = Ancestral polymorphism is G, Derived polymorphism is E
  VARIANT 121: note = Ancestral polymorphism is V, Derived polymorphism is D
  VARIANT 166..394: note = Derived polymorphism lacks residues 166 to 394
MDDDRADTNKPDEVLLPGFRFHPTDEELISFYLRRKIQQRPLSVELIRQLDIYKYDPWDLPKLSSSGEKEWYFYCPRDRKYRNSARPNRVTGAGFWKATGTDRPVYSSEGAKCIGLKKSLVFYKGRAAKGIKTDWMMHEYRLPSLGDPSRPNKTPKDKNIPADDAWAICRVFKKPNSVAQRVLSRSWGPASIATADPELLPALQSIQASRFALETSTCSANRFNSQQQQNLSSSQDGSSCKVITFNRSPYLPSEKDIHSSSVVILPLEIQSQQKSSDVTSALLSMAPGILSSANEAIPNTEFGLLGPSNGYPIDWATDTSGGIVNSDDDPYKRKSGNGYSSGYECGIPRKIKFPFNLGVGSPDDWASNMPCDSLPCSPPSEETSNSNSTEKYYA

SEQ ID NO: 16121 - protein, 203 aa, Zea mays
  VARIANT 15..203: note = Derived polymorphism lacks residues 15 to 203
  VARIANT 23: note = Ancestral polymorphism is H, Derived polymorphism is Y
  VARIANT 33..203: note = Derived polymorphism lacks residues 33 to 203
  VARIANT 41..203: note = Derived polymorphism lacks residues 41 to 203
  VARIANT 155: note = Ancestral polymorphism is A, Derived polymorphism is D
MKFISIEPSRPLVTQPCQGAATHPSQAAFTLTQPSQPTSTQPSRAAFTQPSQAAFTQPSQATFAQPSQATITQAIYDEDDDLRVLDPIAPTLVSQRGKNVGAGSSRTRIDKHGQDGKVIEMMERFLEMKEKQDEVEKRATNNANEDDFPIPTCIAIVDGMEELSDDEKVDAYDVFKDAQNRAIFMTAKDATRIKWLRKKIART

SEQ ID NO: 16122 - protein, 175 aa, Zea mays
  VARIANT 80: note = Ancestral polymorphism is P, Derived polymorphism is L
  VARIANT 81: note = Ancestral polymorphism is A, Derived polymorphism is T
  VARIANT 87: note = Ancestral polymorphism is A, Derived polymorphism is V
  VARIANT 93: note = Ancestral polymorphism is G, Derived polymorphism is D
  VARIANT 97: note = Ancestral polymorphism is D, Derived polymorphism is G
  VARIANT 100: note = Ancestral polymorphism is P, Derived polymorphism is L
  VARIANT 104: note = Ancestral polymorphism is R, Derived polymorphism is K
  VARIANT 111: note = Ancestral polymorphism is A, Derived polymorphism is T
  VARIANT 113: note = Ancestral polymorphism is P, Derived polymorphism is L
  VARIANT 114: note = Ancestral polymorphism is T, Derived polymorphism is M
  VARIANT 115: note = Ancestral polymorphism is R, Derived polymorphism is C
  VARIANT 117: note = Ancestral polymorphism is P, Derived polymorphism is L
  VARIANT 120: note = Ancestral polymorphism is H, Derived polymorphism is Q
  VARIANT 168: note = Ancestral polymorphism is P, Derived polymorphism is S
MSQRRGIPTALTAIPEWLGHDYLPWVPKELLISGPRPEDDQKGVYPTAAHSHNGGARGIGEERRGKTRLLNGEQGVAALPADALATALVIFLGDYNDCGPHTRRVLNFLLALPTRYLAQHHVFLCGNHDLPFTAFIGALPPPPDGSPFSATWDEYIHNEEHKGWFRGPGFEGMHV

SEQ ID NO: 16123 - protein, 105 aa, Zea mays
  VARIANT 15: note = Ancestral polymorphism is L, Derived polymorphism is P
MLYQNIVLVTIVSTLSLSGAVPTESLTWNLIKVWLPGNIIFVGMLITSMFSLKYINVAMLTILKNVANVLTASGETYFFKKQHGTQVWVALMLMIISAVAGGIRP

SEQ ID NO: 16124 - protein, 302 aa, Zea mays
  VARIANT 7..302: note = Derived polymorphism lacks residues 7 to 302
  VARIANT 50: note = Ancestral polymorphism is S, Derived polymorphism is R
  VARIANT 52: note = Ancestral polymorphism is S, Derived polymorphism is R
  VARIANT 93: note = Ancestral polymorphism is A, Derived polymorphism is P
  VARIANT 136: note = Ancestral polymorphism is G, Derived polymorphism is E
MGRPPCCDKMGVKKGPWTPEEDLMLVSYVQEHGPGNWRAVPTNTGLMRCSKSCRLRWTNYLRPGIKRGNFTEQEEKLIVHLQALLGNRWAAIASYLPKRTDNDIKNYWNTHLKKKLKNMQGGEGGAGGKRPAVPKGQWERRLQTDIHTARQALRDALSLEPSATPLAKVEPLPTAPGCATYASSADNIARLLEGWLRPGSGKGPEASGSTSTTATTRQRPQCSGEGTASASASHSGGAAANTAAQTPECSTETSKMAGSSVGAGSAPAFSMLERWLLDDGMGHAEVGLMTDVVPLGDPSEFF

SEQ ID NO: 16125 - protein, 111 aa, Zea mays
  VARIANT 12: note = Ancestral polymorphism is S, Derived polymorphism is P
  VARIANT 13: note = Ancestral polymorphism is S, Derived polymorphism is P
  VARIANT 22: note = Ancestral polymorphism is T, Derived polymorphism is M
  VARIANT 82: note = Ancestral polymorphism is A, Derived polymorphism is T
MAYKYRVMQRASSCAERGRKLTMKRLLILQRCEPIVRFSCCSVRYGDCRRNHAASTGGHAVDGCREFIAEGEEGTSGALKCAACGCHRSFHRRVQVYEVAWGYGSDTSSTE

SEQ ID NO: 16126 - protein, 144 aa, Zea mays
  VARIANT 41: note = Ancestral polymorphism is V, Derived polymorphism is I
  VARIANT 42: note = Ancestral polymorphism is V, Derived polymorphism is E
MREEPILFLKPTSSFLHAGVATVAVEIPEPLKSLHHKAELVVVISWRGRDVPEASAMDFVRGNREPTQDNLRLPEIKGKFDPSKAAALGLRPGPKYRELQVGNSIQSDQFDEMIAIPVVPTVRVVITFTKFVPLIEPEEFFTID

SEQ ID NO: 16127 - protein, 523 aa, Zea mays
  VARIANT 488..523: note = Derived polymorphism lacks residues 488 to 523
MAGGGVAALGVKTERAAQYKGRMTLAVATTCLVAAVGGAIFGYDIGISGGVTSMDPFLEKFFPVVFHRKNSGGKNNYCKYDNQGLAAFTSSLYLAGLVASLVASPVTRNYGRKASIVCGGVSFLIGAALNVAAVNLAMLILGRIMLGVGIGFGNQAVPLYLSEMAPAHLRGGLNMMFQLATTLGIFTANLINYGTQNIKPWGWRLSLGLAAVPALLMTLGGLFLPETPNSLIERGRVEEGRRVLERIRGTADVDAEFTDMVEASELANTVEHPFRNILQPRNRPQLVMAVCMPAFQILTGINSILFYAPVLFQSMGFGGNASLYSSVLTGAVLFSSTLISIGIVDRLGRRKLLISGGIQMIVCQVIVAVILGVKFGAEKQLARSYSVAVVVVICLFVLAFGWSWGPLGWTVPSEIFPLETRSAGQSITVAVNLLFTFAIAQAFLSLLCAFKFGIFLFFAGWITVMTVFVYVFLPETKGVPIEEMVLLWRKHWFWKKVMPDMPLEDGWGAAEGHAAPASNNHKG

SEQ ID NO: 16128 - protein, 208 aa, Zea mays
  VARIANT 188: note = Ancestral polymorphism is G, Derived polymorphism is V
  VARIANT 109..208: note = Derived polymorphism lacks residues 109 to 208
  VARIANT 85: note = Ancestral polymorphism is L, Derived polymorphism is P
  VARIANT 79: note = Ancestral polymorphism is S, Derived polymorphism is L
  VARIANT 74..208: note = Derived polymorphism lacks residues 74 to 208
  VARIANT 48: note = Ancestral polymorphism is P, Derived polymorphism is T
MTSPAIHRMPPTTTPAIRARALSIRKFHAHAVQMEEGKHEEAIEVNNPRGVTLRNVLLLKNVISLNPDAKEVSQQRLLSLVAERPIPTFLDRDRYNEGLVGVLKQALCQNKIPGPKSYIAHILNGESLSAHAAILSARCPKLLPSKKPFVRDGSVTYEWGRRSCYHVRMSDHVDSHALKKILEYAYTGLVTVDDAIVKPVKHLQSIAI

SEQ ID NO: 16129 - protein, 420 aa, Zea mays
  VARIANT 232..420: note = Derived polymorphism lacks residues 232 to 420
  VARIANT 251: note = Ancestral polymorphism is A, Derived polymorphism is V
  VARIANT 263..420: note = Derived polymorphism lacks residues 263 to 420
MEEQLPDDMLVEILSRLPPSSLAASRCVSKHLCSIVDARRLLRAGHLLPLRLDAFYCISLASVDRETYLFARPSVARRIPGACLDFRVYLEVVDHCNGLLLLCDMVLNPATRQSAALPNAPDPSIENMLGVATVWAGTAPHRPPFYLYTDFNLVYDPMAESPEHFEVFLIPVLSCGHSGLMSDNITINLEEQEWPPSTFRTHVFSSRSWRISISKDRNTYQMMRLPAIRSKQIVERATFYLGKSEKGVYCALFYWAQDDSDPQFRVWSLMEEEMNGRDGQIHMKWLIKTSISLKPLLAQLHHCGHDLTPDEWRIIYNRHDRDLAGSSAQDDNDDEWDFENAHEIVLEAPNNVKDWYPIDFLGFHPYKEIVFFSLSWKTISYNLNTTKVRQLGCAAHIPVGIKTCFPYTPCYLTMEKLTNS

SEQ ID NO: 16130 - protein, 421 aa, Zea mays
  VARIANT 214: note = Ancestral polymorphism is R, Derived polymorphism is W
MPDAIPACFRAAAAPSGRASPAPSGSGSGSGAGTSLATSVYDTRLGLATLSWSRAPLGLSLRAVLRVSAGPAPAPSPSASDYGDGEVEYDDEEEEATVAVRVRPWLLWRRRGSKRFRVRDRRVDLAWDLSRARFPPSGSPEPSSGYFVAVVVDGEMAVVAGDMADEAYRKTRARRPAGPGPVLVSRREHVSMRDGAGGGGRCHRTCVVVRGREREISVDLVSRAQGQGRERDRAEVGMSVSVDGDRVLHVRRLRWKFRGTERVDLGGGDRVLVSWDLHNWLFPARDASPPDAAAAAPVPPAHAIFVFRFELADAGEERDPADAKEEELLDKAGTGGGGWPGYVSGWGRGDWSESSSNGGEKRRKRGQASRLAKASSSSSASVASSSASWASGSTVMDWGSAEEAQLQSGDGFSLLVYAWKN

SEQ ID NO: 16131 - protein, 134 aa, Zea mays
  VARIANT 17..134: note = Derived polymorphism lacks residues 17 to 134
  VARIANT 29: note = Ancestral polymorphism is V, Derived polymorphism is M
  VARIANT 44: note = Ancestral polymorphism is S, Derived polymorphism is L
  VARIANT 51: note = Ancestral polymorphism is D, Derived polymorphism is N
MFMCPSMACLLRDQHEQWKHKYGNPCRSVKIFRCQLPRNNAFYSAQPPKHDGSNKPLCLGGIIKAYGGTMYRLQRSIFIARAKCSDDFVFSIVSSVIGSACTYIDMIYGMASAIFVIFMTSFLIDVCDMNDGSF

SEQ ID NO: 16132 - protein, 470 aa, Zea mays
  VARIANT 6: note = Ancestral polymorphism is D, Derived polymorphism is N
  VARIANT 19: note = Ancestral polymorphism is S, Derived polymorphism is R
MEQLPDDMLVEILSRLPPSSLAASRCVSKHLCSIVDARRLLRTGHLLPLRLDAFYCISLASVDRETYLFARPSVARRIPGACLDFRVDLEVVDHCNGLLLLCDMVFRLLNPATRQSAALPKAPDPSIENMLGVATVWAGTAPHRPPFYLFTDFNLVYDPMAESPEHFEVFLIPVLLCGHSGLMSDNITINLEEQEWPPSTYRTHVFSSRSWRWEERSWVRQGEPTGTMADMLRSEHGWNHKAVYFRGALYVHYSNESVMRISISKDRNTYQMMRLPAIRSKQIVKRATFYLGKSEKGVYCALFYWAQDDSDPQFRVWSLMEEEMNGRDGQIHMKWLIKTSISLKPLLAQLHHCGHDLTPDEWRIIYNRHDRDLVGSSAQDDIDDEWDFENAHEIVLEAPNNVNDWYPIDFLVFHPYKEIVFFSLSWKTISYNLNTTKVRQLGCAAHIPVGIKTCFPYTPCYLTMEKLTNS

SEQ ID NO: 16133 - protein, 526 aa, Zea mays
  VARIANT 359: note = Ancestral polymorphism is H, Derived polymorphism is L
MATRVALAPPMVAVASVAVLLVVCAAASVAGQGQLQVGYYNKTCPAAEQIVRNETTVAIGSSPDLAAALLRLHYHDCFVQGCDASVLLDSTPNNTAEKESLPNGSLRGFDVVARVKDQLEKACPGTVSCADILALMARDAVSLARGPSWPLEENRFLPGETMASVVAAARAAAAVVLLLAVSTTAPSADAHVVIGAYNKTCPQAEDVVLKEMTAIVAKSPDLAGAVLRLFSVDCFVGGCEGSILLDSTAGNTAEKDAALNQGVRGYEVVDAIKARLDAACPGVVSCADTLALAARDSVRLTKGPFIPLPTGRRDGNRSVAADVALNSPPPDANITDIIALFAKKFNLTAKDVAVLSGAHTIGKARCSTVSPRLYNFGGQNGASDPTLDANYTATLRGQCKPGDNATLVYLDPPTPTTFDADYYTLVAGNKGLLSTDAALLLDTTTSAYVASQANATAPATEFFADFATSFVAMSKLGALTHHNGEIRQVCSKVNPPTSSQLSNAAAVPGGLAVSLALAVVALVLKL

SEQ ID NO: 16134 - protein, 127 aa, Zea mays
  VARIANT 90: note = Ancestral polymorphism is G, Derived polymorphism is R
  VARIANT 64..127: note = Derived polymorphism lacks residues 64 to 127
  VARIANT 62: note = Ancestral polymorphism is P, Derived polymorphism is S
  VARIANT 61: note = Ancestral polymorphism is I, Derived polymorphism is N
  VARIANT 54: note = Ancestral polymorphism is E, Derived polymorphism is D
  VARIANT 30: note = Ancestral polymorphism is T, Derived polymorphism is I
  VARIANT 27: note = Ancestral polymorphism is A, Derived polymorphism is V
  VARIANT 15: note = Ancestral polymorphism is A, Derived polymorphism is T
  VARIANT 11: note = Ancestral polymorphism is G, Derived polymorphism is C
MLGLTETRISGLLPAILGQLKSLDTIAIYTAMLSGLIPPELKQCTSLVNVYLYENVLSGSIPLQLDKLGNLKTLLLWQNNLVGVIPWSSGACAGLAVLAFVSLRMRTPCLEFMIFCFCTGMQSSYWT

SEQ ID NO: 16135 - protein, 142 aa, Zea mays
  VARIANT 25: note = Ancestral polymorphism is D, Derived polymorphism is Y
  VARIANT 24..142: note = Derived polymorphism lacks residues 24 to 142
  VARIANT 20: note = Ancestral polymorphism is D, Derived polymorphism is Y
  VARIANT 15: note = Ancestral polymorphism is R, Derived polymorphism is G
  VARIANT 10: note = Ancestral polymorphism is N, Derived polymorphism is K
  VARIANT 6: note = Ancestral polymorphism is F, Derived polymorphism is L
MHWALFIFFNHENGRNGIIDLFFQDRYLNAIQTNAHHLIRYLATAVVVNKRRRNMLEELIKVIQQEHHSYKDPVTEFLECLYVNYDFDGAQQKLIECEQVTLRLFFLQFSRPQFCYSRVCFLYYGKSLKDNTSFFCVQNILL

SEQ ID NO: 16136 - protein, 350 aa, Zea mays
  VARIANT 1: note = Ancestral polymorphism is M, Derived polymorphism is V
  VARIANT 46: note = Ancestral polymorphism is D, Derived polymorphism is H
  VARIANT 142: note = Ancestral polymorphism is N, Derived polymorphism is I
  VARIANT 231: note = Ancestral polymorphism is L, Derived polymorphism is F
MARSRVNMMATNACAFDIRIRCFCNVGRLDLADILIRCFCNVGRLDLAFAAFGLFLRTGWRVQNVVLNQLIKGLCDGKRTGDAMDMVFRRMPELGYTPDVFSYNALIKGLCAEKKSQEALELLLHMTANGGYNCSPDVVSYNIVIDGLFKEGEVDKAYFLFHEMPGQGFPPDLVTYSSVIDGLCKAQAMDKAEASLQQMLYKGVMPNTRPYNSLIHGYCSLGQLVEAVRLLKKMSGGGLQLNVVTYNMLIDYYCKIGRCAEARSIFDSMVRRGQKPNATTYCSLLHGYATKGALVDMHDLLDLMIRDGIPIEHRVFNILIYAYAKHETVDKAMAVFAEMRQNGLRPNLVS

SEQ ID NO: 16137 - protein, 468 aa, Zea mays
  VARIANT 311..468: note = Derived polymorphism lacks residues 311 to 468
  VARIANT 280..468: note = Derived polymorphism lacks residues 280 to 468
  VARIANT 244: note = Ancestral polymorphism is R, Derived polymorphism is L
  VARIANT 90: note = Ancestral polymorphism is L, Derived polymorphism is F
  VARIANT 44: note = Ancestral polymorphism is A, Derived polymorphism is T
  VARIANT 41: note = Ancestral polymorphism is L, Derived polymorphism is V
  VARIANT 1: note = Ancestral polymorphism is M, Derived polymorphism is T
MEEQLPDDMLVEILSRLPPSSLAASRCVSKHLCSIVDARRLLRAGHLLPLRLDAFYCISLASVDRETYLFARPSVARRIPGACLDFRVDLEVVDHCNGLLLLCDMVLNPATRQSAALPNAPDPSIENMLGVATVWAGTAPHRPPFYLYTDFNLVYDPMAESPEHFEVFLIPVLSCGHSGLMSDNITINLEEQEWPPSTFRTHVFSSRSWRWEERSWVRQGEPTGTMADMLRSEHGSNQKAVYFRGALYVHYSNESVMRISISKDRNTYQMMRLPAIRSKQIVESATFYLGKSEKGVYCALFYWAQDDSDPQFRVWSLMEEEMNGRDGQIHMKWLIKTSISLKPLLAQLHHCGHDLTPDEWMIIYNRHDRDLAGSSAQDDNDDEWDFENAHEIVLEAPNNVKDWYPIDFLGFHPYKEIVFFSLSWKTISYNLNTTKVRQLGCAAYIPVGIKTCFPYTPCYLTMEKLTNS

SEQ ID NO: 16138 - protein, 488 aa, Zea mays
  VARIANT 180: note = Ancestral polymorphism is D, Derived polymorphism is G
MVARCAHADAGGFRIWPIFSAASLRRKVLEVLACGGGGGGGDGGGSCRGRTAYRSPQRIPRPRPRSDRLAELLRAEQPSECSDEAEAEAEAAARKVEALEELKGVVGALRDGGGDGCMSRVEAAMAVRSKAKDDAGAREMLAMLGAIPPLVAMLDEGGDVGEDVTTAALYALLNLGIGNDTAVCMIVARNKAAIVQAGAVHKMLRIAEGGALTEAAVVANFLCLSALDANKPVIGASGAAPFLVRAFQAASSTEQARHDALRALLNLSIAPANALHLLAAGLAPALVAAVGDGPVTDRALAVLCNLVAACPEGRRAVSRAPDAVPSLVDVLNWADEPGCQEKAAYVLMVLAHRSYGDRAAMAEAGASSALLELTLVGTALAQKRASRILEILRADKGKQVAEDASGVVATVSAPQERGCRGEESVDGEFADAGMSAEKRAVRQLVQQSLQSNMRRIVRRARLPQDLAPAPTESLKALTASSTSKSLPF

SEQ ID NO: 16139 - protein, 960 aa, Zea mays
  VARIANT 686..960: note = Derived polymorphism lacks residues 686 to 960
MAAAAPAQGKLLPKSRRQDFLSWIPQALLPSSRIRARIPQPPHVLTPPPTFLHSRRCHCQEALTIACRREGDRRIPVNASSVDFVFAGRALDAAKLLADLAPRPRGSSSPMIDPAQCRGDWRLDLEVLLKDVTFIQRLGGLFIWTHTYTLMQKSENIEKYRIAKKSAKRAVSRARGQAYDDLYQRLDTKQGEKDIYRMAKIRERKTRDVNQVKCIKDEANQLLVKSEEIKNRWKEYFNKLFNGGNESATIELDEPFDDNNRGFVRRIQEYEVKETLKRMKVGKAMGPDGIPIEVWRCLGDIAIVWLTKLFNTIFRANRMPDEWRRSTLVPIFKNKGDVQSCTNYRGIKLMSHTMKLWERVIEHRLRKMTSVTQNQFGFMPGRSTMEAIFLLRQLMERFREQKKDLHIVFIDLEKAYDKTLEAKGFRLSRSKTEYMKCDFSAMGYEDGDVSLDGQVVPKKDTFCYLGSMLQKEGDIDEDVSHRIKAGWLKWRQAAGVLCDHRVPRKLKGKFYRTAIRPAMLYGAECWPTKRRHVQQLSVAEMRMLRWICGHTRRDRVRNDDIRERVGVAPIEEKLMQHRLRWFGHIQRRPEEAPVHIGIIRRPENVKRGRGRPTLTWTEAVKRDLKEWNIDKELAADRKGWKCAIHSTASSAAMHGHGGILGETDSSELQEVPLLSCESEVADKGFWTKLKDAIHQFIEEVMAPPTISAIIGFVVGLVPWLKSLIVGDEAPFKVIQDSLQLMGDDTIPCITLILGGNLTQGGRYFDQNQTQWRSKHVHPLDGTTARSETDLNSEVAMDVCVHGFRKSGLKRAVIVVILCVRFVLLPLIGIAVVRVAYGLGFLSRDLLYRYVLMVQFAMPPAMNISTLIPERLVWFRNDGSAVRRWTRGMLRDFSLDVPRCRGCADGVVDGLHVRSVLIEVGHRNQCTVAFSEPIVAQGIQLSNRKGGDGDGSHVSMSRSKS

SEQ ID NO: 16140 - protein, 344 aa, Zea mays
  VARIANT 266: note = Ancestral polymorphism is L, Derived polymorphism is H
  VARIANT 172: note = Ancestral polymorphism is K, Derived polymorphism is N
  VARIANT 65..344: note = Derived polymorphism lacks residues 65 to 344
  VARIANT 59: note = Ancestral polymorphism is G, Derived polymorphism is R
  VARIANT 8: note = Ancestral polymorphism is S, Derived polymorphism is F
  VARIANT 2: note = Ancestral polymorphism is A, Derived polymorphism is V
MVAASQISLDDLRAAAGAAGGVHDDFLDQMFGGLPPSAWPELASVAGGKAPDGGAQAEGMEHQPQHFGRGEIAGSVFGGSFVGSLQQQQHFQSHHPQQQTAPPLPGQGFGGGGRGGGRAGAPGGMSQPQAGAAVGGAAAPPRQRVRARRGQATDPHSIAERLRRERIAERMKALQELVSNANKTDKASMLDEIIDYVKFLQLQVLSMSRLGGAARSRQGRDGAAAAAGSDGLAVTEQQVAKLMEEDMGTAMQYLQGKGLCLMPVSLAAAISSATCHMRPPVGGPGVAAGHHMAAMRLPHVTNGGAGADDVSASPSMSMLTTPSAMPNGAGAGVDGKDAASVSKP

SEQ ID NO: 16141 - protein, 173 aa, Zea mays
  VARIANT 30: note = Ancestral polymorphism is L, Derived polymorphism is Q
MYGILTSPCPRAPLLRALPSPSARAFPRTLAFPARPLPRGLRLTPPHAAAEASAAATALGGLLASPLSTLEAALRGLNLAPLRAPVAAAMSAAVRWLGVYREVLLVGVLLSWFPNIPWDRQPFSALRDLCDPFLALCREVMPPVFGRKLDLSPLVAFMAIDIIIMILRPQPRM

SEQ ID NO: 16142 - protein, 372 aa, Zea mays
  VARIANT 32..372: note = Derived polymorphism lacks residues 32 to 372
  VARIANT 37..372: note = Derived polymorphism lacks residues 37 to 372
  VARIANT 55..372: note = Derived polymorphism lacks residues 55 to 372
  VARIANT 78..372: note = Derived polymorphism lacks residues 78 to 372
  VARIANT 118..372: note = Derived polymorphism lacks residues 118 to 372
  VARIANT 169..372: note = Derived polymorphism lacks residues 169 to 372
MEFHEVLDTFLVPTEFWDTQDKFQAWMMSSDWKNNDWRDEEDHKFTYDCLIDRIWWEKVEMVLKTVTPLYSMLRFADQQKNGTISGFLPKMLSAQAEIFAKLKHDKNVKRDFMKKVNEIIKKRTQYLLSDTLMVAGAALDPKALYTSKLATHHSAILAVTLAIKKLAHSPIEASIAIDQFTRTFSKKEKLFGSLEARSSALRADANPNPYSMMMDVVLFDENNPILDWFNNSRSESRPILDEYDDDNDDWDAPSSFLIEELQMSKSDVTAFKRNLGFGKNSIGKKPMSQLDEEEEFEDDYELDSPHGSPLYDEPCDICSDDEGGCSGNRGAPLVPDVEEKWPPEHGTLLDRMITFVGDSDFGKNELIFKCFC

SEQ ID NO: 16143 - protein, 302 aa, Zea mays
  VARIANT 154: note = Ancestral polymorphism is K, Derived polymorphism is I
  VARIANT 82: note = Ancestral polymorphism is T, Derived polymorphism is I
MMLLMDSGSRGDCSPVCLDLSVGLSPPSPGSGPETTADAERLDRPATGCWGPRTSSLADGKDEAKTLEARLTQVSEENRRLTEIIAYMYASQVAARRSPDGRKRSRDSLEPSNSGDANAAVESAALSDEGTCRRIKLTRVCTKIDPSDTTLTVKDGYQWRKYGQKVTRDNPSPRAYFRCAYAPSCPVKKKVQRSAEDSAMLVATYEGEHNHPSPTRAGELPSSTSINSSGPAITLDLTRNGAGAVRGLDAAAEVPGLKRLCQEIASPDFRTALVEQMARSLTKDPKFTDALAAAILQQLPEY

SEQ ID NO: 16144 - protein, 409 aa, Zea mays
  VARIANT 306: note = Ancestral polymorphism is G, Derived polymorphism is V
  VARIANT 303: note = Ancestral polymorphism is D, Derived polymorphism is Y
  VARIANT 280: note = Ancestral polymorphism is T, Derived polymorphism is I
  VARIANT 36..409: note = Derived polymorphism lacks residues 36 to 409
MNIPEDVHDNHILLSPESPLSRQDLVSWKMALDKRQLPEVDRNCLFKLSGYIDIDKINTAAWPALAADLDAGDQSITALAFGFTRLFQPNKPVTKGQAALAFSAGDSGEVVLEELARIEAEKIAEAAVNAHAALVAQLRSEVEEHPQNVLSKKVEVSFEKSRIEKLQKEIETHILSDLKLIIHRVKVSTTPDGRVVDLFFITDGMELLHRKERQDETCSALTATLGPSISCEVVPAEGFQQGFSSLPPEIAEELFRAELADTDSEVCSSPLSAELRKVRTTATVNFDNSLSPAHTLVQIVCVYQKVLIYDILRTMKDCNIQYELAEVERKALSMARAWAEEEAKKAREHARALEEARNQWERQGIRVVVEGELKDDASAGVTWANAGKEHAVDESINRAEALLESQDNV

SEQ ID NO: 16145 - protein, 266 aa, Zea mays
  VARIANT 252: note = Ancestral polymorphism is A, Derived polymorphism is P
MDSNGECSSPPTLSAALLPLFGPPPEPLPESLEDKLRRVSEENRRLAAALDAILADRSTPRALATSSPSRGNAVAAAEPPRPKVRTVCARAEPSDADANHLRDCYQWRKYGQKVTRDNPYPRSYFRCAYAPSCPVKKKVQRSADDNLMLVATYEGEHNHEQRAQSEYVVTDASTSLHQAGSSLPRSIISIDSSGRKKITIGLAADQRPPADSNAGAAVGEIIVTPEFRKALVDELVNLLTNDSEFVEKLASAVADRVMERIPGHIF

SEQ ID NO: 16146 - protein, 150 aa, Zea mays
  VARIANT 7: note = Ancestral polymorphism is S, Derived polymorphism is G
  VARIANT 33: note = Ancestral polymorphism is C, Derived polymorphism is R
MKISLCSVVWFFSLAVSPCSPARALSLSVSSSCCVCLVLYFAAVVDVGMMGALAGASSSTVWLTEESEHASARLHLYTAAPGEWIDAKAQLLLRAHFSFCQLPLLLGTCSAVCIHHRPSSPTSVHRSAPMMRRRRRPGAAVPLITSVAVL

SEQ ID NO: 16147 - protein, 318 aa, Zea mays
  VARIANT 89: note = Ancestral polymorphism is G, Derived polymorphism is R
  VARIANT 271..318: note = Derived polymorphism lacks residues 271 to 318
MEASATGAADPHFPIYISSDEEDGHAYFIESYSPEEVQIQQTILLSLYTSRAQTAAACSASSSYPTGASSTPKAGTSSTPKETPIDHKRKRKLKLEDDTNDSKMKRSTRNRFNCAICFEMVLAAEKFVVSHCPHAFCNSCIGRYVAGKVADNVAVIGCPDPACETGFIEMDLCRDIIPPELFDRWSVVLCEELLGDDKFYCPFKDCSALLLNDDSAKIRETECPHCHRLFCARCHVPWHDGIECKEFRKLGDDEKGENDLMLKKLADKEKWQRCPKCRMYVSRKSGCLLINCRCKQYFCYHCAAPMDRETHYCENCKH

SEQ ID NO: 16148 - protein, 106 aa, Zea mays
  VARIANT 61: note = Ancestral polymorphism is G, Derived polymorphism is D
  VARIANT 53: note = Ancestral polymorphism is L, Derived polymorphism is H
  VARIANT 48: note = Ancestral polymorphism is L, Derived polymorphism is F
  VARIANT 44: note = Ancestral polymorphism is E, Derived polymorphism is D
MAALKIAAVCMLLLFVGSDLARCVASSASPGDEDQAAAGALLREFLELELSLLAEQHGGVGEFCPPACQNCLIICGITCVLNPNPATCFVNCTTANGCFSKTLPVA

SEQ ID NO: 16149 - protein, 108 aa, Zea mays
  VARIANT 25: note = Ancestral polymorphism is A, Derived polymorphism is V
  VARIANT 33: note = Ancestral polymorphism is E, Derived polymorphism is K
  VARIANT 54: note = Ancestral polymorphism is L, Derived polymorphism is V
  VARIANT 58: note = Ancestral polymorphism is H, Derived polymorphism is R
MAALKIAAVCVLLLFVGSDLARCVASSASPGDEDQAAAGALLLREFLELELSLLAEQHGGVGEFCPPACQNCLIICGITCVLNPNPATCFVNCTTANGCFSKTLPVVA

SEQ ID NO: 16150 - protein, 285 aa, Zea mays
  VARIANT 259: note = Ancestral polymorphism is R, Derived polymorphism is L
  VARIANT 170: note = Ancestral polymorphism is M, Derived polymorphism is T
  VARIANT 70: note = Ancestral polymorphism is S, Derived polymorphism is C
MSIGMGQFFPSGYGYGFMCPLGTLPTAIPTCYAAFHDQEWGAPVHDDKKLFEMLTLSGALAEMAWPAILSKRDTFREVFMNFDPLLVAELNEKKFLAPSSPASSLLSQHRLRVVIENARELLKVIDEFGSFDRYCWSFMSGNKPTVGRYRHTREVPLRTAKADAISQDLMRRGFLGVGPTVVYAFMQAVGMANDHLVTCYRFEECCAVESFAASDEGYAGDNGKKPPPAVASDQEAGGEYAVWAGAVRRLGAVDVESRRHLHCDQQRLVAGNSGFTCMLLTLTHE

SEQ ID NO: 16151 - protein, 191 aa, Zea mays
  VARIANT 41: note = Ancestral polymorphism is R, Derived polymorphism is S
  VARIANT 55..191: note = Derived polymorphism lacks residues 55 to 191
  VARIANT 73..191: note = Derived polymorphism lacks residues 73 to 191
MRQARVNQIKEKGNFLGRSSASLSQGSSSSPSSTTVRGRKRRGEDADLREDPDGEDHHPRGGEQRHRRQRQSQNPADQQRLIFAGKQLEDGRTLADYNIQKESTLHLVLRLRGGTMIKVKTLTGKEIEIDIEPTDSIDRIKERVEEKEGIPPVQQRLIYAGKQLADDKTAKDYNIEGGSVLHLVLALRGGY

SEQ ID NO: 16152 - protein, 649 aa, Zea mays
  VARIANT 243: note = Ancestral polymorphism is D, Derived polymorphism is Y
MKFMKLGSKPDAFQSDGADVRALALASVSAVLAFEPDYFYSISWLESMALLYVVSDLATDVVVHVGEVKFYLHKFPLLSKSGKLQRLVLKAAEDETDEVRIDDLPGGAKSFEICAKFCYGMVVTLSPHNVVAARCASQYLEMTEDMEKGNLIFKIEVFINSSILRSWKDSIIVLQSTKALSPWSEELKVVGRCIDAIASKTSADPANVTWSYSHSSKKGGACAEIVEPAGKPSIAPKDWWVEDLCELDVDLYKRVMVAIKSKGRMSPELIGEALKAYAVRWLPDSYDALVAEDYMRRNQCLVETIIWLLPSDKSSGCSCRFLLKLLKVAILVGGGEHVKEELIRRISFQLHKATVKDLLLPATSPNDGTYDVRLVHNLVQRFVARTALSHNGGFIEKSDEKMIELNFEQESILSVGELVDGYLSEVASDQDLSLSMFVELATAVPEVARPVHDNLYYAVDAYLKEHPDINKSEKKKICSLVDVKKLSADASVHATQNDRLPLRLVVQVLFFQQLRAGPSKELALIDNGEHACTRPTQDQCDRGERRIPKHPNSLNKQVTSLSARESQQHRISEHRGGRNSFKDQLGGLLLQSRSRRIFDKLWSSKGQGEHGGKGSETSGSSQSPPLSAKPAEVKPSPLPPLRGRRYSVS

SEQ ID NO: 16153 - protein, 811 aa, Zea mays
  VARIANT 227..811: note = Derived polymorphism lacks residues 227 to 811
  VARIANT 211..811: note = Derived polymorphism lacks residues 211 to 811
  VARIANT 155..811: note = Derived polymorphism lacks residues 155 to 811
MERIHVAVRSRPLSPEDSRSSPWKISGNAIAHSAQSSSRFEFDRIFGEECRTAEALGRCSLVSRRFHELVPLVDSVLVRVDCVIPDEPPSSSSTPSSPTASVRARGVFSQIARIVLGGIVKPIQALGQILTRQLRLRLSGILRFGSTLGSCVILGASSASPSPSPSSAGSDSASAAPSVDGGHIEPDECDDSGSIPESFYTNGGFKLRVIWSINSLIAAAARHYLLQPIIADHMTLERLDLTDADGTVFAYGQTNSGKTFTMRGSANEPGIIPLAVHDLFQRIQEHMDREFLVRMSYMEIYNEDINDLLVPEHRKLQIHESIEKGIFVAGLREEIVTCAEQVMDFMSFGESHRHIGETNMNLYSSRSHTIFRMVIESREKGDDNEVEDFCDAVRVSVLNLVDLAGSERAAKTGAEGVRLKEGSHINKSLMTLGTVIKKLSEGIESQGGHVPYRDSKLTRILQPALGGNSNTAIICNITLAQIHTDETKSSLQFASRALRVTNCACVNEILTDAALLKRQRKEIEELRAKLRKSESDHWEEEILNLRNTLLQSELEKERISLELEEEKKAKEQRDRCLIEQAKKIENLSSLVLNSDRDDRSTAFSKNKRRVTWCPGPNAKQFDIEDLRPVQEGSTSSTVRNERDMGMPPLFEELMQESNDEPCANVYSSGPGNVSKDSEDVPLPDSHALLHVTNRRKPKAMKKSDQEQFRGRAGELLIPQDPCDGNDALRHKNTVPCVVSSLSSRESEAILVIKQLQDQIKLLEAEKSSVQTNLDAVLVLATQQKVSFNEEYEEVSYVRLRKRKFESIQLGD

SEQ ID NO: 16154 - protein, 484 aa, Zea mays
  VARIANT 371..484: note = Derived polymorphism lacks residues 371 to 484
  VARIANT 359..484: note = Derived polymorphism lacks residues 359 to 484
  VARIANT 148..484: note = Derived polymorphism lacks residues 148 to 484
MPLLRLHLASPRSGLPVALDGSAVSVHFRRMSLSASTRPVAAALGAATFEEVLTLRSPVYFSRGAKVVVKYEPRAFAVSVAASTLDLGKHEVDLTRLLPLSFEDLEDGGDSGFGKWSTNFRLSGPTRGARLNVTFSCSLLTGDDTSEQHRGGEVAGLRRGSMARAVSVQAPTPLPARSRDVRVLHKVLPSLRSTRPVPSSIADGGPDARKEEVAAPDCTEEGFPEAKHCTSVETVGVKTEVVFSDVAVQMENVEDKQDGIVKAASSLPTAALEAEGQFGADAELEDKCILKELSVAEPEEFESPVVEDKHSRRLSCTGVTDSYKSASRKGRSRSMDASTDSVANEFLDMLGIEHSPVGQPSDSDSESPRERLWKQFEKEALASGNAILGLGFDDGIEGPICDNVVEDFNLSAMIHEVELELQNGSQPIDTKFRAKSLEDEETEALMRQFGLNEKSFQSPPETRTCGLGLYLCAKLPTYFLCKNS

SEQ ID NO: 16155 - protein, 281 aa, Zea mays
  VARIANT 87: note = Ancestral polymorphism is K, Derived polymorphism is N
  VARIANT 160: note = Ancestral polymorphism is R, Derived polymorphism is S
MDDIAGERGRKGDDSSRAVLTPPRGPGLLSPSSPSRSDPIPSPPSAAVLALPAAATSPSAGLLASSRLTGEMDGGGETLLVRRSKGKKRRQPAAPAERGSGSGDRFRALWRDYHDLLQETEAKKRRLASKKRRSLALLAEVKYGSSPALALWLHLLFVARFLRRKYQSFPKGGSQQTHYRLKKQARYMPSPLGHGAGTEVPSTSRNPNLDLNQDSVLNDVGNDCQGQHGHPEVEKLDQVEVNEDTMTPDVKLSVCRDTGEYSPVSEGKRAVPWQDRFALKT

SEQ ID NO: 16156 - protein, 1223 aa, Zea mays
  VARIANT 331..1223: note = Derived polymorphism lacks residues 331 to 1223
MTVPCAVDPLLVIREALLSQLQKDRLRQEIIQVELAKIERAMVLCKCNSSHHGIAADDVEWTKPAPFTFREQSMRPWRWSVSQECYVDVDEVHDRKQKEGRHRSVVLKSEKPAMEDGECLRPCCNGKASQENSKVEDQKSQESSETIQPKTTLPSVKWELTGITIPVKKKKRHQKLSCEICQVQATSEHSLQEHRAGRKHQLKEAINQKVQLTEESSSSTEQKTSSIKWSCSTCQANSTSESDMKEHLNGRTHRQNIKAQLMESDGIAKTNELQEPECPKNNAPQHSEKPPPMSSTHCLANSTHELELRGHLLAKPQALLDEISNLSRNSESREATVLPNIAPQHTEQTPGSNCSILQADSDCKLDLEHQFGAKIHQLNVQDLLEEAKKTGDFPPEIAKDQQPPSEWGCVICQAKCYSAPQFAQHCRGKKHQKKVEALQGGVDAKSSNLTTVHKAASNGSDSNSSSSEKVEDQTALWSCGICNPQCNSESMLAGHCEEEEHMEKHKLRYFCEVCNLKCNSEKMLAHHLCGKDSSMLVTRDALLSQLQKDRLRQEIILAELAKIERAMALRASPGAPFSVVKLQEMPRSREAFGSADLIVAVGVDNGMEEKKDSATSLQASSLVHRKMPAAEYLVRECLKTSCGAGNAAGRRQNAALDETRLPKETTPPLIKWRCDICLVEAPTKGHLQQHCAGHKHKSKVATLVPRNNANSHKANAAAAANPGDVRQSDEKPRLTWVCRFCQSNCTCRSDLESHLRGKRHKAKIQCLLEECKNMAVIYSYRSANSQPNLATQEEDNGPASAWNCRLCQAKCNCPSDLANHLRGKRHQLNFLVLQVEGKQYLSEWGCGICQAKCDSVSQLESHWSSRGHQQKVQALRGGGQTASSVDEGIHRTTYVCKLCNLHCNSKTTLAEHRRGKNHTLKAKKRLSLSFCEACTGPLFCLPAHRLLPCANPPRHRSRKSAAPAPPARFPSQRPHSPPPSSRMEGCAHGWKVAHKEDADEHSWKVAPNRASAATPADGRLRHQIARMEDPPPPPLPKSCIRGALKFRGRSTLSRSVDGRSQISSRHYRARPVNSHISPRHSLGASTAIHGWQTIPSSRFMKVLFLRLGFSGVADMKIRRSEWGGALVAPRRSGSLSARISAALSGGLVPAPPTGGQLRHIPQGPAGAAPGSEDGQAHRHHRGEQGPRRPAGLLGRHRRQALHGRRQGRPQGQVLVAHHSARGP

SEQ ID NO: 16157 - protein, 677 aa, Zea mays
  VARIANT 630..677: note = Derived polymorphism lacks residues 630 to 677
  VARIANT 510..677: note = Derived polymorphism lacks residues 510 to 677
  VARIANT 246..677: note = Derived polymorphism lacks residues 246 to 677
MEFASRSRPTTTAADDEENDCLRRFPDHPPSQPQGHGEPNTSGVDAALLARRQKLLLELLKGSIQQGLILRELVETEHAMGFIAGSHNPVPALPQDFLRCWTPSMSTLEAHLRQPCPCGCGNSMAVRAPPVNPHLERSSHAPEQTRPGNDAEQHQEDRSSGVRTHPFNGHFKLCHSPSKQTPVPGKAGVNQMRPSSGHQQAIVWEKIGVEVVHNMQPLNEIKNHSSEGQKAVDSAIEVCVKKPIQQRLQYKPVDQENAANNESCSSHIINVYYELYLELHRGFVHQNMIWCELVETEHVMGFTAGNLNPVPYSHRITGVMVLLDAVDAALGSASPPAMPLWLQKLQGVSAPPVNPQATCGVVIVSSLKKLHFIQHAPEQTRQGNDAEHHQEGRSSGVRTHPFNGYFELCRSPSKQIPLAGKAGINQVRPLSGHQQGVVWEKIGVEVVHNMQPLHEIKNPSSEGRKAIDSGIEDCVKKPMHHRLQYKPVDQENAASNDQKSTEFNEPTAEGTSAGVKRKLTTPSSPVKKQKPLGQWSCTICQANPASQRQLEQHLAGKRHQSNVAALQPSQSNSSSPEPDTKATPARSRIIATNAQQDGKQDVPENRWTCTLCRAKCYTELNYYSHLGGLWHREKAQARREEHLRFYCSVCDLQCNSEKMLESHLGGRRHRETLEARD

SEQ ID NO: 16158 - protein, 194 aa, Zea mays
  VARIANT 79..194: note = Derived polymorphism lacks residues 79 to 194
  VARIANT 87..194: note = Derived polymorphism lacks residues 87 to 194
  VARIANT 142..194: note = Derived polymorphism lacks residues 142 to 194
MYGTSRYVTDQSVLLQKSEALHHRGFTRPEDGENMNHVGKGNVDRWLHMLMDDQQEDHDAYHSSDEHDNDEENASDEQRTQSRVDEESCRNGITEYSNEIIEVEDEIVSDQGAERGRNSFGIKDREEKKIWFHRTDSTWGFWSLPSSPSMILGMRKGVERMAVDDDRKYGYEDSVSRSSTKFPRPAACAAAPRR

SEQ ID NO: 16159 - protein, 434 aa, Zea mays
  VARIANT 204: note = Ancestral polymorphism is R, Derived polymorphism is L
MKVEVVETTLVPPSEATPRHALWLSNLDLAVPKTHTPLVYYYPRPAGAGAGEEGEGEGGEGSFFDPARLREALSRALVPFYPLAGRLAAGPGGRIEIDCTGEGALFCVARADFTGDEMFADFEPSPEARRLLVPFAASGDPPCVLAMVQVTFLKCGGVAVGTGMHHVTMDGAGAIQFIRAWTALARGEAPAWTPSHDRTLLRARSPPHVPACEHPVYSPAYLNGAPRPFVTRVYAVPPKLLAGIRSRCAPGASTYCAVTAHLWRAMCVARGLPAASDTRLRVPANVRQRLRPPLPASYFGNAIVRDLVTVRVGDVLSQPLGFVAERIKRAVARVDDARVRSVVDYLELESDKGNQAARGQFMPESDLWVVSWLGMPIHDADFGWGRPGFVAPAQMFGSGTAYVTQGRDKDDPINVLFALEPEYLNTFEKAFYGE

SEQ ID NO: 16160 - protein, 205 aa, Zea mays
  VARIANT 111: note = Ancestral polymorphism is R, Derived polymorphism is Q
  VARIANT 39..205: note = Derived polymorphism lacks residues 39 to 205
  VARIANT 32: note = Ancestral polymorphism is A, Derived polymorphism is V
  VARIANT 16: note = Ancestral polymorphism is R, Derived polymorphism is C
  VARIANT 5: note = Ancestral polymorphism is A, Derived polymorphism is D
MIYRADLTKCRDYHRRHKVCEAHSKTPVVVVAGREMCFCQQCSMITGSGFESVIKVDAALGRPRKEEGAKERGRIGNNTAVLVHPLDDAKVQEEDEAHTFFPWSYCIPASRISHSTVAAKRHHVLSTSAASHHLNTPAYVVCRIRGHKQEDPISAKDKASVMYVKDKEGWVLIHSTTISGSVGGQGRLDAILQTNWGYYVCIFIP

SEQ ID NO: 16161 - protein, 527 aa, Zea mays
  VARIANT 195..527: note = Derived polymorphism lacks residues 195 to 527
MLEDDAAMDADSLVGQDPRSGVRPSGGERDWAAAVLEPVRWMRMLCRELGATFVAGVVLVYGLSQGFAGSFFRVASDYYWKDVQRVQPATVQFLSVFFFIPWVLKPLWGIMTDVFPICGYRRRPYFLFSGILGTVSAAIVAVTIGLPMSSAVLCLMGISTAVAIADVTIDASIAKNSIDKPALAPDMQSLCAFSSSLGALVGYATSGLFVHHLGAQGALGVMAIPPATVVFLGFFIYELKTHQHNVKEKVLNKVGGAVKGMVRTIRYPVVWRPSLYMFLSLALSISTHEGQFYWYTNKTPPNPGFSQEFVGLVHAIGAVASMLGVLVYHKCLKDYPFRSILLYAQLLYGVSGLLDLTFVLRWNLALGIPDAAFVTLEECVSRVVARVRLMPMMVLSTKLCPPGMEGTFFALLMCIDSLGMLAAKAGGAAVLRALRVTRTDFGHLWLAVLLRNVLRLATLGAIGLVPTAGQTDVLVPRELLGENVSAPFMIFESTGSPRYTERGFLIKDLQTSYDFFCFWMLIGNDMT

SEQ ID NO: 16162 - protein, 152 aa, Zea mays
  VARIANT 20: note = Ancestral polymorphism is S, Derived polymorphism is L
  VARIANT 37: note = Ancestral polymorphism is A, Derived polymorphism is T
  VARIANT 60..152: note = Derived polymorphism lacks residues 60 to 152
  VARIANT 74..152: note = Derived polymorphism lacks residues 74 to 152
MSSRRAEAPANATFGIPLLSFEEQTGHSEKFLQTTAAFLCFQTSQSTRITTKLNPLRNILATDLLDLHHHSWKRHVEQPRPVSCSSCQSAGHVECKWCAGTGFFILGDNILCEVPSRNSKCVICSGKGFTSCADCQGTGFRAKWLEEPPIDK

SEQ ID NO: 16163 - protein, 447 aa, Zea mays
  VARIANT 26: note = Ancestral polymorphism is P, Derived polymorphism is L
  VARIANT 142: note = Ancestral polymorphism is T, Derived polymorphism is K
MYCLLDWRFSLWRVYFQVRLVSIQALIWWLKLCFSMALRFEILGRFNRARAARLTLPHFTCQTPLFMPVGTQGTIKGLTTDQLEEIGCQIILGNTYHLELRPGSQLIDDLGGLHKFMNWKRALLTDSGGFQMVAPNLCFLNTITVVIDHLSMQNCCWIQTLIFVIFLVSLLHLADITEEGVTFQSPVDGKPMLLTPEESIHIQNNIGADIIMALDDVVKTTITGPRIKEAMYRTIRWIDRCIAGNELDLKLTDQYFFLTPEISVLGAWLSGIFLVAHIYIYIFVARYAIGGLAGGEDKDSFWRVVAQCTAGLPENKPRYVMGVGYPLDIVVCSALGADMYDCVYPTRTARFGTALVPEVCKKYTRAYLHCLVTKDAMGSQLLSYHNLSFMMRLSRDLHMSILEGRFPEFVRGFLRVQFPTGDVPQWVRNAMEVAGIDISECCASTNV

SEQ ID NO: 16164 - protein, 392 aa, Zea mays
  VARIANT 91: note = Ancestral polymorphism is T, Derived polymorphism is I
MSSADSCVSSPASPIGFEGYEKRLEITFSDAPVFEDPCGRGLRALSREQIDSFLDLARCTIVSQLSNESFDSYVLSESSLFVYPHKVVLKTCGTTKLLLAIPRILELAAGLSLPLLSAKYSRGTFIFPGAQPAPHRSFSEEVSVLNAFFGNLKSGGNAYLIGEPFKPNKKWHVYYATEEPERPMVTLEMCMTELDVKKAAVFFKNSTGGSCTSAKEMTKLSGIHEIIPEMEICDFEFDPCGYSMNGVLGPAASTIHVTPEEGFSYASYEAMNFDPSSLVYSDVIRRVLAGFSPSDFSVAVTIFGGRGFAKSWATGADIDSYMCGDPVEQELPSGGLLMYQSFTDVPSGSVSPRSTLQTDGWSSDGMEMASNDEMCIGCWNAVKKVVKKDLDA

SEQ ID NO: 16165 - protein, 97 aa, Zea mays
  VARIANT 34: note = Ancestral polymorphism is N, Derived polymorphism is Y
MDREAKKEAFRKYLESSGVLDTLTKALVALYEENDKPSSAVEFVQQKLGGPSISDYEKLKAEKLDLQLKYDKLLETHKETCRQLEELKNMKYGAPWN

SEQ ID NO: 16166 - protein, 590 aa, Zea mays
  VARIANT 23: note = Ancestral polymorphism is A, Derived polymorphism is E
MALARLRLLDRYGLLSPALSATALRSLGDLRALCTLSTTLRSGAGEDEIERIRREFDDAKRNYLSIPAAIKDMPKMNPQGIYVNKNVKLDDLQVYGFDYDYTLSHYSEHLQCLIYDLAKRHLVNELKYPESCLQYEYDRTFPIRGLYYDRLKGCLLKLDFFGSIEPDGCFFGRQRLSLSEIKELYGTRHIGRDQARHLVGLMDVFCFSEACLIADIVQHFIDAKLEFDPSYIYEDVNQSIQHVHRSGLIHRQILSEPEKFLIKKSQVFRFLKMLKEKGKKLFLLTNSPFYFVDGGMRYLLEVLFLNLNLLNVACQRNMKNIFAYSNILCIDYFHNLVGQDQHFDGNSWRELFDVVIAQANKPTFYNSDHPFRVYDTQKDTLTFTAVDKFLPDQVYYHGCLKSFLQITKWKGSEVGYFELKQESVSVFSIVIYFGDHLLSDLRGPSKAGWRTAAVIRELEDEIEIQNGDSYRFQQAKLSIIHDLLGKVHAAVVSTEKGQVYKALLNELNAERRQCRSGMRDLFNTSFGATFLTDTGRESSFSYHIHQYADIYTSKLENFLSYAPESWLHPPHDIKIMPHNAKVPASLFSTS

SEQ ID NO: 16167 - protein, 234 aa, Zea mays
  VARIANT 116..234: note = Derived polymorphism lacks residues 116 to 234
  VARIANT 46: note = Ancestral polymorphism is G, Derived polymorphism is A
  VARIANT 6: note = Ancestral polymorphism is V, Derived polymorphism is L
  VARIANT 3: note = Ancestral polymorphism is V, Derived polymorphism is A
MTAFLVAVLAALVLTSEGRVSRKDLGIDLGGGSGAGIGIGAGISIGIGGGGGAGGSGSGSASGSGSGSGSASGSGSSAGSGAGSYAGSGAGAGSGSGSGAGSGAGSGAGSGSGYGQGQGSGYGEGHGSGQGQGSGSGSGYGQGSGSGRGSGYGEGSGSGSGQGSGSGYGEGSGSGSGQGSGSGYGEGYGSGHGQGSGYGEGSGRGYGEGSGSGYGEGHGYGYGSGSGHVANKHD

SEQ ID NO: 16168 - protein, 175 aa, Zea mays
  VARIANT 82: note = Ancestral polymorphism is G, Derived polymorphism is W
  VARIANT 155: note = Ancestral polymorphism is G, Derived polymorphism is R
MAGGGGRGAAAAAASALALAALVCSLSCGLAQGRVARKSLGIGLGGGGGGGGDGLGLGLGLGLGVGAGTGGVSVSGSGSGSGSAPVVGSTSGSRSGSISVGGASSSAGSSAGSSAGSTGSAAGSSAGSGGGQGYGQGGGSGSGSVYGEGSGSGNGLVGIGTGQGYGHGSNFGGNP

SEQ ID NO: 16169 - protein, 286 aa, Zea mays
  VARIANT 132..286: note = Derived polymorphism lacks residues 132 to 286
  VARIANT 61..286: note = Derived polymorphism lacks residues 61 to 286
  VARIANT 40: note = Ancestral polymorphism is P, Derived polymorphism is L
  VARIANT 38: note = Ancestral polymorphism is T, Derived polymorphism is M
  VARIANT 27..286: note = Derived polymorphism lacks residues 27 to 286
MDMVTLSIAPKQFHTHVHMRSAGAKGWGLTWIWMMMATIPVHRNGRYRQRELTVPVGLGSQTGSRRCHHSRVRCRLHQRVGFDHLHEPRPHPSAAEEPRPVAAGVGHHRHGRGPQPTMAHPGQHEAGLPEPEVPVDGELKQPEHEERGAPEPQIHRLCPLVVVPECRLPLLHPVYQLLEPRRRRDPRDGRAHHARHLGERHARTSGAAMARWRRMSQGIQDLIAACAAGVVGTRDARSGGGRGMERQNIAACGRRAEIGGRPVAAIIGPNLTNEHGAGSRDRLREM

SEQ ID NO: 16170 - protein, 205 aa, Zea mays
  VARIANT 180: note = Ancestral polymorphism is G, Derived polymorphism is E
  VARIANT 124: note = Ancestral polymorphism is S, Derived polymorphism is Y
  VARIANT 102: note = Ancestral polymorphism is T, Derived polymorphism is I
  VARIANT 74..205: note = Derived polymorphism lacks residues 74 to 205
  VARIANT 14: note = Ancestral polymorphism is S, Derived polymorphism is F
MRQRWCRIGLGCRSGDAVILLHVCPISVLYDTDWSAIDVSYPSLAPTPRMVLATTKMTQSQLLRAGWRTTKTPSRLLEVVAHVYKTINAIPVDAHHMAQFITWTSTIRLNVNILFLLSKIMRDSKTGNSIVHESFELSDQAVKAMNNQHFCNHPIIVSYAYKKGTKGDTMAHQQVEIHLGQPHQIRIHLAYNGHPLVVKPIAHST

SEQ ID NO: 16171 - protein, 699 aa, Zea mays
  VARIANT 48: note = Ancestral polymorphism is P, Derived polymorphism is L
  VARIANT 13: note = Ancestral polymorphism is R, Derived polymorphism is K
MAPGLRLAYPWGRDVRRGTPVVVTMENPNYSVVEIDGPEAEALRAGVPPMDKGRGRGRSAKQFTWVLLLRAHRAAGCLASLAAVTWALPSAVAKRFRRAAAAEGVGRGRGWLLYRFIKVLLALSLLALTVELAAYWKGWHFQRPNLTMPEFHVPEVEDIQGWLHTAYLAWMSFRADYIRRPIEFLSKVCILLFVVQSLDRLVLCIACFWIKLKKIKPRLEGDPFREGSGYLHPMVLVQIPMCNEKEVYEQSISAVCQLDWPRDKFLIQVLDDSSDESIQMLIKAEVSKWNQQGVNIVYRHRVLRTGYKAGNLNSAMSCDYVKNFEFVAIFDADFQPSTDFLKKTIPHFDGNPELGLVQARWSFVNKDENLLTRLQNINLCFHFEVEQQVNGVFLNFFGFNGTAGVWRIQALEESGGWLERTTVEDMDIAVRAHLNGWKFIFLNDVKVLCEVPESYEAYRKQQHRWHSGPMHLFRLCFPDIITAKISSWKKANLILLFFLLRKLILPFYSFTLFCVILPLTMFVPEAELPVWVICYVPICMSFLNILPSPRSFPFIVPYLLFENTMSVTKFNAMVSGLFKLGSSYEWVVTKKSGRSSELDLLTSEEKNRKCTTLPQLQNQLPENSELVEINVRKEQREKVPNDAKRGNKIYKKELALSLLLLTAATRSLLSAQGIHFYFLLFQGMSFLAVGLDLIGEQIS

SEQ ID NO: 16172 - protein, 419 aa, Zea mays
  VARIANT 167: note = Ancestral polymorphism is E, Derived polymorphism is V
MAPPRSLAGAAIAATAAAIILSCNLSLFPHLIVSSSKFPASTSPPSPTCLSGYPTGLFYRRKCARLAARVRELEASLAVTAEKAAAERRGRVRAQQSLRALSQLEPGSDEARPTKAAASASYPLVPIGTVESCFSTRNGTPRQPLVVTLARATLVLDPARVPAAALEGLASYSHCWILYVFHLNTDLDKLWKDPARSKLKAKVRVPRLKGGKMGVLATRSPHRPNPIGLSVAKVEAVNGHTLLLSGVDLVDGTPVLDIKPYLPYSDSVKGAAVPSWLEVDGALAVESVHFSEHFISALSTCWMHVQMSLYASADEFQDLIKQALSWDIRSISQRNRPHQVSVEADANGHCGEDTDDDHHHRDTGRYGVVYHLHLEGIDVSYRIDQGSNIFVEDATLLPDAVQKRHGYLAWRDKLGSSVL

SEQ ID NO: 16173 - protein, 219 aa, Zea mays
  VARIANT 190: note = Ancestral polymorphism is T, Derived polymorphism is I
  VARIANT 158: note = Ancestral polymorphism is P, Derived polymorphism is S
  VARIANT 76: note = Ancestral polymorphism is M, Derived polymorphism is T
  VARIANT 8: note = Ancestral polymorphism is R, Derived polymorphism is C
  VARIANT 1: note = Ancestral polymorphism is M, Derived polymorphism is L
MSLVREIRRRSCGARGEPAAAVNLGSLLVSCANYITGLATFGDRFSSEHKAKFLSAMAVVLSSGSGFCVSDLFSSMQFLDVATGIIEACEARQKVKNAEAVEDDNILSTMLRIKDEEEFDFPFNITHIKAVIIDLFIGGTETTSSVAEWVMSELMRNPEAIAKAQVEVRRALDSKNPGDHESLLGCLSYIGMVIKETMRLHPSLPLLLPRLCSYGHVGE

SEQ ID NO: 16174 - protein, 952 aa, Zea mays
  VARIANT 188..952: note = Derived polymorphism lacks residues 188 to 952
MELAARTTSFVVFFILSFAQRAPTSEAATLNVGVILNLQSLVGKMARTSILMAMEDFYAVHRNYTTKLVLHIRDSSADSVQAASEAVDLLKNYNVRAIIGPQKSSEATFVANLGNKSQVPVISFTATSPTLTSGSMPYFLRATPSDTAQVNCIAALIKGYGWREVVPIYEDTDYGRGIIPYLVDSLQEFGASVPYRSVISVSASSDQVEQELYKLMTMQTRVYVVHMLSSIASTLFMKANELGMMSEMYAWVLTDGIANIIDSLNPSILDSMNGALGVKFYVPKSKELDDFTPRWTKRFKQDYPNDPSAQLGIFGLWGYDTIWALAQAAEKVNMVDDMFQKQQDKKPSTCFGTLGISTVGPKLIDAILHNTFRGLSGDFDLKKRQLQPSTFQIINIVGRSSQQIGFWTAKHGIIRTLDQNGSKTTNANSMPELNPVIWPGKVYVVPKGWQLPTNGNKLRVGVTSSGYPEFMKAERDPITNATIATGYAIDVFEEVLKGLPYAIPYEYVAFDFEGASYNDFVYQVHLGVYDVAIGDITIRYNRTSYVDFTLPYTESGVAMIVQVKDDTNKNTWVFLKPLTTDLWLGSIAFFIYTGIVIWLLERRINNAELTGSFFRQLGIAIYFSFFADRERIDSILSRLVVIVWVFVLLVITSSYTANLSSILTVQQLQPTVTDVHELIREGEYVGYHNGSYVGNLLEVLGFDRTKIRAYKTSEDFAMHSLKGAKMVVLLLSYMKFPTSSYFLQSIAKVTQWLDQFTNPKALALTSIKNKSDPNRDEKELEIILQNINSQAFPKRSPMINDFSRRILSITEGDVIIQIENKWIGDQHVCQTDGAIASPSSLNFRSFSGLFLVTGVASTSALFIALMMFLYKNKHKIRDSISRVQTRGGYGSAHANRQNQEREVDSNQAQSMHVTVPNDLEDDTCQQEIEVSIEITSPVLDSHRGQALHSVAQ

SEQ ID NO: 16175 - protein, 197 aa, Zea mays
  VARIANT 89: note = Ancestral polymorphism is V, Derived polymorphism is F
MPSTDLRRLTARIVDLPPGSPRSWRTWKQLRGGGFRNTIGMNVVLEACVRCGDVDRALRLFEEIRGPRGCGVDGVLRHPAQVSLLLLKFAAKVESLYGYTNSLLRPCIFPQVLDAPLLVPTSTTVEHVIDLLLREKSEMVVVKSGNMYEGSSRPLGIFSLAMLWSFTSDYSSESDVLDPGVSWATKPKQDVDTYNHG

SEQ ID NO: 16176 - protein, 141 aa, Zea mays
  VARIANT 27: note = Ancestral polymorphism is P, Derived polymorphism is L
MDPNKGETAGGGGGGEGDLDLNLSLQPMLAPEPEPPGYFSCTYCDKKFYSSQALGGHQNAHKFERSVAKRARELAAAGRAGHGGERASGAEEEARSVIGKEMGIARSVSAPSSSSSHQIRAPPEASRNNNLADDIDLSLKL

SEQ ID NO: 16177 - protein, 151 aa, Zea mays
  VARIANT 10: note = Ancestral polymorphism is A, Derived polymorphism is V
  VARIANT 48: note = Ancestral polymorphism is G, Derived polymorphism is S
  VARIANT 68: note = Ancestral polymorphism is I, Derived polymorphism is V
  VARIANT 99: note = Ancestral polymorphism is K, Derived polymorphism is T
MAPKAEKKPAAKKPAEEEPATEKVEKAPAGKKPKAEKRLPAGKSKEGGEGKKGKKKAKKSVETYKIYIFKVLKQVHPDIGISSKAMSIMNSFINDIFEKLAAESAKLARYNKKPTITSREIQTSVRLVLPGELAKHAVSEGTKAVTKFTSS

SEQ ID NO: 16178 - protein, 103 aa, Zea mays; identical to SEQ ID NO: 2445
  VARIANT 37: note = Ancestral polymorphism is R, Derived polymorphism is S
  VARIANT 41: note = Ancestral polymorphism is R, Derived polymorphism is S
  VARIANT 73..103: note = Derived polymorphism lacks residues 73 to 103

SEQ ID NO: 16179 - protein, 103 aa, Zea mays; identical to SEQ ID NO: 2445
  VARIANT 4: note = Ancestral polymorphism is R, Derived polymorphism is C
  VARIANT 66: note = Ancestral polymorphism is V, Derived polymorphism is F
  VARIANT 93: note = Ancestral polymorphism is R, Derived polymorphism is S

SEQ ID NO: 16180 - protein, 180 aa, Zea mays
  VARIANT 65: note = Ancestral polymorphism is R, Derived polymorphism is M
  VARIANT 71: note = Ancestral polymorphism is M, Derived polymorphism is R
MIGAAVGAVFGGSAAYLINSALPGNAAVAQPQAYALVGMAATLASVCSVPLTSVLLLFELTKDYMILLPLMTLRSVLTRLKLCISMPNFSLSVVTTQGLLITFTSMVLCAQTVSEMYLNAIQTNAHHLIRYLATAVVVNKRRRNMLTELIKVIQQEHHSYKDPVTEFLECLYVNYVVVGF

SEQ ID NO: 16181 - protein, 407 aa, Zea mays
  VARIANT 65..407: note = Derived polymorphism lacks residues 65 to 407
  VARIANT 91: note = Ancestral polymorphism is S, Derived polymorphism is F
  VARIANT 258: note = Ancestral polymorphism is A, Derived polymorphism is G
  VARIANT 283: note = Ancestral polymorphism is G, Derived polymorphism is S
  VARIANT 310: note = Ancestral polymorphism is S, Derived polymorphism is L
MDCAKGRAVADLYDELMVEIFSRVPVKDLRRCTCVCKSWRNLITDPLYRKKLPQTLEGFFHGVVGGPLSYGQFTSLSGSGVGERVTPVDPSFSFITAMLPGVERMVLLDSCNGLLLFGCTREDKFGYIVTNPATKELMTVPASSGSCPPPPPFEWGIDVGERYAHTFLMINPAVSSHFHLVQIWENTAEEEVETVHSYSSETKAWSDRSSKWGRGEEGGEWELWGESVIGFKCGWALVDGLLHFLAFDLQKQDYVIIAVDGEGETCRIIGWHGKDVVAIVFIGQSQDHLHCICVNAELDQGSQVRFTRMSIWVLEDYDTQAWILKHNVSSLQFFELLSHPVEDFHIVAIHPDHNSFILVQHWNQKFVSYNMDTQELRGLCTLEKGYVVVITPYIPCFLESSVLATKH

SEQ ID NO: 16182 - protein, 335 aa, Zea mays
  VARIANT 228..335: note = Derived polymorphism lacks residues 228 to 335
  VARIANT 140: note = Ancestral polymorphism is K, Derived polymorphism is T
  VARIANT 139: note = Ancestral polymorphism is S, Derived polymorphism is L
  VARIANT 137: note = Ancestral polymorphism is A, Derived polymorphism is T
  VARIANT 125: note = Ancestral polymorphism is G, Derived polymorphism is D
  VARIANT 121: note = Ancestral polymorphism is T, Derived polymorphism is M
  VARIANT 105: note = Ancestral polymorphism is R, Derived polymorphism is M
  VARIANT 63: note = Ancestral polymorphism is N, Derived polymorphism is S
  VARIANT 42: note = Ancestral polymorphism is R, Derived polymorphism is G
MGDRRVLLVASPEVVVLCYDGVVSFASVQDVVDVVPSNNQVGTVIRISPGVHRQQVRIPRTKNFITLCGSSIKDTVICWNNRTTTCIKHTQVSGQAAVVRVTADRCAFYGCRFLGWQFISTLAVGASSHCAIYSMFASSKNALAYLSFQVVWRYKHSCHYLVLSFCYYNILTCYANDPGNLTFAWGKQLLKNCYVEGSCDFIFGDSTALLEHCHIHYKSTGYITAHGQKSSSEPTGFVFFNRSWEPFGRVLFVETFVDRCIEPAGWHNWDKPENEQTACFYEYSSSWLALISILRRCSGPGSSVSGQTFINPDIENPWLVHRLGTLVPVSVSSLQ

SEQ ID NO: 16183 - protein, 342 aa, Zea mays
  VARIANT 227..342: note = Derived polymorphism lacks residues 227 to 342
MPTTRWPSLPAGFKLENGMVIVPAIEVAVVDKKADAKKITELEEESPYVDELHEERKCTTVCKELPSVSLATIKMNGKPTCTDIMDYVLQKSEAWNGYRKPPSEQKYSEDVGHIHQGLNFEPTREELNSLAKACSRLWELDMNRIVPGKDYRIDCGEGKKVYQKGDMASESLFSWLGDDVLRKPTYSHFCALLDNYNPHQDKHEEIAFVEEIARTSPIKYLHRYLVQKGVVPQDYEDFKRMLASLWFDLYGRGGNSSCSTAFEHVFVGEIKGRGQGESEFYLEEAKGNVDYQGYIFPRRRGESPDLEIQLLTVQFEWHGVLKSVSNTLIGVSPEFEVALYTL

SEQ ID NO: 16184 - protein, 144 aa, Zea mays
  VARIANT 122..144: note = Derived polymorphism lacks residues 122 to 144
  VARIANT 129: note = Ancestral polymorphism is T, Derived polymorphism is M
MEPVVLNRERAAADRLKRMPIFRLFDDYRDEDFYGLPRKYSIVARVEVKFLIEPRFRDRQHFILSDINGAKIEAITYLYETVKHFDNLLHEKHVYKMHNVKFGLSFVSRVWPVLAGHHRMFWALQYSCTNRGNPIAPVIKLAGK

SEQ ID NO: 16185 - protein, 205 aa, Zea mays
  VARIANT 2: note = Ancestral polymorphism is A, Derived polymorphism is E
  VARIANT 4: note = Ancestral polymorphism is A, Derived polymorphism is V
  VARIANT 9: note = Ancestral polymorphism is L, Derived polymorphism is I
  VARIANT 61: note = Ancestral polymorphism is S, Derived polymorphism is L
MAMAKASILATFAAVAALAAVQLAAAADHPVGGDGSWDASGTTGYDAWSAKQTFKQGDTLSFKFAPSHDVTEVSKAGYDACSGSNPVKSYTGGSASVKLSAPGKRYFICSVPGHCAAGMKLEVTVAAAAVTAAPAPAKTTKPRHQRSVSPTPAPAAAPAAPSTDEMPTVSSPTAAPAPKSSDASTLGAKAVVGLAVATMLTFLAM

SEQ ID NO: 16186 - protein, 414 aa, Zea mays
  VARIANT 160: note = Ancestral polymorphism is R, Derived polymorphism is S
MAAAHLFCSAPAAYRAANPRPLATRGRANPATGTYLVLKGVWCSCAHFPRATPSRRFFPCRASLSPDGSLAMLGAPSPRMAPPMRKPYMREHSCLIFPPPRGRRPLAVIKFLGGAFIGAVPEVTYGYLLELLALEGFVVVCVPYNVTFDHEAAAREVFQSFHACYDALLASGLPEAGLSALDIAELPLYSVGHSNGALLQLLVGSYFSERIPEANAIVSFNNRPASEAVPYFEQIGPLFRQLMPMMEASPVYSMARNASGYAWKALFDLAGGLLREYDQEATVSLSKFIDQLPSVMNQVSEGVSEFKPTPPENREFCKNSYSVPNTLLVKFTVDAIDDTDIVEDVLRPRVDSIGGQIKKVILSGTHLTPCIQDVKWQVGSEYTPADAIAQGLKSLALSETRVLSRTIADWFTSL

SEQ ID NO: 16187 - protein, 252 aa, Zea mays
  VARIANT 135..252: note = Derived polymorphism lacks residues 135 to 252
  VARIANT 194..252: note = Derived polymorphism lacks residues 194 to 252
MVAPSSAATACFVSPLPPPRRPRHFLRHLARAAVAEPTPAPASASSLAHPSPWPWAQRLCDLVPTEAVGRLLSSVVGSLIVALAFASLILGDTDAASAFVVSTPRKLQADELATVRLFQENTPSVVYITNLAVRQDAFTLDVLEVTQGSGSGFVWDKSGHIVTNFHVIRGASDLRLVGTTECFMLSYYTFLVVWLCSNRSLSILVLMDKDVVVLRIKAPKDKLRPIPVGVSADLLVGQKVYAIGNPAYTDLF

SEQ ID NO: 16188 - protein, 157 aa, Zea mays
  VARIANT 53: note = Ancestral polymorphism is V, Derived polymorphism is A
  VARIANT 67: note = Ancestral polymorphism is G, Derived polymorphism is E
MAKGGLSKLKCMIKRWHSSSRISRTPSGCSARSHDVGDAGAGFALENSWRKGAAASSVFAFGGGGTGSASFHGTDGLPPGLHPVYVGKSRRRYLIAADLVGHPLFQNLVDRSGGAGVGAGGTVVGCEVVLFEHLLWMLENADPQPESLAELVEYYAC

SEQ ID NO: 16189 - protein, 395 aa, Zea mays
  VARIANT 13: note = Ancestral polymorphism is Y, Derived polymorphism is H
  VARIANT 226: note = Ancestral polymorphism is C, Derived polymorphism is R
  VARIANT 260: note = Ancestral polymorphism is R, Derived polymorphism is S
MDCAKGRAVADLYDELMVEILSRVPVKDLRRCTCVCKSWRNLITDPLNRKKLPQTLEGFFHGVVEGPLSYGQFTSLSGSGERVPPVDPSFSFITAMLPGVEHMVLLDSCNGLLLFGCIREDKFGYIVTNPATEELMTVPTSSGSCPPPPLVRGERYAHTFLMFNPAVSSHFHLVQIWEDNAVKEVETVHSYSSETKAWSDRSSKWGRGEEGGEWKLWGESVIGFMCGWALVDGLLHFLVFDLQKQENVIIAVDGEGKTCSIIGWHGKDVEAIVFIGQSQDHLHCIGVNVQLDLRFTRMSIWVLEDYDTQAWILKHNVSSLQFFELLSHPIRDFDIMAIHPDHNSFILVQHWNQKLVSYNMDTQELRGLCNLEKGYVVITPYIPCFLESSVLATKH

SEQ ID NO: 16190 - protein, 193 aa, Zea mays
  VARIANT 68: note = Ancestral polymorphism is R, Derived polymorphism is C
MGDDDGAKAASGVKQIVRLRELLHRWHFTALGAKQQQQREEEGRGHAGVPEGAVAPAIPPFVLRRLRRTETADSVSDDESCHSPEPPPDVPRGYCPVYVGPEQRRFVIPTSYLAHPVFRLLLEKAEEEFGFRHQGALAIPCETEAFKYILQCVERHDQGLSGGGGGDGACTRVEAANHPTTTVLEQEPAVRRA

SEQ ID NO: 16191 - protein, 260 aa, Zea mays
  VARIANT 195: note = Ancestral polymorphism is S, Derived polymorphism is A
MATYLNAPPAATTTTASCRHAFSGGSLRLLRPSRPTLHVTCQAAASSQQPSSPSRRSACLLGIACAVLLRPRAASAAETDDEPANNGWWLTEFPLPVPKIVNSKPSRPSCSIHHLTLLGSLTIVSAMSGMAEEINNAETGTRSFLKNGIYMADIGPSFAAHAYRLRSTAFDLLALEDLLGKDASNYVNKYLRLKSTFMYYDFDKLISAAEDKPPFVDLANRLFDSFETLQEAVTAKDDARIGDRYAETKLILQELMAKMA

SEQ ID NO: 16192 - protein, 388 aa, Zea mays
  VARIANT 99: note = Ancestral polymorphism is E, Derived polymorphism is D
MGSEGRVWNGAGVAAGSGYGGSVEAKATTAAPADVPTSAASVDISLPLPEMSPHIIGLCKELVKGWSSIDSSRFSIETVSGGITNLLLKVSVKGNNGNDSSVTVRLYGPNTDLVIDRKRELQAIPYLSAAGFGARLLGMFENGVVQSFIYARTLSPADMKEPKIAAEIAKELRKFHQVDIPGSKEPQLWNDIFKFLKKAAALKFEDNEQQKRYVKISFTEIQDEVKELKDLLDILHAPVVYAHNDLLSGNLMLNDLEGKLYFIDFEYGSYSYRGYDIANHFNEYAGFDCDFNLYPDKDAQYHFFRNYLHPDRPSEVQAQDMEVLYVETNTFRLASHIYWALWALIQAKVSPIDFDYLGYFFLRYGEYKKQRDSCFALAQSFLSGLRNG

SEQ ID NO: 16193 - protein, 218 aa, Zea mays
  VARIANT 80: note = Ancestral polymorphism is R, Derived polymorphism is P
MAGHAPARDKTTTGFAATCSLLSQFLKEKKGGLQGLGGLAMAPAPAAGAGAFRPPTTMNLLSALDAAKATVGEPEGHGQRTGGNPREAAGEEAQQLTIFYGGKVVVFDRFPSAKVKDLLQIVSPPGADAVVDGAGAGAAVPTQNLPRPSHDSLSADLPIARRNSLHRFLEKRKDRITAKAPYQVNSSVGAEASKAEKPWLGLGQEQEGSDGRQAGEEM

SEQ ID NO: 16194 - protein, 516 aa, Zea mays
  VARIANT 68..516: note = Derived polymorphism lacks residues 68 to 516
  VARIANT 141: note = Ancestral polymorphism is R, Derived polymorphism is W
  VARIANT 145: note = Ancestral polymorphism is A, Derived polymorphism is V
  VARIANT 151: note = Ancestral polymorphism is S, Derived polymorphism is R
MLEATAAASSPRAAAAAVAAGAAAAAVVSSPRRGGGSAHNHRRWAPAPFRACLLALWLLGFALVFLWQSTSVGRVRLYTRPPMPKRAVASLGHWAASPPVYDLREFGAVGDGRTVNTAAFESAIAAIAERGGGRLTVPAGRWLTAPFNLTSHMTLFLAAGAEILGIQDERYWPLMSPLPSYGYGREHKGPRYGSLIHGQDLKHVTITGHNGTINGQGQSWWVKFRRKLLNHTRGPLVQLMRSSNIIISNITLRDSPFWTLHTYDCKNVTISETTILAPIAGAPNTDGIDPDSCENVVIKNCYISVGDDGIAIKSGWDQYGIAYGRPSANITIQNVVIRSMVSAGVSIGSEMSGGVSDVLVENVHVWDSRRGVRIKTAPGRGAYVTNVIYQNITFENVRVGIVIKTDYNEHPDEGFDPKAVPTIGNISYTSIHGHRVRVPVRIQGSAQIPVKNVTFHDMSIGIVDKKHHVFQCSFVQGQVIGYVFPVPCKNLDLYDERRGLVKQSTLQNISDIDYSF

SEQ ID NO: 16195 - protein, 97 aa, Zea mays
  VARIANT 16: note = Ancestral polymorphism is R, Derived polymorphism is G
  VARIANT 18: note = Ancestral polymorphism is C, Derived polymorphism is Y
  VARIANT 25: note = Ancestral polymorphism is A, Derived polymorphism is V
  VARIANT 35: note = Ancestral polymorphism is K, Derived polymorphism is R
  VARIANT 42: note = Ancestral polymorphism is E, Derived polymorphism is K
MRSLPRKELPRNELSRICDVDVEVALSIDDIPHLKWYGVDEEYHVMVIDLLGPILEKLFTSCNRKFSMKTILMLTDQPSSSSIPYSIVNFLKFDTSL

SEQ ID NO: 16196 - protein, 827 aa, Zea mays
  VARIANT 258..827: note = Derived polymorphism lacks residues 258 to 827
MSARGVRPGVLHHKENNPADAQPGKRQRTAAGAGRQPLAAAPPPQEEPMVFSGREDVDALLNEKMKGKNKMDYKVAPPSLSPVSGSYAYLTVAYSCIPPASILVDDSIQVRQGKSEQMMEYIKKLRACTKWLLEREDANLVEIERITGQLDATHKQHSEIVAVLKNTIEETKSICEELQKQCASLQEALKTVEAEKMDALRSLGDEREARMGVESLRNGLLEDLNRAKLEEKRLNDQIKMLQDTNKRLQEYNTSLQQYNCNLQADATKNAETIVKLQKEKNTMVETMNGLKDHANSVKMQLDIARSLQNEATKQKTDLLKEVESIRMELQRAREDRDTKSAQVDSLLVDIGTYKEMTGKSVIELDSAMAKTSALEETCSSQRKMIETLEIKLAAANEKLKRSNMTASETMTEYENMKKMLESVQSRLEEAEQTILEGENLRKKLHNTILVWNSLILKDPVYINICYVAIPEFGSLQELKGNIRVFCRVRPLLPNESGAVSYPKNGENLGRGIELLHNAQGYSFTFDKVFDHSASQEHVFIEISQLVQSALDGYKVCIFAYGQTGSGKTYTMMGNPELEDQKGMIPRSLEQIFQASQTLNSQGWRYKMQASMLEIYNETIRDLLATNRMAVQDVGASKYSIKHDTNGNTNVSDLTIIDVTSINEVSSLLRRAAQSRFLSYLCHCVLKLLFRVPELRIEWHIGPKTGTDQQVQGVLNLIDLAGSERLNKSGATGDRLKETVAINKSLSCLSDVIFSIAKKEEHVPFRNSKLTYLLQPCLGGDSKTLMFVNLSPEASSTGESLCSLRFAARVNSCEIGIPRRQTQMRSSQ

SEQ ID NO: 16197 - protein, 638 aa, Zea mays
  VARIANT 161..638: note = Derived polymorphism lacks residues 161 to 638
  VARIANT 193..638: note = Derived polymorphism lacks residues 193 to 638
  VARIANT 210: note = Ancestral polymorphism is R, Derived polymorphism is H
MEASAAEELAAAKRVIMRWDSTASAACSAGGDDQMLFDGAANRAEAERFLRAVDDLRRLAPPSPASVGSPRRASAAGGVCDAVQVAMARLEDEFRHVLSARALDLEIEALAGLSSLSMASDRRNSDATEEAAAGDDDGSGGGGGSSVSSSVGRRSSYRSLQSIREIDLFPADAISDLHAIAYRMAAAGYGRECVQVYASVRKPAVDSAMRRLGVEKLSIGDVQRLEWDSLEAKIRRWICAARAAVRGVFASERRLCFHIFHDLPLRTSTATAAYATNQDAPFAEAVKGAALQLFGFAEAISIGRRSTEKLFKIIDLHDALSDMLPDISDIFAASKATESIYVQAAEIRSRLADAVRGILSEFENAVLRDPSKTPVPGGTIHPLTRYVMNYISLISDYKATLSELVISRPSASSRTAAEGNEATPSFPDLDPPDPDSQLPLAAHLIWIIVVLEHNLESKASLYKDAALSHLFLMNNVHYIVHKVKDSAELRGLIGNEYLKRLTGKFRQEATRYQRTAWLKILNCLRDEGLHVSGGFSSGISKSALRERFKAFNAAFEEAHRVQSAWYVPDTQLREELRISISEKLLPAYRSFLGRFRHHIENSRHPELYIKYSVEDLEITMADFFEGSPPPHNRRRSHG

SEQ ID NO: 16198 - protein, 447 aa, Zea mays
  VARIANT 324..447: note = Derived polymorphism lacks residues 324 to 447
MAVHLLLAVAVALLLCPGDASVHDYRGLSFANKGNAFILHAGSEGLYAASHANTTAEDDEDTAAVADAFIRFDKVTFRRPEDTNDSVKETSSAKVHILVFEVEDREMIGGSAYGGQKAICCSSDLAKLGACKEGSVIYRPSQVNPGWPKLFVASFEGSDLIATLPSRTIQITKTGMYNMYFIHCDPSLASLEIEGKTIWKNPTGYLPGRMAPLKNFFGLMSFAFVVLGIYWFYQYMKSWKEVLPLQNCITLVITLGMLEMALWYFEYAEFNETGVRPKGITFWAVTFGTVKRTAAEVIVLIVSMGYGVVAPTLGGLTSKVVMLGGTFFLATEILELVENLGAVNDLSGKARLFLVYPVAILDAAFVVWIFISLAKTIGKLQARRLMAKLDIYRKFATALIVSVLVSVGWIGYEVCLFMSKPNSNSRIIKGVLLRFTKLVGFLFSVCS

SEQ ID NO: 16199 - protein, 120 aa, Zea mays
  VARIANT 33: note = Ancestral polymorphism is A, Derived polymorphism is V
  VARIANT 26: note = Ancestral polymorphism is A, Derived polymorphism is T
  VARIANT 1: note = Ancestral polymorphism is M, Derived polymorphism is L
MVTSKARAREMVAGKKRSTLKPRSVASLLRLLACKGGFATPVLEPRSPFPQSRMEKLLKAILEKKIHPQNPSTAAARRHQLDWKLDEKEIDECLDDALRDLDDDGAKWVKTDSDFIVLEM

SEQ ID NO: 16200 - protein, 563 aa, Zea mays
  VARIANT 81..563: note = Derived polymorphism lacks residues 81 to 563
  VARIANT 284: note = Ancestral polymorphism is T, Derived polymorphism is I
  VARIANT 312..563: note = Derived polymorphism lacks residues 312 to 563
  VARIANT 367..563: note = Derived polymorphism lacks residues 367 to 563
MSRIRSGVEVVASRGCARMVIPGMHHNPSSAASVSSSAASRAAPAAGSGPAAHADGPFAGLVICVTGLSKEARVQVKEATERLGGEYSGSLHPKCTHLVVQISFARHDRRHSFAGRKFEHALKHGPRNGLFLVTLGWFVDCVRRNMRLDESLYAIKSIGENGVPPGEFSRLVGVPVNEKSCLPPLIFQDKACSDMTQKHSLQTPGNGGGHDGLVFMNDTIYIDPGISDEMRKKISDAVTREGGKLLEHWFIGCPTTYIVCEDVCVKRYVGHSENIVTPLWILKTVKEKNLQRLVHLSSDLARHVAMVLENVQTSEENRKLGSVPSINTSSCGRPSTKEEINEVHQAKQKFVEGAKKEVRDRRARRMQSCEVTIHPITPATLLDSICWTISEPTSSASIYMDSSWSDDANEQQSTTYFDANGDVRDPDQPNDNFSRPLKESERSELIFKNHFLTILFPVDRFGELGPSSKTFYNNGGFTCIQVLNHIYNFYQENMSTNEIDMALHTDSRHADRLRSLYSSAESAEKGLVAFKRIDFLGSRRSFEALKRINRENSSNVYELVIRA

SEQ ID NO: 16201 - protein, 155 aa, Zea mays
  VARIANT 25: note = Ancestral polymorphism is P, Derived polymorphism is A
  VARIANT 91..155: note = Derived polymorphism lacks residues 91 to 155
  VARIANT 112: note = Ancestral polymorphism is M, Derived polymorphism is K
MMHMTFYWGKSATILFDGWRTSTWPDYLLSLAALLLAAAFYQYLEALRVRVKLVAGGGAKPAPSSIIPPPAGSDPRTPLLAPAFAAGAGRWPARLAVAAMFGVNSGLGYLLMLAVMSFNGGVFVAVVVGLALGYLAFRSSDGEDLVVVDNPCACA

SEQ ID NO: 16202 - protein, 71 aa, Zea mays
  VARIANT 59: note = Ancestral polymorphism is T, Derived polymorphism is I
  VARIANT 57: note = Ancestral polymorphism is H, Derived polymorphism is Y
  VARIANT 49: note = Ancestral polymorphism is S, Derived polymorphism is Y
  VARIANT 48..71: note = Derived polymorphism lacks residues 48 to 71
  VARIANT 36: note = Ancestral polymorphism is D, Derived polymorphism is N
  VARIANT 35: note = Ancestral polymorphism is S, Derived polymorphism is L
  VARIANT 24: note = Ancestral polymorphism is G, Derived polymorphism is D
  VARIANT 22: note = Ancestral polymorphism is S, Derived polymorphism is G
  VARIANT 17..71: note = Derived polymorphism lacks residues 17 to 71
  VARIANT 10: note = Ancestral polymorphism is A, Derived polymorphism is P
MFTLPPPSFANLWVFSQGSFSSNGLTISSKLPRFSDMYTLTIASVDPQSIAANKPIHFTKSVTKWYVPSDL

SEQ ID NO: 16203 - protein, 127 aa, Zea mays
  VARIANT 40: note = Ancestral polymorphism is R, Derived polymorphism is M
  VARIANT 39: note = Ancestral polymorphism is G, Derived polymorphism is E
  VARIANT 37: note = Ancestral polymorphism is A, Derived polymorphism is T
  VARIANT 36: note = Ancestral polymorphism is F, Derived polymorphism is I
  VARIANT 12: note = Ancestral polymorphism is R, Derived polymorphism is M
MLFRVSGRQRRRRRMAVARLGDACDGAALRRGGRTFALGRIVLPRLRLRALLLRSRRLLARLRNYYADMMKGLIADAAAAEPAKARRVVETGTGETLVHAGRPAPAAVVPAAVAGAVLRCNSHYYIR

SEQ ID NO: 16204 - protein, 162 aa, Zea mays
  VARIANT 47: note = Ancestral polymorphism is P, Derived polymorphism is L
MEAHPTGAAIPSPMAAPQPPPSSTTTPPPTATPQEPAATAVTAVRSPQPVRFAFLVVAALMSASWFVEPFSAAAAADLRVPWPAVVATLVCFTALFCASVLLFGSFFMLRPPLAAAVMDAQWKGVRAFAAVFAAVAIGVAACLVGASGSAYGSGGMHQLVAE

SEQ ID NO: 16205 - protein, 230 aa, Zea mays
  VARIANT 26: note = Ancestral polymorphism is P, Derived polymorphism is H
  VARIANT 40: note = Ancestral polymorphism is R, Derived polymorphism is H
MAAPSLSRGGCRRHLTLVLAELALSPVVPLPAEANTPSPRPSLLDSPIPGLPRLRPHLLPMVGMAATLASVCSVPLTSVLLLFELTKDYRILLPLMIGPDHIEALYQYAKFQFECGNYSGAADYLYQYGALCTNSERNNFSSPLNQLQNRIWLMHWALFIFFNHIRYLNAIQTNAHHLIRYLATSVVVNKRRRNMLKELIKVIQQEHHTYKDPITEFLECLYVNYVVVGF

SEQ ID NO: 16206 - protein, 246 aa, Zea mays
  VARIANT 37: note = Ancestral polymorphism is A, Derived polymorphism is T
  VARIANT 38: note = Ancestral polymorphism is A, Derived polymorphism is T
MDSVPSPSSSTRATAAPGPCCRFDALRRACARHAAAAARAAGWALGALLTCVFAVVGSLVGIFIGAFMGMSTESGMFRGAGVGAVSGAVFSIEAVESCIEIWRSSHSGKYSILYVLDIISSLFSGRIVWEKVSPALQRAVQSQMSLMSTPFIDNNDLFETGSTGGMSRALIDRIPKMRFSAASNCDKETDSSCCSVCLQDFGAQQFVRALPQCQHIFHVRCIDNWLLRHASCPLCRAGVHIDHIHM

SEQ ID NO: 16207 - protein, 525 aa, Zea mays
  VARIANT 259..525: note = Derived polymorphism lacks residues 259 to 525
  VARIANT 122: note = Ancestral polymorphism is P, Derived polymorphism is A
MSPEAGPIMRPADQLLLPFLLLAVASVAAAGGSWENGYGSILRLPSSSPRRFPRSAAVDLIHALNLHPADASPPLSTAGVEGALAPAGTLVERPIRIASFANGGAATSVEDLGHHAGYYRLANTHDARMFYFFFESRGHKDDPVVIWLTGGPGCSSELALFYENGPFNIADNLSLVWNDFGWDKASNLIYVDQPTGTGFSYSSDSRDTRHNEATISNDLYDFLQAFFAEHPKYAKNDFFITGESYAGHYIPAFASRVHQGNKNNEGIHINLKGFAIGNGLTDPAIQYKAYPDYALDMGLITKTQFNRINKIVPTCEFAVKLCGTSGTVSCLAAYFVCNTIFSAIRTIIGNKNYYDIRKPCIGSLCYDFSNLEKFLNLKSVRESLGVGDIEFVSCSPTVYEAMLLDWMRNLEVGIPELLESDIKVLIYAGEYDLICNWLGNSRWVNSMEWSGKEAFVSSSEKPFTVDGKEAGVLKSHGPLSFLKVHDAGHMVPMDQPKAALEMLKRWTSGNLSEPSSSSQRLDFTM

SEQ ID NO: 16208 - protein, 769 aa, Zea mays
  VARIANT 453: note = Ancestral polymorphism is F, Derived polymorphism is S
  VARIANT 481: note = Ancestral polymorphism is P, Derived polymorphism is L
MEVSQISACERERAPTRPNGKAVIAVPRLTVSLCVCLLTPVSRLLFSHYAVFARSSSSVLTSPPSSINGASPNFAISAETTWGLGRKGYCHFRGRPGRLHRIHMGYQPMHGNGGTAGAGTSGSGGGGGGDHLRHHQQQRLHSPRMAGGGSMTRRASSFKRGGGGEIELQIGSPRSPRCDGLGSPPSDSVESSGSGLLLHQSQQNQHLRFRLFKPPVSGGSAVGLGLGIRERRKLGNMLFLAFCGVCLLLGVVKILAGGWFALPGNDKDADLKIGTNEKLSVQTDSEHSCSIRTSPPVVRLPTRAQTLVRTKRPLAVFPKSMSACGNHALLPDLSISFSGEKVHQADHHFVYMGGKESDRTLMTVESSIGGREDGVAEASSISLPRPILLPLISGLSQAVQISDNALFQTLIKICDMVAVAKILKATLVLPSLDHTSYWADDSEFKDLFNWRHFIESLKEDIDIVETLPPEYSDIEPLAKAPVHYYRDEILPLLKKHKVIYFTHTDSRLANNGLPSYIQKLRCRVNYRSLNHKFLELQQQIILQKYEKDMLAFTGCSHNLTSEEEEELRKMRYEVSHWKEKEINATERRSLGGCPLTPRETSILLKGLGFTRSTRIYLVAGEAFGNGSMNALKDDFPNIYSHSTLATEEELAPFKNHQNMLAGLDYIVALQSDVFIYTYDGNMAKAVQGHRRFENFRKTVNPDRMNFVNLIDEFDGGRVPWDIFSSEVKRLHKDRIGAPYFREPGEFPKLEESFFANPLPGCICEQHSEE

SEQ ID NO: 16209 - protein, 250 aa, Zea mays
  VARIANT 28: note = Ancestral polymorphism is S, Derived polymorphism is W
MPPVKWYRTHTSRTFFSLLPLRLKPRFSARRLMHWHPSPGATLNSQILAEACGCAESLGGSKDGRWKTSIFFYRAMTRDGAGGPAVQQHPDLPRELLGVALHERPGLYFSIVRAQRLVLQADAAFPQVMEKLQSYRIRVALNFEGFQYQLGDFCLRIGKCVPNNSEALRGIMMEVEYYPLTSIEKSKAVMEDFFDIWQETVAKKSLPGQFIHVDSNFSEYGLSDQYSFQHTAVQYATCLQQLMAAVTVRG

SEQ ID NO: 16210 - protein, 404 aa, Zea mays
  VARIANT 24: note = Ancestral polymorphism is V, Derived polymorphism is M
  VARIANT 251: note = Ancestral polymorphism is E, Derived polymorphism is K
  VARIANT 346: note = Ancestral polymorphism is A, Derived polymorphism is V
  VARIANT 350: note = Ancestral polymorphism is D, Derived polymorphism is Y
MDCAKGRAVADLYDEVMVEILSRVPVKDLRRCTCVCKSWRNLITDPLNRKKLPQTLEGFFHGVVGGPHSYGQFTSLSGSGERVAPVDPSFSFITAMLPGVERMVLLDSCNGLLLFGCTREDKFGYIVTNPATEELMTVPASSGSCPLPPPFERDMVGGERYAHTFLMFNPAVSSHFHLVQIWENKAAKEVETVHSYSSETKAWSDRSSKWGRGEEGGEWELWGESVIGFMCGWTLVDGLLHFLAFDLQKEETVIIAVDGEGETRRIIGWHGKDVRAIVFIGESQDHLHCIGVNVQLDQGSEVRFTRMSIWVLEDYDTQAWILKHNVSSLQFFELLSHPIKDFHIVAIHPYHNSFILIQHWNQKLVSYNMDTQELHGLGTLGKGYAVITPYIPCFLESSVLATKH

SEQ ID NO: 16211 - protein, 407 aa, Zea mays
  VARIANT 32: note = Ancestral polymorphism is S, Derived polymorphism is C
  VARIANT 324: note = Ancestral polymorphism is K, Derived polymorphism is R
MDCAKGRSMADLYDELMLEIFSRMPVKDLRHSTYVCKSWRNLITDPLNGKKLPQTLEGFFHGGVGGPRSYGHFTSLPGSGVPPVDPSFSFIKAMVPGVERMVLLDSCNGLLLFGCTREGKFGYIVSNPATKKLVTVPASSGSCPPPPLFAFEAEVDYDSGEKYAHTFLMFNPAVSSHFHLFQIWQDMTVEDVETVHSYSSETKAWSDRSSKWRRGEEGSEWGLWGECLIKFRMGRALINDLLHFVGFDSQKQEDVIVAVDGEGKTCRIIDWHGKDVRLIIFIGQSQDRLHCIGVNTKAGQDHIHITRMSIWVLEDYDTKAWILKHSVGSLQFFGLLGRLVHDFNIVAIHPDHNSIIIVQHWNQKLVSYNMDTQELRGLRTLENGCAYVAITPYVPCFLESSVLATKG

SEQ ID NO: 16212 - protein, 347 aa, Zea mays
  VARIANT 30: note = Ancestral polymorphism is G, Derived polymorphism is R
  VARIANT 39: note = Ancestral polymorphism is A, Derived polymorphism is S
MERRGHCHGGKPPHPHPPPRRVRTRQPSSGSFSASLLDAIYRSLDDGDGADVVVDAARGSVEEKAAATATAQFWWLNKAAAPKPCRQSSSTADRDRRRREAGVARPRHSGSGYASSTASSSDSSAASYSSLSCSSASTVGIESTCRRHGLPPPRVSLSEESVATDAEETTPPPPNSKPKKKARPCFPVARIRPRASVPPPSSGPQPPSSPATFACALKALFSSARLQRKPKAPAPARTTPPPKISHPPRMSTTSAAKAADAPQPSEPTTVRLHPEAEASVVRRRVEELVRGLEELEEDEERSDASSDLFELESLRGAGADELPVYGTTSLVANRAIAQGPGGQLVNK

SEQ ID NO: 16213 - protein, 273 aa, Zea mays
  VARIANT 102: note = Ancestral polymorphism is A, Derived polymorphism is E
MALKASGAYRHCKPCAGSSAAASRRHHPYHHRGGSAFGGSDAGSASDRFHYAYRRAGSSADATTSMSVRTDFPAGDGEDDEVASEAAGGCGGKDDDAKEWVAQVEPGVLITFVSLAQGGNDLKRIRFSREIFNKWQAQRWWAENYDRIMELYNVQRFNQTVPLVPTTPKSEDELSSISGAKTETSSMDASMRTSSSPEEVDRSGELTVSISNASDQEREWVEEDEPGVYITIRALPGGTRELRRVRFSREKFSERHARLWWEENRARIHEQYL

SEQ ID NO: 16214 - protein, 308 aa, Zea mays
  VARIANT 260..308: note = Derived polymorphism lacks residues 260 to 308
  VARIANT 84: note = Ancestral polymorphism is A, Derived polymorphism is T
MGGGTPRSSIGHILPGAGFLAVGLWHLFNHIRLFSLRPDAYVAPVWFPAPRVRHLELILVIAGSAVEFSMEMFVDHSTFLPFDADGSIPSDRLHNHEHAIICLALLVYAASALHLDRARARCRDALSLLLVAAVFAQELLVFHFHSTDHAGLEGQFHWLLQLVVAACLATALLGIGFPRSFAVSLVRSACVTFHGVWFMVIGAMVWVPSRVPKGCSLVEEDGRNTVRCHSEASLHRAKALANLQFGWYLSSMTVFVVVLYVNVCKWYPAETAYVRLPPEAGEEEEHLKRKCGIVCSGDHGFTPLEIEV

SEQ ID NO: 16215 - protein, 110 aa, Zea mays
  VARIANT 46: note = Ancestral polymorphism is E, Derived polymorphism is K
  VARIANT 53..110: note = Derived polymorphism lacks residues 53 to 110
  VARIANT 54: note = Ancestral polymorphism is A, Derived polymorphism is V
  VARIANT 68: note = Ancestral polymorphism is T, Derived polymorphism is M
MDDCGGGGKRPFQLARSLTYHHHPGHRPAAASRWRRQHQQHQLADEPRAPRPQAVVLYTTSLRGVRRTFADCVAVRDILCGCRHPATAQPHKGRPIACSSLQRFHARRCH

SEQ ID NO: 16216 - protein, 438 aa, Zea mays
  VARIANT 96: note = Ancestral polymorphism is P, Derived polymorphism is R
MSEKFDLLIVGRRGGEGEGDPEGSTALTSGLSESSEFPELGVLGDMLASAEFASKVSILVIQQQPPKKTIATIKLFCFLALAAKRGLTDWEGGYFPVTLHFTENYPSNPPTCKFPRRGHDMVTFSYCYRTAVTNGGAIKHDGSYESDPAVEILRISFIKDSAALRTLEDLSFSKEGLFELNSKVLLHFFYSRLVPLVLLLVEGSTPIDIGEHGWEMLLVVKKATQEAGSKFELLGFAAVHNFYHYPESIRLRISQGEGHGLGLLEAINYIAQSENIYDVTIESPSDYLQYVRSSVDCLCLLMFDPIKPALGAIVSSLKETNLSKRAQSLRMDHKSMDNFRACIYDLMKGEILGSASGTNRKRLLQMPTSFNKEASFVVYWTHEIGDEDEQTVEQQPEYLRTQEQQLNELVDIQIEEIDGVAKNVTSCGKDKMAELAVQ

SEQ ID NO: 16217 - protein, 851 aa, Zea mays
  VARIANT 41..851: note = Derived polymorphism lacks residues 41 to 851
  VARIANT 49: note = Ancestral polymorphism is P, Derived polymorphism is L
  VARIANT 60: note = Ancestral polymorphism is E, Derived polymorphism is K
  VARIANT 67: note = Ancestral polymorphism is A, Derived polymorphism is T
  VARIANT 68: note = Ancestral polymorphism is A, Derived polymorphism is T
  VARIANT 69: note = Ancestral polymorphism is S, Derived polymorphism is L
  VARIANT 86: note = Ancestral polymorphism is S, Derived polymorphism is F
  VARIANT 90: note = Ancestral polymorphism is R, Derived polymorphism is C
  VARIANT 95..851: note = Derived polymorphism lacks residues 95 to 851
  VARIANT 96: note = Ancestral polymorphism is P, Derived polymorphism is S
  VARIANT 97: note = Ancestral polymorphism is L, Derived polymorphism is F
  VARIANT 147: note = Ancestral polymorphism is G, Derived polymorphism is W
  VARIANT 172: note = Ancestral polymorphism is T, Derived polymorphism is I
  VARIANT 264..851: note = Derived polymorphism lacks residues 264 to 851
  VARIANT 271..851: note = Derived polymorphism lacks residues 271 to 851
  VARIANT 326: note = Ancestral polymorphism is A, Derived polymorphism is V
  VARIANT 351: note = Ancestral polymorphism is G, Derived polymorphism is V
  VARIANT 665: note = Ancestral polymorphism is F, Derived polymorphism is S
  VARIANT 672: note = Ancestral polymorphism is Y, Derived polymorphism is N
  VARIANT 721..851: note = Derived polymorphism lacks residues 721 to 851
  VARIANT 735..851: note = Derived polymorphism lacks residues 735 to 851
  VARIANT 779: note = Ancestral polymorphism is G, Derived polymorphism is E
MTDQQTQDLVKELVHRLLSAAESGGRGGGRDTGGALRFAHRILSSRLAPAVLPDEHALAESIKRRLAASGRPDDALSFADLHSKLSVRARPASLWPLLYLLDSLSSQYRAAAAASCLPNLPIAALPQNATSGTAPGAGVRPGSRTHGAPPGGLVLVSKDPDNIREIALREYTELVIDETEVSEAALVRDVLYACQGIDGRYVRYDKSVDSYDLPDGVRVPRSTRTLVRKLCELGWLFSKVRGFISDNISRSPSDAATEVGTVTQAFCSALQEELSDYYKLLAVLESYSLNPIPTPGSDSGVSSNYLSLRRLAVWLAEPAVRMRLMAVLVDGCRGLRGGAMAGVIHGHAQHGDPMFQEFMGRLLRRVCSPLFEMVRSWVLEGELEDVFAEFFIVGQPVKAESLWREGYLIQSDMLPAFISPVLAKRILRTGKSINFLRVCCDDSGWADAAAEAAAYVGTTTSRGGLGYGETDALEALVVEAAKRIDRHLMDVIHKRYRFKDHCLAIKRYLLLGQGDFVQYLMDVVGPELSEPANRISSFQLAGLLETAIRASNAQYDDCDILDRIKVKMMDHGDGDRGWDVFSLEYDARVPLDTVFTASVMKMYLKVFNFLWKLKRVDHSLTGVWKTMKPNCIVSSPFYKEGTSIRAQFVSVLRKCQVLFNEMNHFVTNFQYYIMFEVLEVSWARFSDEMDAAKDLDDLLLAHDKYLNSILEKALLGEHSQGLLRNLFELFDIILQFRSHADRWFERIYELQLRGKGKSKSKDTGSWFDGGRKAMIQLAGELFWKMGEDLDSIAKDYTASLDAFITQLPMQQHVDLKFLLFRLDFTEYYRLMLMCRFNEAKATHFMQLCTQL

SEQ ID NO: 16218 - protein, 133 aa, Zea mays
  VARIANT 127..133: note = Derived polymorphism lacks residues 127 to 133
  VARIANT 124..133: note = Derived polymorphism lacks residues 124 to 133
  VARIANT 83..133: note = Derived polymorphism lacks residues 83 to 133
  VARIANT 79: note = Ancestral polymorphism is A, Derived polymorphism is V
  VARIANT 23: note = Ancestral polymorphism is E, Derived polymorphism is K
  VARIANT 15: note = Ancestral polymorphism is E, Derived polymorphism is K
MDDDLREMRLSLLTEIERRKQAEEALEIWQKEWKKLSHHLSHVALSLPSPSIAEDTDDSSIDPGAELCQQITVSQLVAAVISQDFARAEVESEMETVIAAKNFEIARLSDRVQYYEAANREMSQRNQEAIDWF

SEQ ID NO: 16219 - protein, 224 aa, Zea mays
  VARIANT 40..224: note = Derived polymorphism lacks residues 40 to 224
  VARIANT 86: note = Ancestral polymorphism is G, Derived polymorphism is S
  VARIANT 108: note = Ancestral polymorphism is P, Derived polymorphism is S
  VARIANT 140: note = Ancestral polymorphism is N, Derived polymorphism is K
  VARIANT 141: note = Ancestral polymorphism is S, Derived polymorphism is F
  VARIANT 142: note = Ancestral polymorphism is R, Derived polymorphism is H
  VARIANT 174: note = Ancestral polymorphism is L, Derived polymorphism is I
MDNNSIHVFHFRQMWETSMEGQLSLTKKTTPSNYYYICEKNGGSLSDKMDELACFAPDMLALGASGYGPEKSEQIMNMAKEVNPCGNPPGFRRFQDMSVGTSWNILRPETVESLMYLWRLTGNTTYQDWGWDIFQAFEKNFRVEFGYVGLRDVNTGEKDNMMQSFFLAETLKYLYLLFFPPSVISFEDWVFNTEAHPLRIAPVNGNKGIGTPVRPFGRKQGKPE

SEQ ID NO: 16220 - protein, 333 aa, Zea mays
  VARIANT 100..333: note = Derived polymorphism lacks residues 100 to 333
MELALSLGETMADAGRDLMLGLGMGVGVRREEEAQRGRRDREVRRELEFTARSARSSPEPAVRLTLLHGLGLPWPPPPSSETNRHLEASARGFDVNRAPSLSAAGGAAEEDEEQDEAAAAAASSSPNNSASSFPTDFSAQGQVAPGADRACSRASDEDDGGSARKKLRLSKEQSAFLEDSFKEHATLNPKQKLALAKQLNLRPRQVEVWFQNRRARTKLKQTEVDCEYLKRCCETLTEENRRLQKELSELRALKTVHPFYMHLPATTLSMCPSCERVASNSAPAPASSPSPATGIAAPAPEQRPSSFAALFSSPLNRPLAAQAQPQPQAPANS

SEQ ID NO: 16221 - protein, 666 aa, Zea mays
  VARIANT 634: note = Ancestral polymorphism is G, Derived polymorphism is R
MSSINYEQAGNDLRKDLALAYKTLGVVFGGLVTSPLYVYPSMNLSSPTKDDYMGLYSIMFWTLTLIGVVKYVGIALNADDHGEGGTFAMYSLLCRHADIGILPSKKVYLEEEPLLRNQSAAARRPSWLGKFFERSITARRALLFMSILGMCMLIGDGILTPAISAVVEALSAVILIGLFLLQKYGTSKVSFLFSPIMAAWTFTTPIIGLYSIVHYYPGIFKAISPHYIVRFFLRNKKEGWRMLGGTVLCITGAEAMFADLGHFSKKGIQIAFLSSIYPSLVLTYAGQTAYLINNVNDFSDGFYKFVPRPVYWPMFIIATLAAIVASQSLISATFSVIKQSVVLDYFPRVKVVHTSQHKEGEVYSPETNYILMVLCVSVVLGFGAGNAIGNAFGVVVIMVMLITTVMLTLVMIIIWRTPPVLVALYFVPFVVMEGSYVSAVFTKIPEGGWLPFAVSIILAMVMFGWYYGRQRKTEYEIANKVTVERLGELLAKPEVQRVPGLCFFYSNIQDGLTPIVGHYIKNMSSLHAVTVFVTLRYLLVAKVDERERVLVARLGPDGVYGCTVQYGYADSLSGGDLTAQVTGSLRRHFGTAEAGAEEAARLEAARTNGVVHVRGKMRFYVGEDAGWFDKVMLGFYEFLHGICRSALPALGTPLQQRVEIGMLYKV

SEQ ID NO: 16222 - protein, 37 aa, Zea mays
  VARIANT 29: note = Ancestral polymorphism is A, Derived polymorphism is T
  VARIANT 20..37: note = Ancestral polymorphism lacks residues 20 to 37
  VARIANT 16: note = Ancestral polymorphism is D, Derived polymorphism is Y
MNVVVLCNIYAQSSLDLGGQVNDNYIMLTSSDVDMPI

SEQ ID NO: 16223 - protein, 337 aa, Zea mays
  VARIANT 59: note = Ancestral polymorphism is S, Derived polymorphism is F
  VARIANT 143..337: note = Derived polymorphism lacks residues 143 to 337
  VARIANT 215: note = Ancestral polymorphism is S, Derived polymorphism is L
MSPIVPPKPLPFLTTLTTRFSLACLPTRRFTQTCCSSAGHRGPAVAATPRPGGVCRVHSPLRSLLLASAATSARTAAAAEDMSDPELRLVLELATDEELMEVEEILYGTRGWRPSYRDVLLRVRKKIGVQCSSKLCTADLEAEIFLHLVNEYSSHQKDRLSFPWDKRKSPNNISSLGANKWKMLTDVAWRIGTKGMESTFLKGGSALTMKTIYESLANRLTGKLLKEAANYKIKKELVKQGLVRAASRYVGLRSVVTFLGPILWGTLLADIVIQMLGTDYARIVQAVYAFAQIRLTRTSYVESDGEGPESPSDSAGSSANTPRDNEVIASDFGVLYC

SEQ ID NO: 16224 - protein, 262 aa, Zea mays
  VARIANT 142: note = Ancestral polymorphism is S, Derived polymorphism is I
  VARIANT 164: note = Ancestral polymorphism is L, Derived polymorphism is F
  VARIANT 185: note = Ancestral polymorphism is E, Derived polymorphism is K
  VARIANT 187..262: note = Derived polymorphism lacks residues 187 to 262
  VARIANT 191: note = Ancestral polymorphism is Q, Derived polymorphism is P
  VARIANT 194: note = Ancestral polymorphism is L, Derived polymorphism is R
  VARIANT 201: note = Ancestral polymorphism is K, Derived polymorphism is N
  VARIANT 209: note = Ancestral polymorphism is A, Derived polymorphism is D
  VARIANT 222: note = Ancestral polymorphism is N, Derived polymorphism is I
  VARIANT 223..262: note = Derived polymorphism lacks residues 223 to 262
MRILEEEHVDINADDNNVSDHENMSHSSDAHAQFGSVDEQPDIYDPRNWDNLDNKSRDILIEKGPIREEGIEFPLDDASKHFSYAHYYIKLSNGELYDRKWLVYSKHVDKVFCFCCKILKSSTSNSLSSLAHNGCRNWRNISTKLREHDNSVEHFQNMNKWNELRTRMQKEETIDKDLQKQINKEKERLRQVLLRIIAIVKFLGKHNLAFRGSIEQLYSDSNGNFLACVEMIAEFDLVMQDHLRRIQNKEIHYHYLSPKIQN

SEQ ID NO: 16225 - protein, 643 aa, Zea mays
  VARIANT 32: note = Ancestral polymorphism is N, Derived polymorphism is I
MLGVGGLGSGSGMEPGTSCGALLRELQCLLINSCNAGSCDQQIWAEVGESEGEKNKALLDIERECLEVYRRKVDDANRTRVQLHQSVAAKEAEVASLMATLGEHKLYLKKDKGVVPLKEQLATVAPVLESLKCKKEERIKQFSNIRSQIEKIRFELSEYNDQGDDPSSLAAEEHDLSMRKLNSYQTQLRALQKDKSERLRKVLEYINEVHSLCGVLGIDFGSTVHEVHPSLHQNGVEQSRNISNSTLEGLASTIYKLKAERKSRIHKAREIMESLCQLWKLMDSPEEEKRQFSNVMSSLILPEEGITSPGVLSEETIEKMEFEVERLTRLKTSRLKEIVMKRRAELEAICQNAHIEPDVSTAPEQTDALIDSGCSFLHPALLLYSHVFVFVFTSNVILVPIPPGLIDPSELLANIESQILKAKEESLSRKDIMDRINRWIAACDEEAWLEEYNQDPKRYSAGRGAHINLKRAEKARILVRKIPSMVDDLINRTFAWENARNKPFLYDGGRLISVLEEYRLSRHQKEEENRRYRDQKKLESILLAEKEAIFGSRPSPRKTSSLSRKANGYRPNGNTNGLKTPTPRRLSLGSATPELLTPRSYSGHNRYFGDVRRLSTSHLNFGDDSLSTFTSISGSEPESPSIG

SEQ ID NO: 16226 - protein, 326 aa, Zea mays
  VARIANT 305..326: note = Derived polymorphism lacks residues 305 to 326
  VARIANT 156: note = Ancestral polymorphism is G, Derived polymorphism is R
  VARIANT 43: note = Ancestral polymorphism is G, Derived polymorphism is R
MAPALSFPIIDMGLLAGEERPAAMELLQDACENWGFFEILNHGISTELMDEVEKLTKEHYKRVREQRFLEFASKTLGDGRDIAQGVKAENLDWESTFFVRHLPEPNIAEIPDLDDEYRRVMKRFAGELEALAERLLDLLCENLGLDRGYLARAFRGPSKGAPTFGTKVSSYPPCPRPDLVSGLRAHTDAGGIILLFQDDRVGGLQLLKDGEWVDVPPMRHAVVVNLGDQLEVITNGRYKSVMHRVVAQPSGNRMSIASFYNPGSDAVIFPAPALVKAEEAAAGAYPSFVFEDYMKLYVRHKFEAKEPRFEAFKSMETDSSNRIAIA

SEQ ID NO: 16227 - protein, 144 aa, Zea mays
  VARIANT 27..144: note = Derived polymorphism lacks residues 27 to 144
  VARIANT 35: note = Ancestral polymorphism is R, Derived polymorphism is W
MNQAAAPAPAGGNHSPAFSFSIWPPTQRTRDAVVRCLVETLAGDTVLCKRYDAVPVADAEPAARAIETEAFDTVAAAGGVAASVEEGNEALQSYSKEVSHRLLDFVKSRSADAKADPPSVEALAPDAPEAQSAALAPANQSFRT

SEQ ID NO: 16228 - protein, 118 aa, Zea mays
  VARIANT 108..118: note = Derived polymorphism lacks residues 108 to 118
  VARIANT 97: note = Ancestral polymorphism is W, Derived polymorphism is R
  VARIANT 87: note = Ancestral polymorphism is F, Derived polymorphism is S
  VARIANT 80: note = Ancestral polymorphism is A, Derived polymorphism is G
  VARIANT 69: note = Ancestral polymorphism is G, Derived polymorphism is S
  VARIANT 60: note = Ancestral polymorphism is A, Derived polymorphism is P
  VARIANT 56: note = Ancestral polymorphism is Y, Derived polymorphism is N
  VARIANT 44: note = Ancestral polymorphism is W, Derived polymorphism is C
  VARIANT 43..118: note = Derived polymorphism lacks residues 43 to 118
  VARIANT 10: note = Ancestral polymorphism is R, Derived polymorphism is K
MKCDDDTFVRVDVVLRHIKLNNGDKPLYMGNLNLLHRPLRTGKCAVTNEEWPEDINPPYANGPGYVISGDIAKFIVSQHANQSLRLFKMEDVSMGLWVEKFNATKLVQYSHSWKFCQY

SEQ ID NO: 16229 - protein, 130 aa, Zea mays
  VARIANT 110: note = Ancestral polymorphism is L, Derived polymorphism is H
  VARIANT 94: note = Ancestral polymorphism is R, Derived polymorphism is S
  VARIANT 86: note = Ancestral polymorphism is A, Derived polymorphism is T
  VARIANT 65..130: note = Derived polymorphism lacks residues 65 to 130
  VARIANT 58: note = Ancestral polymorphism is A, Derived polymorphism is T
  VARIANT 53: note = Ancestral polymorphism is P, Derived polymorphism is S
  VARIANT 49: note = Ancestral polymorphism is L, Derived polymorphism is F
  VARIANT 34: note = Ancestral polymorphism is S, Derived polymorphism is R
  VARIANT 33: note = Ancestral polymorphism is V, Derived polymorphism is M
  VARIANT 32: note = Ancestral polymorphism is T, Derived polymorphism is I
  VARIANT 16: note = Ancestral polymorphism is P, Derived polymorphism is R
  VARIANT 10: note = Ancestral polymorphism is T, Derived polymorphism is I
MTIVVMLLNTDLDVSPIVHAFKNCFDNALNATVSELNFKTIVDGLGVVFYQYSFNVPAYYALIMRLLIVLEDLALYADPDFKVLAASYPYFAKRLLTDPNPYLRDALIELVFKDGKFRQVLAHLSSPSLV

SEQ ID NO: 16230 - protein, 412 aa, Zea mays
  VARIANT 45: note = Ancestral polymorphism is P, Derived polymorphism is A
MRAAAASLVLVPRLALFVLLLSGSGVPTALSKSTLESCASSSACPALLSYTLYADLKLAELAALFAADPLAILAANAMDFAVPDPGDRILPAGLALRVPVPCACSDGIRKATSARYVARAGDTLASVAGSVYGGLTTADWIRDSNGMAEEEDAALDAGTTLFVPLHCACFGGADSGAPAVFLTYPVAEGDTVPAIARRFRTTGNDLMSVNDLATADVAAGDIIVVPLPACASSFPAFASDAGLAVANGTYAVTANRCVQCSCGPGNLDLFCVPAPLADSTCSSMQCSNSSMMLGNFTLLMTSAGCSVTSCSYGGYANGTILATLTTSLKPQCPGPHQFPPLMPPPTSSFFETYLGPSPTPMASEGGMGPQMAGMAPTSSPPVSSGPPTAGSHVGSDALAQVAYLCLVASLLW

SEQ ID NO: 16231 - protein, 161 aa, Zea mays
  VARIANT 27: note = Ancestral polymorphism is E, Derived polymorphism is K
  VARIANT 41: note = Ancestral polymorphism is Q, Derived polymorphism is H
MQNQAGSIVVSSPSSLKDDKFNLLAAEDSKLLVQPSSDNKQKAPIMASSSSSFHTQAYRTFFHRLLSKKTPDYNGMFADKKNTSSDSSKPAFQFGGNNVIFGGKKDAPVDSSKPFQFGPNNGIFGDKKDTPSDSNKPFHFGANKGIFGDKKTTSGDSSNPF

SEQ ID NO: 16232 - protein, 132 aa, Zea mays
  VARIANT 88: note = Ancestral polymorphism is H, Derived polymorphism is N
MFATAVRWAAKKGKPKMAPIELTAPPEQAQSITRAIFDAVREHGPLTVSDVWDHVKDVGLRGLASKRQMKIMLRWMRERQKLKLICDHDGPHKQFLYTTWFTNPRNAPQRPNPKPNVKADKLPTFPSPSKQL

SEQ ID NO: 16233 - protein, 88 aa, Zea mays
  VARIANT 16: note = Ancestral polymorphism is L, Derived polymorphism is H
  VARIANT 36: note = Ancestral polymorphism is G, Derived polymorphism is D
MENKKRVDALVFFSLLLLGYFAAHAHGKGHVTNDIGVSTLAKEGIMRGKGAQCAQGFLPCKDNKCYCCIGGRTHGCYSTLAECSHACF

SEQ ID NO: 16234 - protein, 148 aa, Zea mays
  VARIANT 133: note = Ancestral polymorphism is M, Derived polymorphism is I
  VARIANT 117: note = Ancestral polymorphism is V, Derived polymorphism is G
  VARIANT 113: note = Ancestral polymorphism is V, Derived polymorphism is G
  VARIANT 101..148: note = Derived polymorphism lacks residues 101 to 148
  VARIANT 100: note = Ancestral polymorphism is V, Derived polymorphism is A
  VARIANT 93: note = Ancestral polymorphism is A, Derived polymorphism is S
  VARIANT 90: note = Ancestral polymorphism is I, Derived polymorphism is T
  VARIANT 86: note = Ancestral polymorphism is E, Derived polymorphism is K
  VARIANT 47..148: note = Derived polymorphism lacks residues 47 to 148
  VARIANT 18: note = Ancestral polymorphism is P, Derived polymorphism is S
  VARIANT 17: note = Ancestral polymorphism is C, Derived polymorphism is Y
MQAAIAEVFACCCFVIYSSREEADKAMTAYHNKRTLPAHQETCAHYRFSSYTRSTSEKELVREQVFVLGRMGNAKEPLSTIINKLEDINIYLASITASEVWSVYMKDKKGYLVEFCVGDQVIGYIHKGNIYSMDVQIARWIFMNDFVA

SEQ ID NO: 16235 - protein, 242 aa, Zea mays
  VARIANT 36: note = Ancestral polymorphism is T, Derived polymorphism is M
MEFDLLNYSPEAQLELMTTMLQLEQLTALDGHQFPTMAPVSPPISPMQTHHAGHSLSPPPHMSATTTTTTTGYPEQYTPAAAVYGATATGLEHLQDYVLSPPGGDCGGAAAAHAGSTSPTSADAMREAIFHIAALQPVEIDPEAVRPPKRRNVRISKDPQSVAARLRRERISERIRTLQRLVPGGTKMDTASMLDEAIHYVKFLKSQVQSLERAAHRAAALGAAAYPAFHAPWQYALPHGDM

SEQ ID NO: 16236 - protein, 405 aa, Zea mays
  VARIANT 4..405: note = Derived polymorphism lacks residues 4 to 405
MVGCSVAWWETMTCKEEEGGDQEMEFKNCGSSSQPRPAVVVGEEAALARQGSVYSLTFDEFQSALGGAATGGGGGGSIPKDFGSMNMDELLRSIWTAEETQAMASASGAGAGAGMPPTSLQRQGSSLTLPRTLSTKTVDEVWRNLVRDEPLQGADGGGHQQHHRQSTLGEMTLEEFLVRAGVVRENPAPAPPAPPPMIPPRPVPVAPKSSAFFGNLPGADADTAAAAAALGFAPVGMGDLAQIPPRAAGMGGGAMAVQAAVNQLDSGGKGYSDLSSPTEPLPFSFEGMIRGRRHGGGVEKVVERRQRRMIKNRESAARSRARKQAYTMELEAEVQKLKEQNQELERKQALFFRCAHNTDHSFLYNAGRDYGNAEERATRNVEGSIRTEEASVLAKNIDWALVMTI

SEQ ID NO: 16237 - protein, 692 aa, Zea mays
  VARIANT 527..692: note = Derived polymorphism lacks residues 527 to 692
  VARIANT 481..692: note = Derived polymorphism lacks residues 481 to 692
MACPKHRDALPEESGNTISHEVPSVRGPNLNVREAEKSRPGTSGQTVGLASKGSGGNWLGIQRGKPYEPPPGLVAFFQNSHSPFPLRRAPRTQHRRLGFSSYAASVRAQPSVLMEKQGAQSNQQGGRAPVPNSGRAADRGNFQYEGPNQFRQGQAGAQHQHRGRSWARPGYGRGGFRGSFRGRGDFRQNHEGGGASAAKSNAANCGLAPAQTEIATAFDQSVKAETLDQSAKAEAILQKALAAIQELKKEPMPSNGVVQNAGGDAKASSNQQWQVSGEMSKHVKEAAQEEGVKNNTKAHCHRCYGKGHTMNDCVAKLYCYVCDTDTHIKQRCPMYNAPKVYALPVGYGVNKGGFFHVPTNKKLAKMGDAKVAIIQVSDGEISAANVVCELERLLPNFAPWKVDQVDTKTFRTLFPSASELSRMVEWGPVRAKSQKATLEFRPASSGGRVKATLVDVWVQFNGLPSEFCTVPHIWGVGSTLGVASEVDMAFYRKHGICRVQVGVIDPQAIPFAGDVEIAKVIYEVHFWVEDGSSEGLPLAVDEEGSLDDDQNNNDKEHKGSDGKEGDGINKAANAKVANVNKQGGGGNLGHKHNLDGTKQVQVQCAHDITTAAGTSLIADAGDGPMLGDDHMSPIAVTRKELTVEGGLEVLDQMPKGDADRMKQMAAIPEAEQTSVAGLDGVLDGCKDYTSLD

SEQ ID NO: 16238 - protein, 1018 aa, Zea mays
  VARIANT 894..1018: note = Derived polymorphism lacks residues 894 to 1018
  VARIANT 818..1018: note = Derived polymorphism lacks residues 818 to 1018
  VARIANT 568..1018: note = Derived polymorphism lacks residues 568 to 1018
MGSDKQIGSPRQLLETLKMGRVRTILTHTYPYPHEHSRHIMTAVIIACLFFISSDNMHTLIHKLDNNIKWWSMYVCLIGFFYFFSSPFLGRTIQPSYSNFNRWYVAWICFASLYHLPSFQSMGVDMRMNLSLFLTIYFSSVLFIIAFHIIFIGLWYIGLVARLAGTRPGVWTILQNCTVISIACCVFYSHCGNLAVHKSKSFGSSSDPNLLAFLKNENGSTWISNFLRMNQLKDEICSSWFAPVGSASDYPILAKWVIYGELVCSGSCAGPSDEISPLYSLWATFVGLYIANFVVERSTGWALTHPSTDLEDEKLKRHMKPDFLDMVPWYSGTSADLFKTAFDLMVSVTLFVGRFDMRMMQAAMKGPTGNTPNDDLLYDHFNEREDLWFDFVADTGDGGNSSYTVARLLAQPSIRTVIGGSMHTLPRGNLLIIGGDLAYPNPSSFTYERRFFRPFEYALQPPPWYRDEHIALDKPELPPGVSKMTEYDGPQCFIIPGNHDWFDGLHTFMRYICHKSWLGGWFLPQKKSYFALHLPKGWWIFGLDLSLHGDVDVYQFKFFADVCQNKVGENDSVIVVTHEPNWLLDWYWNETTGKNVSHLIQEYLKGRCKLRMAGDLHHFMRHSATRSEKNNFVQHLLVNGCGGAFLHPTHVFRNFERFSGTTYECKAAYPSYDESTGIALGNILKFRKKNWQFDIIGGFIYFILVFSMFPQCNLVRILNEETWSGRLKSFSGTIWSALLYIFEHSYVSSVGSLTLLTASYSFVPSKLSRRRRAIIGGLHVLAHLTAALLLMLLLELGIEICIRNHLLATSGYHTLYEWYRSMESEHFPDPTGLRARLEQWTLGLYPACIKYLMAAFDVPEVMAVTRINICKNGMMSLSRSVLIMYYTSVFIYFWIFSTPVVSLIFGSYLYICINWFHIHFDEAFSSLRIANYKSFTRFHVKKDGDLEIFTLAVDKVPKDWKLDPRWESEGRGPHQLSHDRKHPSKWRSASSTDPVRSVRVVDHFTIERTRTPDMEPSS

SEQ ID NO: 16239 - protein, 499 aa, Zea mays
  VARIANT 16: note = Ancestral polymorphism is I, Derived polymorphism is T
MAFFLALVCILILLAIASYVQYTRWQKGKGRFGGHGRSAPLKLPPGSMGWPYLGETLQLYSQDPSFFFASKQKRYGEIFKTHLLGCPCVMLASPEAARFVLVTQAHLFKPTYPRSKERMIGPSALFFHQGDYHLRLRKLVQGALGPDALRALVPEVEAAVRSTLASWDAGHVRSTFHAMKTLSFDVGIVTIFGGRLDERRKAELRKNYSVVEKGYNSFPNSLPGTLHYKAMQARRRLHGVLCDIMRERRGQAQAAGTGLLGCLMRSRGDDGAPLLSDEQIADNVIGVLFAAQDTTASALTWIVKYLHDHPKLLEAVRAEQAAVREATGGGRQPLAWAHTKSMALTHRVILESLRMASIISFTFREAVADVEYKGFLIPKGWKVMPLFRNIHHSPDYFQDPHKFDPSRFQVAPRPSTFLPFGHGVHACPGNELAKLEMLVLIHHLVTGYRWQIVGSSDEVEYSPFPVPKHGLPVRLWRQNNPVDRKGRETDDDHVERIFI

SEQ ID NO: 16240 - protein, 787 aa, Zea mays
  VARIANT 172: note = Ancestral polymorphism is S, Derived polymorphism is F
MDEVNEENGPQILVPSESIDLVTSLFDSEPPTSFDFSKSVPVVHSRHLSEDLSALTINDLRLNNGDNNCNDQIEQNGINNHSRHFSEDLSCLATNDFYVNKEEENDHYSSEQKVESLPNSAERNIYKAAEIAERFIQSMNNRVFVDTGAPIESVKDAVSKFGGILDWKEVMSIFLIGSLYSSIPFLFSRRKHVQIELDKALEDAPKYQKRAEVAEVEKNKVVMELCNTRRAIEGLKLNLEKTQNEAIQAQQDSELADVRFKEIQQGIAFRESAAARAEIELARYRYASAMAELHLVKDEIEQLQKEYQSLNTMRYNAETKACESNVASQKIEETVDDLTLEIIRLKEELTSSQATHIIAEEQKLNVALANQQEKEKWQNELRQADEEVQSLRHATSVNKDLESKLKNASTLLVKLQDEFSSYLKGECTQEVSIDGDAERQPLVFIKMKLANARKELEDMRADIKKSKDDVRKLWNVAATFRADIDREEAGLLALEHKEHLASISVSSHQEELSNITYELNIIHERTKATKMPIELQQATEVVEQAKAKALMAHYEVAKAREDADQVKSQLNVIKLRLEAASREILAVNASKEIATTSANALQEYKDEAHIEPQDEQIRNNYMTLSLEEYDALSKKSQDAERLAKKRVIKAIEKIKEAKDAEVRSLNQLEQSTKKIYERKLELRVAQEKANSAQYVKLTMENELRKCKAKHEQQKKVGESVHSISDVPNLKSGSLSFDAASSTSNPHMVGALSRADTIATTRVKEPKPRKSLFPRSVVAMFVSRKKTR

SEQ ID NO: 16241 - protein, 33 aa, Zea mays
  VARIANT 22: note = Ancestral polymorphism is N, Derived polymorphism is I
  VARIANT 19: note = Ancestral polymorphism is P, Derived polymorphism is H
MKMPSRCIDTNCDLGLFGPLVNHVVGLETWNYE

SEQ ID NO: 16242 - protein, 184 aa, Zea mays
  VARIANT 85: note = Ancestral polymorphism is R, Derived polymorphism is L
  VARIANT 130: note = Ancestral polymorphism is G, Derived polymorphism is D
  VARIANT 146..184: note = Derived polymorphism lacks residues 146 to 184
MSHLNILSFKYNLAKLRSKAGRRRIGRALSARDRQFSDLSTYRPDEEEMRKVFGMIAGQPRGVNKRDLQLLLERFGKADAAAEARRMLCVADHNKDGYMDLEEFMEVHRNGVQLGDIRRAFFVFDRDGDGRISAEEVMAVLRKLGQSCGLDDCREMVREVDRNGDGFVDMDDFMAMMTRPRRRP

SEQ ID NO: 16243 - protein, 146 aa, Zea mays
  VARIANT 120: note = Ancestral polymorphism is A, Derived polymorphism is T
  VARIANT 92: note = Ancestral polymorphism is D, Derived polymorphism is A
MACVDMYNPEHHHQHQPAPPSFMAPRMSFSSDFAVEPPPPAAARGGGDADFEFSVGSHPMMAADQLFSKGRLLPLREAPQQAAGGRPVTLRDELRADERHGRAPRATNIRWKELLGLKKAPKKQQAAAAAAEAAAGASTDAHMVGH

SEQ ID NO: 16244 - protein, 431 aa, Zea mays
  VARIANT 238..431: note = Derived polymorphism lacks residues 238 to 431
MAMALSPGTVPLGVLLRREVTKERMERPDVLCGEANLSRKGEDFTLLRADAGQRIPGDPSTSFSVFAIFDGHNGSGAAIYARENLLKNVLRAIPTCFCREEWLAVLPRALVAAFVKTDKDFQAVDETSGTTVTFVIIDEWVVTVASVGDSRCILESADGSIYFLSADHRFDSNPDEVKRVTACGSKVGKMDIVGGPEVGPLRCWPGGLCLSRSIGDLDVGECIIAVPHVKQVKLSNAGGRIIIASDGVWDDLTCEMALDCSRGFSSDVAANRIVNEATRPRGIRDDTTCIVIDILPPENIVPSPRKRPRRITFNNVFRKRHLDVPPETNRSEYAEPDVVEEIFEDGSPMLSKRLTTGYTLEKTFAPSSCAVCLVRLKSGQGISVHDNPLQYEKLQGWQGPFLCPSCHEKKEAMEGKRRPKGSSSNVFGHMC

SEQ ID NO: 16245 - protein, 654 aa, Zea mays
  VARIANT 545: note = Ancestral polymorphism is R, Derived polymorphism is C
MELKPGLSALVTGGASGIGKALCIALARKGLFVTVIDLSEENGREVVSLVQKENKHVHQYARVPSAIFIKCDVTNGEDLAAAFRKHVDTFGGLDICINCAGFVNKSLVYDDKSDGTSTWRRAVNVNLVAVIDGTRIASQVMRSQKKPGVIINISSVAGIYPMSYEPVYSGTKGGVVMFTRSLAPLKRYGIRVNVLCPEFVQTNMGEQVNRVLVDALGGFLKVEDVVNGSPITFKACITFFVVLEDKSMLSNSTPTPAIRQLRRGIISATWAFFDVIKGGSSGVARRPESSNSLLNILVLHPGIVGEGVVHTLSHNFRNATRLERVRLRLPIEPHNTLVKIIYAGVNASDVNFSSGRYFSVNSKEAASHLPFDAGFEAVGIVASVGDSVKHIKVGTSVALMTFGSYAEFVLVLLSMTSKSLIPVPRPDPEVVAMLTSGLTASIALEKAGQMISGQVVLVTAAAGGTGQFAVQLAKLAGNKVVATCGGESKSMFLTSLGVDRVINYQSEKIKDVLKKEFPRGVDIIYESVGGETFDVCLNALAVYGRLIVIGMISQYQGEGGWKPQNYTGLCEKILGKSQTVAGFFLVQYAHLWQDHLEKLFNLYSSGKLKVFVDPKKFVGVASVADAVEYLHSGRSVGKVVVCMDLSYGQTLAKL

SEQ ID NO: 16246 - protein, 95 aa, Zea mays
  VARIANT 10: note = Ancestral polymorphism is S, Derived polymorphism is C
  VARIANT 14: note = Ancestral polymorphism is P, Derived polymorphism is L
  VARIANT 19: note = Ancestral polymorphism is P, Derived polymorphism is L
  VARIANT 21: note = Ancestral polymorphism is D, Derived polymorphism is G
  VARIANT 22: note = Ancestral polymorphism is L, Derived polymorphism is P
  VARIANT 26: note = Ancestral polymorphism is V, Derived polymorphism is I
  VARIANT 33: note = Ancestral polymorphism is E, Derived polymorphism is G
  VARIANT 42..95: note = Derived polymorphism lacks residues 42 to 95
  VARIANT 55: note = Ancestral polymorphism is I, Derived polymorphism is S
  VARIANT 57: note = Ancestral polymorphism is I, Derived polymorphism is V
  VARIANT 59: note = Ancestral polymorphism is G, Derived polymorphism is E
  VARIANT 60: note = Ancestral polymorphism is L, Derived polymorphism is P
  VARIANT 61: note = Ancestral polymorphism is W, Derived polymorphism is L
  VARIANT 64: note = Ancestral polymorphism is S, Derived polymorphism is Y
  VARIANT 67: note = Ancestral polymorphism is G, Derived polymorphism is E
  VARIANT 70: note = Ancestral polymorphism is C, Derived polymorphism is S
  VARIANT 73: note = Ancestral polymorphism is L, Derived polymorphism is P
  VARIANT 74: note = Ancestral polymorphism is T, Derived polymorphism is I
MTYFPWLFRCPNIPEVKIPNDLALNVARSLRYEINMGFATLWVIGQDHQLKKYLIVVAGLWILSVHGSCCNFLTLSYIVFVVLYTVPVLYEVTLR

SEQ ID NO: 16247 - protein, 117 aa, Zea mays
  VARIANT 17: note = Ancestral polymorphism is V, Derived polymorphism is M
  VARIANT 21: note = Ancestral polymorphism is R, Derived polymorphism is W
  VARIANT 47: note = Ancestral polymorphism is G, Derived polymorphism is S
  VARIANT 58: note = Ancestral polymorphism is R, Derived polymorphism is H
  VARIANT 59: note = Ancestral polymorphism is C, Derived polymorphism is Y
  VARIANT 68: note = Ancestral polymorphism is G, Derived polymorphism is D
MALALAIFFLEGCPKAVQELREEHLFIARRQAKRGVQIELGRLQGNGFHAVSIRVNTRCACNILKQSGDVKMYSRDSASLAYGVGLIAYGEYCKQKLKAPDSELHLQKGRRTRTAKA

SEQ ID NO: 16248 - protein, 269 aa, Zea mays
  VARIANT 19: note = Ancestral polymorphism is C, Derived polymorphism is R
  VARIANT 71: note = Ancestral polymorphism is S, Derived polymorphism is C
MPCLAQEFHPKLPAANHYCKSLSSLIRETYAHCHVPCVGIAGWSSGGDSDDDSVLDEARDTKQVILSEMRSRQMKRRSRCSVDSPTPLPLPSSSSAFAWSYSYAPLGPRTVLDELSSPKTCVVVEGAAVADDDDGDVYCDADDESEAFFSVKSCFTRSTSPSPSRAATAASSPRMMTGPSPPMLRRSPEAWERFRDCDGWPFGLCRRPAVLPLLPPLPSTPADSWKWRKSVSTVASPRRRSPTPAYRHKAATAATLAVNDRAAASGLRA

SEQ ID NO: 16249 - protein, 262 aa, Zea mays
  VARIANT 74: note = Ancestral polymorphism is P, Derived polymorphism is H
  VARIANT 130: note = Ancestral polymorphism is W, Derived polymorphism is G
MEPDVDEVVFDAPGYFRIYKNGRVDRFNEPVLVAAGVDDSSGVSSKDVVLDADTGLSVRLFLPNRHGPCGEKLPVLVYFHGGGFIIGSAKSAMYHNYLTALASAAGVLAVSVDYRLAPEHQLPAAYDDCWAALRWAASARDGWIAEHGDAGRVFVAGDSAGGNIVHNVLMKASSADKGAPRIEGAVLLHAFFGGSTAIDVEPERAGGFIRCFARMADRASSLAAVARIGGRLPPWPFPVRDAGPDAGIGRGNRRGVPCGVGR

SEQ ID NO: 16250 - protein, 333 aa, Zea mays
  VARIANT 1: note = Ancestral polymorphism is M, Derived polymorphism is R
MDPSSDIILDTPFFRIYSDRRIDRLVGTDTVPAGFDPATGVTSKDVVLDSNSGLYVRLYLPDTATGSDRYSKKFPVLVYFHGGGFVIHSAASPPYQPFLNTLAAKASLLIVSVNYRLAPEHPLPAGYEDSFRALKWAASGSGDPWLSHHGDLGRIFLAGDSSGGNFVHNVAMMAAASELRIEGAVLLHAGFAGKERIDGEKPESVALTQKLWGIVCPEATDGVDDPRMNPLAAAAPSLRSLPCERVLVCAAELDSLRARNRAYYDALAASGWGGTVEWLESNGKQHAFFLYDSGCGEAVELMDRLVAFFAGNLNSSCVDVTTHHTTTSGETLR

SEQ ID NO: 16251 - protein, 295 aa, Zea mays
  VARIANT 57: note = Ancestral polymorphism is D, Derived polymorphism is V
MANADAGDGDEVILDAPGFIRVYRSGRVERFLPVDFAPPSTDAATGVSSKDVAILPDACLLVRIYLPLPPSSGSYSGKLPVLVFFHGGGFCLEHPVPALYGDAWTALQWVAAHSVGRGQEPWLTAHADLGRVHVGGESAGANIAHHAAMRAGREELGHGVKLSSLVMIHPYFLGGESSETDDMGVALLRELVRLWPVVCPGTSGCDDDPLINPMAEGAPNLASLGCRRVLVCVGGKDPMRGRGRLYCEKLKRSGWRGEVDDWEADGQGHGFHLSCPMSAEAEAQVRVIAEFLTYG

SEQ ID NO: 16252 - protein, 107 aa, Zea mays
  VARIANT 41: note = Ancestral polymorphism is R, Derived polymorphism is W
  VARIANT 54: note = Ancestral polymorphism is L, Derived polymorphism is R
MQVTPVHALGAGINPMQGLVMEVILTFSLLFVTYAMILDPRSQVRTIGPLLTGRIVGANSLASGNFTGASMNPARSFGPAMATGVWTNHWDRPATRRVPGRLRVRVV

SEQ ID NO: 16253 - protein, 469 aa, Zea mays
  VARIANT 186..469: note = Derived polymorphism lacks residues 186 to 469
MVFLLLVKKMRTDACLTHLTLLLLVSVPVLHSHASQQAQLEKFILSRQGRAASGSSKSSAHEPGVGVTSSSLLQRLQARSYLGSESDQSALKAADKIAALPGQPDDGVGFDQYAGYVTVDEEKGRALFYYLVEAPPEDAPSKPLLLWLNGGPGCSSFGYGAMLELGPFRVNNDNTTLRVNDRPPASGFLTPTRHPTTRRAGTRGPPTTPTSFLVNWLERFPEYKTRAFYISGESYAGHYVPQLAATILSHNLYSNRTIVNLQGILVGNPYLDRYKNQKGRFEYLWNHGVLSDEDMANITHHCSFSPSDDKLCSDLYGWYDFGPIDPYDIYAPICVDEPDGSYNSSSYLPGYNACDYYPTVTYLNDPVVQEAFHARKTEWSGCSGDFDAICPLTATRYSIQDLGLSVTTPWRPWTAKMEVGGYVQQYAGGFTFITVRAAGHMVPSFQPERALILLNYFLKGVIPPYTQEQ

SEQ ID NO: 16254 - protein, 461 aa, Zea mays
  VARIANT 384: note = Ancestral polymorphism is P, Derived polymorphism is L
  VARIANT 371: note = Ancestral polymorphism is P, Derived polymorphism is L
MRSISACFFFVLLIVCLLGSHANSSQEARLREFILSRRSSGSAFSAHDESASTATSRLRSEYSGTDQSAQKAADKITELPGQPGGVGFDQYSGYVTVDEESGRALFYYFVEAAHDAPAKPLLLWLNGGPGCSSVGYGAMIEIGPFRITSDNKTLSRNENAWNSEANVLFLESPAGVGFSYSNTSSDYGKSGDQRTADDAFVFLINWLERFPEYKARAFYISGESYAGHYVGNAYLDDNKNTKGQIDYLWSHGVISDEVWANITKNCKFSLADGDACSDAMAAYDSGYISGYNIYAPVCIDQPNGNYYPSSNVPGIDPCSNYYIQAYMNNPLVQMAFHARTTEWSGCTNLHWKDAPVSMTPTIKWLLGLGLPVWLYSGDFDAVCPLTATRYSIADLELSVMEPWRPWTATREVGGYVQQYTGGLVLISVRGAGHQVPYFRPERALVLLRSFLKGTLPPYVVD

SEQ ID NO: 16255 - protein, 170 aa, Zea mays
  VARIANT 54: note = Ancestral polymorphism is L, Derived polymorphism is H
  VARIANT 158: note = Ancestral polymorphism is R, Derived polymorphism is W
MHRPRRQTKTAAPDRKTPADAAAGTGSTSDKATSHDDSIWSVPNIAAPMPADHLLRCLLRGQGNEDQQALSPSVSGSSESSSGYAAGPLRATASWSWAPGTPGPTSGSTWSTPRPWTPMRWPATATELDSAAWRSGGGLTLNARMLIGEMPNYVLICWVLLLAAAEAVVG

SEQ ID NO: 16256 - protein, 247 aa, Zea mays
  VARIANT 52: note = Ancestral polymorphism is V, Derived polymorphism is A
  VARIANT 71: note = Ancestral polymorphism is V, Derived polymorphism is A
  VARIANT 72: note = Ancestral polymorphism is T, Derived polymorphism is M
  VARIANT 103: note = Ancestral polymorphism is T, Derived polymorphism is M
  VARIANT 136..247: note = Derived polymorphism lacks residues 136 to 247
  VARIANT 137: note = Ancestral polymorphism is A, Derived polymorphism is V
  VARIANT 156: note = Ancestral polymorphism is D, Derived polymorphism is G
MPSFIDGPTFRALLRPSTNGRRTKISDSGGGGGGIFKMFKLMPMLSSGCKMVALLGKHNNRALLADHATTVTLFGPRRGRVSLAIHEDTRAPPLFLIELPMLTSALHREISSGALKLALESDTRSARRRLVEEYVWAVYCNGRKAGYSIRRKEASDDERHVLRLLRGVSMGAGVLPAAPEKEGGVPAGPDGELTYVRARVERVVGSKDSEAFYMINPEEGGNGADNNGGGGGAGGAPELSIFLVRMK

SEQ ID NO: 16257 - protein, 269 aa, Zea mays
  VARIANT 13: note = Ancestral polymorphism is G, Derived polymorphism is S
  VARIANT 20..269: note = Derived polymorphism lacks residues 20 to 269
  VARIANT 28: note = Ancestral polymorphism is F, Derived polymorphism is L
  VARIANT 52: note = Ancestral polymorphism is A, Derived polymorphism is V
  VARIANT 53: note = Ancestral polymorphism is W, Derived polymorphism is C
  VARIANT 61..269: note = Derived polymorphism lacks residues 61 to 269
  VARIANT 74: note = Ancestral polymorphism is A, Derived polymorphism is V
  VARIANT 139: note = Ancestral polymorphism is A, Derived polymorphism is T
  VARIANT 147: note = Ancestral polymorphism is C, Derived polymorphism is S
  VARIANT 154: note = Ancestral polymorphism is H, Derived polymorphism is R
  VARIANT 175: note = Ancestral polymorphism is R, Derived polymorphism is C
  VARIANT 181: note = Ancestral polymorphism is T, Derived polymorphism is M
  VARIANT 186: note = Ancestral polymorphism is S, Derived polymorphism is L
  VARIANT 189: note = Ancestral polymorphism is R, Derived polymorphism is P
  VARIANT 195..269: note = Derived polymorphism lacks residues 195 to 269
  VARIANT 196: note = Ancestral polymorphism is D, Derived polymorphism is N
  VARIANT 200..269: note = Derived polymorphism lacks residues 200 to 269
  VARIANT 205: note = Ancestral polymorphism is R, Derived polymorphism is L
MADTERALHKAAGMAACCFQSHSRLRRFFTLNPVSGLPRTLALLDTALEDIAWLIRVSSPQDDDGDLRGLPNIAQNELVLGMVWDNIACLHTGGAALDMHGHTPKLSLLPIQFVPVKEDDVAVLVKLIKEGTDDRQEAAAAALGLLCRDEDSLHKLLHSGVCSVFAAALKEPPVRVQAAVTDAIASLARHSHKCQDLFAQSNAVRHLVTHLASTPSIPPPCPHLAAHRMSSRPLRFLRRCLRVRPLGRPEIRRDPRELPRCSPCAAASP

SEQ ID NO: 16258 - protein, 238 aa, Zea mays
  VARIANT 146: note = Ancestral polymorphism is A, Derived polymorphism is V
  VARIANT 138: note = Ancestral polymorphism is Q, Derived polymorphism is L
  VARIANT 131: note = Ancestral polymorphism is C, Derived polymorphism is R
  VARIANT 110: note = Ancestral polymorphism is R, Derived polymorphism is H
  VARIANT 104: note = Ancestral polymorphism is V, Derived polymorphism is M
  VARIANT 99: note = Ancestral polymorphism is D, Derived polymorphism is N
  VARIANT 96: note = Ancestral polymorphism is R, Derived polymorphism is G
  VARIANT 90..238: note = Derived polymorphism lacks residues 90 to 238
  VARIANT 89: note = Ancestral polymorphism is S, Derived polymorphism is F
  VARIANT 85: note = Ancestral polymorphism is C, Derived polymorphism is Y
  VARIANT 10: note = Ancestral polymorphism is R, Derived polymorphism is C
MASTTAACTRIGGSYGDAAAQGEQRGSSRGSRRISGRPSGRTRRQRRRKRSGREDMRCAARCGQGGGMDGVEARWVTRCRTALLCANRSWHLWLWRASDAMASVTAACTRTGGSLSAAANTEHTPEWRSLCRLSSSRQRRPSAAAAASCLSSVPSLISLTRTATSSSFTGTNWIGSNESFDGDKISGTTLNFCSDNLSYDVGAVSEQTQRGFLSVRFDVLQDKYRMVDWPFMFTRSNV

SEQ ID NO: 16259 - protein, 228 aa, Zea mays
  VARIANT 51: note = Ancestral polymorphism is L, Derived polymorphism is F
MMVPVGSDDETADVAMDRESSPPAATTRSGGTSRSHSEAERKRRQRINAHLATLRTLLPAASRMDKAALLGEVVRHVRELRGEADAAAAGAAVAVPGEGDEVGVEEGQQRCFCHHGGGERERAAAASARRVRAWVCCADRPGLMSELGRAVRSVSARAVRAEIATVGGRTRSVLELDVGGQHNGDDAGTSSRPALQAALRAVLLSREDMLGAECCYKRQRFSAHLARV

SEQ ID NO: 16260 - protein, 304 aa, Zea mays
  VARIANT 155: note = Ancestral polymorphism is P, Derived polymorphism is S
MASGVLHRSASLCLRPAAGSSADSGRGHGAVMIGDSRTRVAALRLGGSSRRELLSVTMASRDHTGLTRQLLDFQHDTIDEVGAGHDPFIDLKARFMDFKQRNYVEKFSNYQTLAEQQTPKFMVVACADSRVCPTAVLGFQPGEAFTVRNVANLVPPYEHGGTETSAALEFAVNTLQVENVLVIGHSRCGGIQALMSMKDDSTSGSFIKNWVSIGKSARLSTKAAAGNMSFDIQCKHCEKESINSSLLNLLTYPWIEKRVNEGTLNLHGGYYNFVDCTFEKWTLLYREGLEGGSKYAIKNRSTWC

SEQ ID NO: 16261 - protein, 333 aa, Zea mays
  VARIANT 166: note = Ancestral polymorphism is I, Derived polymorphism is T
  VARIANT 93: note = Ancestral polymorphism is R, Derived polymorphism is L
MDVPPVHFSTPPPPPCQQQQQHGGHGEQQKLERFSDEVDSRLSAEQKEPASGGALVVSVSGGGDGASIELSKKRRGRPPGSKNKPKPPVVITREAEPAAAMRPHVIEIPCGCDVADALARFAARRNLGICVLAGTGAVANVSLRHPMPCGGGGAPTAIMLHGQYEILSISATFLPPAISAVAPQAAAAAACLSISLAGPHGQIVGGAVAGPLYAASTVVVVAAAFTNPTFHRLPADDDASVSVSVSLSAGSGDPADEHRGGHQHPVPVEPPPRERHRPHVVRRKPAPHLASAAPSVEPCGPPAAPIYAACHPQPQDVMWPPPNRAPHPPPPPY

SEQ ID NO: 16262 - protein, 635 aa, Zea mays
  VARIANT 144..635: note = Derived polymorphism lacks residues 144 to 635
  VARIANT 127..635: note = Derived polymorphism lacks residues 127 to 635
MASISGAAAAPSSAACRLRLRRHILLRPSHLRLRAPHSIADLSRSSSSSSSAPTRAQPLGSRPENGGGVRAVEKDPIKLWERYVEWLYQHKELGLFVDVSRMGFTEDFLRQMEPRMQRAFAAMRELEKGAIANPDEARMVGHYWLRDPALAPNSFLRSKIETTLDRILAFSQDVVSGKIQSPSGRFTSILSIGIGGSALGPQFVAEALAPDNPPLKIRFIDNTDPAGIDHQIAQLGPELATTLVIVISKSGGTPETRNGLLEVQKAFRDAGLQFSKQGVAITQENSLLDNTARIEGWLARFPMFDWVGGRTSEMSAVGLLPAALQGIDIKEMLAGAALMDEETRNTVVKENPAALLALCWYWASEGIGNKDMVVLPYKDSLLLLSRYLQQLVMESLGKEFDLDGNRVNQGLSVYGNKGSTDQHAYIQQLREGVHNFFVTFIEVLRDRPAGHDWELEPGVTCGDYLFGMLQGTRSALYANDRESISVTVQEVTPRAVGALVALYERAVGLYASLVNINAYHQPGVEAGKKAAGEVLALQKRVLTVLNEATCKDPCEPLTIDEIADRCHCPEDKHNAFPPSITHAQRLLPQIEMIYKIVQHMAANDRAIIAEGSCGSPRSVKVYLGECNVDEDLQAA

SEQ ID NO: 16263 - protein, 340 aa, Zea mays
  VARIANT 42: note = Ancestral polymorphism is G, Derived polymorphism is R
  VARIANT 103: note = Ancestral polymorphism is P, Derived polymorphism is L
  VARIANT 156: note = Ancestral polymorphism is C, Derived polymorphism is R
  VARIANT 167: note = Ancestral polymorphism is I, Derived polymorphism is T
  VARIANT 195..340: note = Derived polymorphism lacks residues 195 to 340
  VARIANT 198..340: note = Derived polymorphism lacks residues 198 to 340
MAPSSYEVAASILLCAEDSSSILDLEAEAEEEALLARSGEPGGGAEFPVPSEECVAGFLESEAAHMPREDYAERLRSGGMDLRVRTDAIDWIWKVHTCYGFGPLTACLAVNYLDRFLSLYQLPVRIIKAYEVMMKRHCLLLGSWNEDGRRSETRICTICSSGSVPVTMCLSRHFSGRQGLDDTAAVRGVLVPGRQDGGDLRPFVPGPAGTHCLDFRPSEIALAVAATVAGEERAVDIDRAFTHRVHKERVSRCLEAIQQATATMALPQPLKSEGPSSSGRRASSSSATVPRSPTGVLDAGCLSYRRAAAAAASHASSSWRDEDDDDCPPAVCSKRRKISR

SEQ ID NO: 16264 - protein, 220 aa, Zea mays
  VARIANT 2: note = Ancestral polymorphism is Q, Derived polymorphism is E
MQRDARSWSPAPATDAAGPYAMPSPVQPSTKSTKETVKNALSRWGRKVGEATRKAEGLSRNTWQHLRTAPSIAEAAVGRIAQGTKVLAEGGHDRIFRQAFSAPPDEQLRKSYACYLSTAAGPVMGVLYLSTARVAFCSDSPLSYEASGGDRTEWTHYKVAIPLQRLRAASPSANKTKPAEKFIQLVSVDSHEFWFMGFVNYDGAVAHLQEALSGFRNLQA

SEQ ID NO: 16265 - protein, 95 aa, Zea mays
  VARIANT 7: note = Ancestral polymorphism is P, Derived polymorphism is S
  VARIANT 8: note = Ancestral polymorphism is D, Derived polymorphism is N
  VARIANT 65: note = Ancestral polymorphism is C, Derived polymorphism is F
  VARIANT 86: note = Ancestral polymorphism is S, Derived polymorphism is W
MKHVHTSNSSRYWIANSYEDRFISGLEPENVDKEFLRLWFKNNCNPYEDTVYFLHTVVRITCEFCSIMIQLIFFLNQFMKGYQGMSLKAYGTYDC

SEQ ID NO: 16266 - protein, 222 aa, Zea mays
  VARIANT 12..222: note = Derived polymorphism lacks residues 12 to 222
  VARIANT 18: note = Ancestral polymorphism is I, Derived polymorphism is M
  VARIANT 82: note = Ancestral polymorphism is G, Derived polymorphism is D
  VARIANT 93: note = Ancestral polymorphism is R, Derived polymorphism is H
  VARIANT 125: note = Ancestral polymorphism is A, Derived polymorphism is V
  VARIANT 127: note = Ancestral polymorphism is H, Derived polymorphism is Y
  VARIANT 141: note = Ancestral polymorphism is E, Derived polymorphism is D
MAEKGVKVLGMWASPMVIRVEWALRLKGVEYEYVDEDLANKSADLLRHNPVTKKVPVLVHDGKPVAESTIIVEYIDEVWKGGYPIMPGDPYERAQARFWARFAEDKCNAALYPIFTATGEAQRKAVHEAQQCLKTLETALEGKKFFGGDAVGYLDIVVGWFAHWLPVIEEVTGASVVTHEELPLMKAWFGRFLALDVVKAALPDRDRLLAANKARREQLLSA

SEQ ID NO: 16267 - protein, 657 aa, Zea mays
  VARIANT 28..657: note = Derived polymorphism lacks residues 28 to 657
MRRLLVVLNCGMLALGTTAGPLLTRLYYDKGGQRQWLSAWLQSVGWPLLLLPVAASYAARRARDRAAPVLLTPPRVLLAAAGLGVATGADNFIYAYSLRYLPVSTSAILISTQLAFTVFFAFLIVRQRLTPATVNAVALLTAGAAVLGLHVSSDRPAGVTRGKYLLGFALALGAAALYGLILPLVELTYKRAAGGGRAVTYALVMEMQLVMGFFATVFCTVGMIIDKDFQARDDVVTAIGSRLERVIRSGRHRCIQSAVLDSTPRQDAAHGSHPRVRDCVSRGQECAGRAMDVEARKSDAPPARGKAMHRFLVALNCGMLAVGAIGGPLLSRLYFSKGGHRQWLSAWLETGGWPLLVIPVAASFVARRARDRGAPVLLAPPRILLAAAGLGVATGADDFIYAFGLAYLPVSTSAILISTQLAFTVFFAFLVVRQRLTAASVNAVALLTVGAVVLGLHVSSDRPPGVTRGQYWLGFVLTLGAAALYGLVLPLVELAYRRAAGAGGRAVTYALVVEMQLVMGFFATAFCTVGMVVNKDFQAIPREARRYKLGEARYYAVLAWSAVLWQCFFLGAVGVIFCVHTLLAGILIAVFIPVTEVAAVIFLRERFSSEKGVALVLSLWGLASYSYGEWSEARAKKRKTRTEEGAAAAEALQQANP

SEQ ID NO: 16268 - protein, 110 aa, Zea mays
  VARIANT 83: note = Ancestral polymorphism is Q, Derived polymorphism is E
  VARIANT 73: note = Ancestral polymorphism is M, Derived polymorphism is T
  VARIANT 69: note = Ancestral polymorphism is A, Derived polymorphism is V
  VARIANT 55: note = Ancestral polymorphism is V, Derived polymorphism is I
  VARIANT 45: note = Ancestral polymorphism is D, Derived polymorphism is G
  VARIANT 28: note = Ancestral polymorphism is D, Derived polymorphism is N
  VARIANT 15: note = Ancestral polymorphism is S, Derived polymorphism is N
MAAWTRKATAKAMASCVTTGAVRDDDGNKQRIPKGYIPLVLVRDGEGEGGSETRILVRVRDLREPCMAVLLEMAEEQFGYGQQGVLKVPCDAQRFHHVVAMARKSKVASA

SEQ ID NO: 16269 - protein, 183 aa, Zea mays
  VARIANT 111: note = Ancestral polymorphism is G, Derived polymorphism is S
  VARIANT 99: note = Ancestral polymorphism is H, Derived polymorphism is Q
  VARIANT 77: note = Ancestral polymorphism is H, Derived polymorphism is N
  VARIANT 46: note = Ancestral polymorphism is F, Derived polymorphism is L
  VARIANT 29: note = Ancestral polymorphism is D, Derived polymorphism is N
  VARIANT 24: note = Ancestral polymorphism is G, Derived polymorphism is S
  VARIANT 23: note = Ancestral polymorphism is Y, Derived polymorphism is F
  VARIANT 19: note = Ancestral polymorphism is N, Derived polymorphism is S
MADFSKAMYMPVSVISADNYIVYGVFASNPGTLVVSPGPSSIPFDFHCLGSDLAAWVETPAEITLFDGYIVVYKFVHDLHFFVTAGDDENELILASVLHGFSDSVGLLLRGDVEKRTALENLDLILLCIDEIVDGGIILETDANTIAGKVATNAVDGSVPFSEQTISQALATAREHLARSLLK

SEQ ID NO: 16270 - protein, 386 aa, Zea mays
  VARIANT 26..386: note = Derived polymorphism lacks residues 26 to 386
  VARIANT 155: note = Ancestral polymorphism is G, Derived polymorphism is R
  VARIANT 240..386: note = Derived polymorphism lacks residues 240 to 386
  VARIANT 246: note = Ancestral polymorphism is E, Derived polymorphism is K
  VARIANT 247: note = Ancestral polymorphism is K, Derived polymorphism is T
  VARIANT 252: note = Ancestral polymorphism is Q, Derived polymorphism is H
  VARIANT 264: note = Ancestral polymorphism is L, Derived polymorphism is H
  VARIANT 270: note = Ancestral polymorphism is A, Derived polymorphism is T
  VARIANT 302: note = Ancestral polymorphism is D, Derived polymorphism is N
  VARIANT 322..386: note = Derived polymorphism lacks residues 322 to 386
  VARIANT 331: note = Ancestral polymorphism is S, Derived polymorphism is Y
  VARIANT 335: note = Ancestral polymorphism is S, Derived polymorphism is C
  VARIANT 363: note = Ancestral polymorphism is M, Derived polymorphism is K
MSSRKYPSGSEKRKRKKQGDEFIQTQRGALDKFLKSNSTAPRNSNNELAIVLMEEEEPNVGNSEKDGPNIEENNVSGPQNPTATSDANAQPATVDEPSFYNHDIFDPRHWDNLDNKAREILVEKGPIREEGLEFPSDDASRHFSYVHYHRKLSNGEVHDRKWLVYSKHIDRAFCFCCKIFKSTTSRSQSALANDGYKNWRQISLKLREHENSAEHINSMNKWNELKTRLQKEETIDKEVQKQIDKEKARMRQVLLRIITVVKFLGKRNLAFRGTSEKLYTNSNGNFYACVEMIAEFDLVMQDHLRHIKNKEIHYHYLSHKIQDELVYLLASDIISSIIKVVKEAKYFSIILDCTPDVSHQEQMTLLVRCVNLSYGKINIEEYFLGS

SEQ ID NO: 16271 - protein, 341 aa, Zea mays
  VARIANT 225: note = Ancestral polymorphism is S, Derived polymorphism is G
  VARIANT 61: note = Ancestral polymorphism is L, Derived polymorphism is R
MGGLKLRRLASTFLSPGPASPGSAADAHHSVWRATAHHPSTAPPSAQHMDALLAFGRGSRLSAASLAAALVDRLRAAASGQGDAAVALKCLVALRVLLARGAFILRDQLLAALARHPASGRNPLALSSFPLGRSSFAAASWVRFSARLLELLLLLPDASASADADAEYLTALPNPHLVAELAAFVSVADAVRQAPPPPPSGPQPNALIWEAVRLADEDRVAAERSIVARVQEMGERLDTLSLADAVELVCVLRRVEDGTASDCKWAGLDEGVARAARGLRERAEDVVLRRTVEERRLVRRDAAGSASARTILPIRAAAGDGGAVRFGSTRWAGTVSAPRRR

SEQ ID NO: 16272 - protein, 98 aa, Zea mays
  VARIANT 55: note = Ancestral polymorphism is T, Derived polymorphism is M
  VARIANT 65: note = Ancestral polymorphism is G, Derived polymorphism is D
MLGLAKRVGARILLTSTSEVYGDPLEHPQIEAYWGNVNPIGVRSCYDEGKRVAEMLMFDYHRQHGIEIRIARIFNTYGPRMNIDDGRVVSNFIAQAVR

SEQ ID NO: 16273 - protein, 398 aa, Zea mays
  VARIANT 354..398: note = Derived polymorphism lacks residues 354 to 398
MVRGNGRLLPLSLLLLAAADFTTVHGQGQQPEGPYYSRSFNPSMAIVIVVLIAAFFFLGFFSVYVRHCYGDGSSGYSASPAPGGAAARSRRQQRGLDSAVLESFPTMAYADVKAHKAGKGALECAVCLSEFDDDETLRLLPKCSHVFHPDCIDTWLASHVTCPVCRTNLALGPDANAPPPDDDTPELLPAPEAQELPSPTSAPPPSAAVVIDVEETEEERIIRAEADELMRIGSVKRALRSKSGRAPARFPRSHSTGHSLAASACATTGTERFTLRLPDHVLRDLTAAGKLQRTTSLVAFRSSRGGSTRRGVSVRTGGGGGEGTSRAGRSIRLGQSGRWPSFLARTLSARLPAWGSRSTRRSVQTDGSSKGGRTVGDAGAGAKSSEHDDQACAPGQRV

SEQ ID NO: 16274 - protein, 332 aa, Zea mays
  VARIANT 33: note = Ancestral polymorphism is G, Derived polymorphism is R
MALEAVVLSQQGSRFGCGAMAAGGPWSGLFFSGMEGVVEIGSGAGGGRDVAGCSPPQLLQEPAARALPVASSVGSASGGAGQDAPAALAVTATAAAGTGRRKRRRMRPLKNEEEVESQRMVHIAVERNRRKQMNEYLAALRSLMPPAYTQRGDQASIVGGAINFVKELEQLLQSLEAQQRRSSRRQGPACAVDPDDAGPFADFFTFPQYSMCAAAAAPSENPGADADAEQEASGSKPSGVADVEATMVESHANLRVLSRRRPRQLLRLVLGLQGHRLTVLHLNMSSAGHMVLYSFSLKVEDDCPLTSVDEIAGAAHQIVEKINEEQGGGSLE

SEQ ID NO: 16275 - protein, 168 aa, Zea mays
  VARIANT 9: note = Ancestral polymorphism is N, Derived polymorphism is Y
  VARIANT 17: note = Ancestral polymorphism is G, Derived polymorphism is D
  VARIANT 21: note = Ancestral polymorphism is A, Derived polymorphism is G
  VARIANT 31: note = Ancestral polymorphism is I, Derived polymorphism is V
  VARIANT 62: note = Ancestral polymorphism is N, Derived polymorphism is S
  VARIANT 95: note = Ancestral polymorphism is T, Derived polymorphism is I
  VARIANT 105: note = Ancestral polymorphism is R, Derived polymorphism is C
  VARIANT 162: note = Ancestral polymorphism is M, Derived polymorphism is V
MAKNSYVVYVLVLLVAGYTAALASATTTTFIVGDDQGWMTGVDYVAWVKGKTFAIGDKLVFNYPSEEHTVTEVSRTDYFACAGGNALSNDRSGSTNITLTGPGTRYFLCNIPGHCTIGMRLAVTVAGGGSPPGATPAGGAAGATARPAMGSFIVKTTAWLAVIKLTLS

SEQ ID NO: 16276 - protein, 158 aa, Zea mays
  VARIANT 58: note = Ancestral polymorphism is F, Derived polymorphism is L
MANALPLIVALVAAAGCAALASATSYTVGDSQGWTTTGVDYSSWASRNTFVVGDTLVFNYVSKAHTVTEVSKAGYDACSGANALSDDDTGSTTITLQTPGTHYFICNVPGHCASGMKLAVAVSASPSGTAPSAGALQVPAMASVVAAAAGAAIKLALF

SEQ ID NO: 16277 - protein, 284 aa, Zea mays
  VARIANT 257: note = Ancestral polymorphism is A, Derived polymorphism is T
  VARIANT 147: note = Ancestral polymorphism is T, Derived polymorphism is I
  VARIANT 144: note = Ancestral polymorphism is A, Derived polymorphism is T
  VARIANT 88..284: note = Derived polymorphism lacks residues 88 to 284
MVRALSVAPSLAGPLLRMHFHDCFVRGCDGSVLLDSTANNTAEKDAKPNLTLRGFGFIERVKTAVEKACPDTVSCADVLALMARDAVWPSKGPFWAVPLGRRDGRVSISNETDQLLPPTGNFTELAQLFGAKGLDTRDLAVLSAGHTIGTSSHCFSFSDRLYNFTGLDDARDTDPELDRAYMARLRAKCASLDDNTTLVEMDPGSFRTFDLGYYANVAKRRGLFHSDAQLLADPSTRAYVLRHATGAHRDEFFADFAASMIKMGAVSVLTGGQGEVRKKCNVVN

SEQ ID NO: 16278 - protein, 166 aa, Zea mays
  VARIANT 77: note = Ancestral polymorphism is G, Derived polymorphism is S
  VARIANT 148: note = Ancestral polymorphism is E, Derived polymorphism is K
MEQVTRGSRCDKGKGGPVAGDDGGGCAAKGGVGGGSALQRGRGAVVVRMEAGTRARGTAYCGFKGKLPGIFLGKATGNSSALFLTAAAQNLSCLKLAEEFGVIIANPWVSWLKAASLPAFVSLIATPYLLKLFPPETKDAPDALELAEENLKRMGPVRLRQKTNRL

SEQ ID NO: 16279 - protein, 250 aa, Zea mays
  VARIANT 182: note = Ancestral polymorphism is L, Derived polymorphism is R
  VARIANT 45: note = Ancestral polymorphism is I, Derived polymorphism is N
MDEIMNKVGVYWLGPPANKEISSAGDDLEVCETKPSHPCSFLQLINCSMGEQREKCLCPCLVSSLLIASLMFPSSNYMQSLSTSAEDGAEWLVKKLKGKMQKPLVDLLSTTSLWARSPHVEVDRIKTKVLVSASVTIVKAAAAKVYFTTRIKWSCNGMPMMSSGAASPSTSLLHTKMDKWLLSVAGINLQSLATWEICVHCTSCVLCFVVRMCNTQKDSECVPIAYDICLEYSTSEAELELAQTIYQILN

SEQ ID NO: 16280 - protein, 595 aa, Zea mays
  VARIANT 50..595: note = Derived polymorphism lacks residues 50 to 595
  VARIANT 54..595: note = Derived polymorphism lacks residues 54 to 595
  VARIANT 68: note = Ancestral polymorphism is W, Derived polymorphism is C
MADGGAGAYREFKALAEAADRKFARARDLPLYGGGDHHSRKAFKAYTRLWRLQQERRRELVAAGLRRWEIGEVASRIGQLYYARYLRAAEPRSLVGAYVFYEAIYSRGYFGAAAAAVGTDGGGGGVSRHQALLIRYKELRFIARFLVVAMLMRRAEAVDHLAARLRALVEETKAAYPKTNFKEWKQVLQELGRFLKADGAYKGSRSLRYDNLFDSYPSNLVSIARFHSKRVLKLKEAVLTSYRRNEIKFTELTLDTFRMLQCLEWEPTGSYQIAAKELTENGTVSDQSGPSGLIDIQLSTEISDGSLPSNPQKAIIYHPTAAHLLAVLATICEELSQDSILLIYISASGSAEQSFASQKFGSSSSRARAASAFPTDKPNSHNSSDNHLWLGPRGSGGPNNLYPDDLIPFTRYPLFLVIDSENSHAFKVIHNSEKGEPAALLLSPRTSSAMPGVESTAHGSQFTYFLTAPMQAFCQLAGITSDIDTDTYANAENILFSALEEYEGILCTSVGLNNVWGQILPDPFLRRLILRFIFCRAVLFYFHSDEHEYLPTCLPSLPESVSPHAEAIRTPILSLAENLVVSDRFDFRDSTRNKK

SEQ ID NO: 16281 - protein, 601 aa, Zea mays
  VARIANT 186..601: note = Derived polymorphism lacks residues 186 to 601
MAVPRGCLGLPLVAVLLASLCRGQAAVRELKVGYYAETCPEAEDIVRETMARARAREARSVASVMRLQFHDCFVNGCDGSVLMDATPTMPGEKDALSNINSLRSFEVVDEIKDALEERCPGVVSCADIVIMAARDAVVLRCAALWARLLRAAPQPRRRVPGKDLAPLASCRVLRNAFRATSLASRSTLRSRTKWAFEDCPQVQNMVGAMPMPTASLAYYTERESARDPDGQTRQMRSICICPGNRGPPHGARAPNVQPSRERPGSTRRAHERRADPRPRAAARDESGSRLRRLARTARMVLLGLGCCCHGPLTTGAANSKAAGPSVAEVGFCFSQIGRWRGRDFRGMEYFFACFSLDPHECSNRGVETSEKRRCTMPSALMPGRLGGRNCKDTTGGPNWEVRLGREDSMTASQEDADNIMPSPRANASALIRLFAGLNLSVTDLVALSGSHSIGEARCFSIVFRLYNQSGSGRPDPHMDTAYRRSLDALCPKGGDEEVTGGLDATPRVFDNQYFEDLVALRGFLNSDQTLFSDNTRTRRVVERLSKDQDAFFRAFIEGMIKMGELQNPRKGEIRRNCRVANNSPWQPRTGMASGQSTSELR

SEQ ID NO: 16282 - protein, 736 aa, Zea mays
  VARIANT 314..736: note = Derived polymorphism lacks residues 314 to 736
MASGQKQQQHLPNVPRWTPSPPRRQARGDAHDEEDAESALGASSSMRSTDEASFPFGSGRARSFPFPLTQPSLEISVVAAANGTAGSGGGGADGPVAREKSLRRADEGVVVSWEDLWVSAAGGNKGGRVPILCGLNGYARPGEVLAIMGPSGCGKSTLLDALAGRLGSNVSQKGDILINGLRQKLAYGTSAYVTQEDVLMTTLTVREAVHYSAQLQLPSAMAAPAKRERAEETLREMGLEAAADTRIGGWMHKGISGGQRRRVSICMEILTRPALLFLDEPTSGLDSAASYHVVSRIARLARREGMTVVAAVHQPSTEVYGLFHGLCLLAYGRTVFFGAAAETNQFFALSGFPCPSLMNPSDHFLRTINKDFDKDIEEGLNGETKMTTAEAIDTLVNSYKASAYMEKVTRQIADTREAGGAVVKKEWQASFLTQSLVLTKRSFVNMYRDLGYYWLRFAIYIMLCLCVGTVFYDVGHSYGSILARGSLLNFVAAFLTFMAIGGFPSFVEDMKIFGRERLNGHYGAAPFTIANTVSAAPYLALISVVPGAIAYYLVGLQSSFGHFAYFALVLFTTMMVVEGLMMIVASAVPDFLMGIITGGGIQGVMMLNGGFFRLPDDLPKPVWRYPMYYIAFHKYANQGLYKNEFLGLTFPSNQAGGSATAATLSGGQILTDFWQVEMGYSKWVDLAILCGMVVLYRMLFLAIVKLTEKVKPMIKGFRFRNTAQSVHVVDRGSGSP

SEQ ID NO: 16283 - protein, 122 aa, Zea mays
  VARIANT 5: note = Ancestral polymorphism is T, Derived polymorphism is I
  VARIANT 8: note = Ancestral polymorphism is R, Derived polymorphism is I
  VARIANT 9: note = Ancestral polymorphism is N, Derived polymorphism is D
  VARIANT 10: note = Ancestral polymorphism is K, Derived polymorphism is N
  VARIANT 19: note = Ancestral polymorphism is L, Derived polymorphism is R
  VARIANT 22: note = Ancestral polymorphism is V, Derived polymorphism is G
  VARIANT 23: note = Ancestral polymorphism is Q, Derived polymorphism is P
  VARIANT 24..122: note = Derived polymorphism lacks residues 24 to 122
  VARIANT 32: note = Ancestral polymorphism is K, Derived polymorphism is E
MEVHTKRRNKIDVQHASDLVFVQLNARLLSKKERSKTKNVDVLLPNVASNVQDWPVEGCDDIDEENEAMQLCRSSRVRELHEDGFESDSECEDIKIQDEDVEFESDHDEVLPTDDYEQDDED

SEQ ID NO: 16284 - protein, 584 aa, Zea mays
  VARIANT 460: note = Ancestral polymorphism is I, Derived polymorphism is N
MPPPTVPFFLTSTTLATTAKKPQPQSPLCDAQAQAAAASLASAASASYAARMRLNPHLALRLFDHLLRSGADPDPAAYELAFASCARARDRATAAQLHAHAAKRGLVASHRRVRCRLVHAYAVCGMLPHARRVFDGGTDNDMVAWNCLLRGYAQEGGDEDLLRDFFARMPSRDSVSWNTVLSWCVVNGEYDEAIAVFREMLASQECQPDRVTLVSVVSAIAYLGALAHGLWAHAYVFRKCIEVEEKLSSALINMYSKCGFIEGAVYVFDNVGGKRSLDTWNAMLAGFTANGYSERALELFTRMESTRLMPNKITFNTVLNACSHGGLVEEGMKYFQRMSRFYGIEPDIAHYGCMVDLFCRAGMFEKAEEIIQTMPMEPDASMLKALLGACRTHKNLELGKKVGHRLIEAAANDHAGYVLLSNIYALDGNWGGVHKVRKLMLDRGVLKTPGSSSVELNGVIHEFISGDKSHSRKRDIYKMLGEICQQLKSSGYTPDTSQVLLDIDDEDVKESSLALHSEKLAIAFGLISTAPGTPIRVVNNLRICGDCHNAIKLISKIYGRCIIVRDANRFHHFRKGSCSCGDYW

SEQ ID NO: 16285 - protein, 434 aa, Zea mays
  VARIANT 86: note = Ancestral polymorphism is P, Derived polymorphism is L
  VARIANT 342: note = Ancestral polymorphism is F, Derived polymorphism is S
MDMNESGEKGMEGNASSGIPVDWQTQFSAAAFSCAPPQQQQVPMMDSAFASAGLWASTSQAMALSDAGGRSAARAGFLAPVPGFLPQGLAHFPVDSGFIERAARASCFGGGGGGGVMAAFGAAADHQPMNSAFSGSSEALLDHQRTKDGSDKGEPELGRNGHDGVLSSEAAAAGDCSSKGTSDSKKRRRPNEVMGGDQVQSSNLPADSANESVHSKDKGEESSLATTTTGPGKSKGKGARETSESQKEDYIHVRARRGQATNSHSLAERLRREKISERMKLLQDLVPGCSKVTGKAVMLDEIINYVQSLQRQVEFLSMKLATVNPRLDLNIEGLLSKDLLRFPGVPSSSLGFSPEMMHPQLQLSQPGLIQGGAAGMANPDVFRRIMQAQLSAKDGSQMPPHALNGAFSDVAQQQMAYPSSQDLSIGPSQDGFQM

SEQ ID NO: 16286 - protein, 875 aa, Zea mays
  VARIANT 350: note = Ancestral polymorphism is S, Derived polymorphism is F
MGIQGNKAATHEHDFLSLYAAAAAKDAPLLLHDSKAPPPSQGNFLLKTHDFLQPLDQKPGAPPEPSPLPASAAESRHQPQQQVVVANQHALPLPGGVGTFSISPAPVSVALPAAVVKSEPPFVLWGQPAATLHPGARGHQQQWALPFAGAGQVRLPPQQAPPDRKGRGGAGGGVMESGSRSSGGAGFDDDDGLTTRREVSSSLQGTSIPLNLCEIPPRVALDSSDDTNLGFLSRYLTVSAHSFFNFFKDAPSLFSSGVVFRVRVAELTVRKRMTGVEGMSPHALVATGAGWQWQPAHVHRLHAHLLVSGRLSGSPTLAALTLLRVACRVPASPCLRPLAHHLLDRIPHLSPHLLHAAARLASRLRLPSLALRHYLALRARHPAFLPPAPAIADVLKSAPGRAAHAHALRVAAHAVDARFLDNTLISMYFACGDGWSARQVFEGMSDRDVVTWTSLISGLVQNGCPLQGLRHFASMMHSEVCPDFVLLISVLKAYMELDDFPGATAAHALVVKSGFDNELDVIITLTAMYAKFGCIVSARTLFDRVPTPRVNVVLWNAMISGYSKNGLANEAVQLFKQTRKVARSMTPDSVTLRSVIVACAQLGSVELAEWMDCYVQGSKYRDDVLVNTALIDMYSKAGSIARAHTVFERMDVQERDVVVWSALIGGYGVHGHVKEAVALFDDMKHAGVKPNDVTFLGLLSACNHAGAVDEGWSYFHSMKRDYGIEPRHQHYACIVDLLARAGHLDRAYRFIMDMPIKPEMSVWGALLHGCRMHGRSDMALAECAAQHIFELEHSNAGHYVQLANLYASAGMWSHVAGVRVSMRERGISKATGWSSIDINGEMHSFHAGDHSHPRAAEIFALLNLLSPTPFESGGG

SEQ ID NO: 16287 - protein, 784 aa, Zea mays
  VARIANT 363..784: note = Derived polymorphism lacks residues 363 to 784
  VARIANT 319..784: note = Derived polymorphism lacks residues 319 to 784
  VARIANT 309..784: note = Derived polymorphism lacks residues 309 to 784
  VARIANT 179: note = Ancestral polymorphism is G, Derived polymorphism is E
  VARIANT 57..784: note = Derived polymorphism lacks residues 57 to 784
MLCRRPCPGVFLRLFATSCRRSSLHPSQPHLRTATALPTLPVAKKVPFNVSAHGRSWSDPYHWMRDTSDPDLAVLLAAENAYADAFVGSAGGGGLRAHLAAEMRARLPASTATPPQLWGPWLYYQYVPEGKEYPVLSRKLRPSSGLVGTLLDYLSGSEKEQVLLDWNEVAEKNGYVHIGSCRISPDHRFLAYTVDTSGGELFSLEVKDLLSEHVIFSSPDKGVVSLAWSGNNESLFYTVCDETLRPNQVFCKKLQSDEAGFLVFTEKDVNCCVDITSTKDFKYMTVNSNTRTSSEVFVIESDNLREGLWPIRKRVDKVQYFLEHHNGFFYILTNAPVNDTETTTEGYYLARCRAEKSLVDRWQIVTVPDSDCTIQDMDIFHDNLVLFLRKNGTPLFCSISMPIDVDVQEPKELDDLNPWFFPIPSELCSIVAGSNNDFMSSTYQLVISSPVIPDLTVDYDLRKKTFTILHQEEVTTISANLGGLGFQSNVSSIQQNMQLVKTSQNWSDLSKLFSCERVEVISHDGVSIPLVILYSWGAHCHGESPGILYGYGAYGEDLDKSWCSERLSLLSRGWVLAFADVRGGGDLSWHMAGTKANKMHSIQDFAACGRHLIKQGFVHQNRLCAIGCSAGGLLVGAVINMLPDLFSAAVLKVPFLDICNTMLDPTLPLTVLDYEEFGDPNSPDEFEAISSYSPYDNLAPDVCYPPVLVTASFNDTRVGVWEAAKWVAKVRDVACPSCSQSVILKTNMQSGHFGEGGRFTHCDETAFEYAFLMKALGLDDVAMM

SEQ ID NO: 16288 - protein, 268 aa, Zea mays
  VARIANT 252: note = Ancestral polymorphism is C, Derived polymorphism is R
MRRAAAILLSLALAAAATTTAAAAVAKAPVPPPPPPPPPNVTAEMAKGGCKAFAGLIAASPDASSTYQSAVEGGMTVFCPSDDAVRAFLPKYRNLSADGKAELLLFHAVPVHYSLGSLKSNNGPMNTLATDGAARNFNFTVQNRGDVVTIATAASAPARVKSTALDEDPLAIYVISAVVEPVELFKPAPAPVPAPAPAPASVADAPRPGKAAAGRRHPPPAAADAPGPAAEDNAAPVDQKDAKKSAAAGAPCALWWLAAALAAASALA

SEQ ID NO: 16289 - protein, 130 aa, Zea mays
  VARIANT 65: note = Ancestral polymorphism is I, Derived polymorphism is V
MDGQRFPTYNSPPPPPYKLGLTTLVPHRTTTSIETPSVKLAKQLATNPRKLDTIPMARASVVFVIATLLFVAMVVAPMAEAKSADAPSADAPAPAADAPADGPSGPAGAPGPQGVEGLSGNEDDDDDSTN

SEQ ID NO: 16290 - protein, 217 aa, Zea mays
  VARIANT 131: note = Ancestral polymorphism is P, Derived polymorphism is L
MPTRRGRTRKGERRIDAAIDHFVVMGYDARDISAVVADLLKVYGGPDAWPLLEEGSYEVVQNRLFEIEDEEKQKQDQQLLLEHHDQQLLLEHHDHQLLLEHHDQQQLDCQQVEDERPQHQEPAADEGVEVPMFIEPQDNISISKVPAETKSADDEVEGPMSIEPPVCEAVLPLNVAIRTRPRRPCYGWLSESEDEEEEQPTGQKHEVHVLSRGERAQ

SEQ ID NO: 16291 - protein, 1588 aa, Zea mays
  VARIANT 298..1588: note = Derived polymorphism lacks residues 298 to 1588
  VARIANT 482..1588: note = Derived polymorphism lacks residues 482 to 1588
  VARIANT 673..1588: note = Derived polymorphism lacks residues 673 to 1588
MEHLFMQAFESRDRVAAQVQQQADFYSQTLASSLLAAGHQPPEWLIPSTTLPQELNGKPIVLTGRQITTPAINRTVFLPLAIPSTLSTKSGDPNGYDGYPNTNCTAMGTNQHEEEHQEQSSLAQELTESCTADKMFSRIQRSRTRQMHIEDRVHGQDQAAKSGSCDGMHRSNLKTVGSNRAAASSLMPCDDVPNLAATTSDPGQGSGFCAIQGKSIDFLKCNNNPEDQGVKLDGFPPLIVENKIICSDSDIGVSNNCSIRDSLGAPLPDFSKPNTADSVCLCHRIPETHLLVEPKILQFDVAESVCMNPSSEQTGQQQESSLKSNHLDLAFTNPSSEDPSSTSSQGPHSMGRLLLNHVKSRNLNPDSEPVEQHHKYTSECGHPDLTSMHSPNKKPSLTCPVEAPNSMGEPLLHKDTEHIPETNSLGRAYSKFSQPLKIDTSNSNETNCSVVNSLLDNDTLQATEDTDKLKSHVSPPYSGPLQLPTQLADARFGAHTSPGILPNSLLGVDGCNHLSNLQKNDTNSRCSRYRSAVSLELLPPQNFISTDACQSRLLSYRTQSNDKHSSSVASAMNASKSADSKLPQEQYLLVRPSLEFNGSISDAETPLGRSPLGMQNEMLQADPVYDSANCSPGILGDDAHVSKAYGGSADNRKNISVVPKVGPISSSRIRDMQITEKNVVASSEKNNGKLQEGKAQETPHPKDDVQVNADSCTAENIEKMKSPCTSESCEENNKHQEDRGHAQKKSAADVVQINGGMSSKRKRMKCQDIAFPSSQDTNPLFPNHQDGIGTHVVIAEKISMEIQPSDPYILRSTGFDDFMLLKSETKNDAVNHSISVASDVQQNESSSPKLRNRFSLAEVALCNSSRAKALSPNFSCDISSRNVAEEMDLQNYQAQLQNTFDVATSSIMPSRSDISLDSVELCSQEENTYLKGEGLSVSNSNVEHSRMAPQMDEILSQSVILNPANYLSTDSTNIFLNYALDQHGKHAPSPVKKLSYGSGVEADRKFRSEDLTGCLLYDGTTSRKKDSDSVKFNDAMPQFESFDFSLPLDSSTTEEKAFGSVHDSIQFGTFNSDPANKHEMSAVSGMYQLLATMSGKATNCLFNDDERQPGESIDGSVTDIFGSSGLGHKGSFITPDFAASCSSNAANKKDNGENPLTPSVEKYCLGKLSEKNGSVSEHMGSIPELLCFRIDEDNDIAEGNDYREILPRSIGNQEQSGRKALQDITGLCQSIGNSASYSIGMSMDTGDTDMTVETCSSELNHHPDLRNDGDNKKPKESCGSLLKKGGKMSRSLHNRLSKTETRHMNEANPGKRSKPSNIVANVASFIPLVKPKVQPTACVKKDVRVKALETAEAAKRLEEKKRSEREMRKAAAKLEREKLKQEKELKQKEEEEQKKKRGADVATRKRQRDEEERREKERKRKCIEEARKQQKRPIERKHANINNAHPEGHDNKELQQNSAEAVKGPVKFDEMTGLGGNATNSNNEMVVITDERPAISGPNCQENIPNSIEESYIMTPYKDSDDDDDEDFEHIEHSRRRRKLVPSWARGENLEKILLSNYVLDPRKIFARKRSSDLSEICPAHIPQRGFR

SEQ ID NO: 16292 - protein, 228 aa, Zea mays
  VARIANT 55: note = Ancestral polymorphism is C, Derived polymorphism is Y
  VARIANT 69: note = Ancestral polymorphism is I, Derived polymorphism is N
  VARIANT 70: note = Ancestral polymorphism is P, Derived polymorphism is T
  VARIANT 73: note = Ancestral polymorphism is T, Derived polymorphism is I
  VARIANT 75: note = Ancestral polymorphism is D, Derived polymorphism is N
  VARIANT 89: note = Ancestral polymorphism is H, Derived polymorphism is Y
  VARIANT 101: note = Ancestral polymorphism is E, Derived polymorphism is D
  VARIANT 103: note = Ancestral polymorphism is Q, Derived polymorphism is E
  VARIANT 116: note = Ancestral polymorphism is D, Derived polymorphism is Y
  VARIANT 128: note = Ancestral polymorphism is A, Derived polymorphism is G
  VARIANT 135: note = Ancestral polymorphism is G, Derived polymorphism is A
  VARIANT 136: note = Ancestral polymorphism is L, Derived polymorphism is F
  VARIANT 142: note = Ancestral polymorphism is M, Derived polymorphism is I
  VARIANT 146: note = Ancestral polymorphism is T, Derived polymorphism is I
  VARIANT 147: note = Ancestral polymorphism is G, Derived polymorphism is R
MLATKGCQMRTVWYLTFHETMTGCICSSLLIHRFVRFKLIKFDHSMYDWFLDYMCNQGDLALIESIKNIPYATMDVELVFIPINICELHWYLVVLNAKRREIQILDSLGSSLGHNDLDCVVTKGFAKANRCYWCGLFLLNCMEYWTRVELPDNFTHVMSQMMSVFLLQLKKELCKETEHDALKGFLHAKITSATAALGGELMLGTLRGLSVVMPASKQKLRSLLLHTL

SEQ ID NO: 16293 - protein, 727 aa, Zea mays
  VARIANT 274..727: note = Derived polymorphism lacks residues 274 to 727
MEERLFATEKHGGRALYRLHAVTVFLGICLLLCYRATHVPAAGSGGRAAWLGMLAAELWFGFYWVITQSVRWCPIRRRTFHDRLAARFGERLPCVDIFVCTADPRSEPPSLVVATVLSVMAYNYPPAKLNVYLSDDGGSILTFYALWEASAFAKHWLPFCRRYGVEPRSPAAYFAQSDEKPRHDPPHALQEWTSVKNLYDEMTERIDSAARTGNVPEETRAKHKGFSEWDTGITSKDHHPIVQILIDGKDKAVADNEGNVLPTLVYVAREKRPQYHHNFKAGAMNALIRVSSVISNSPIILNVDCDMYSNNSDTIRDALCFFLDEETGHRIAFVQYPQNYNNLTKNNIYGNSLNVINQVELSGLDAWGGPLYIGTGCFHRRETLCGRRFTEDYKEDWDRGTKEQQQHRHRVDGETEAKAKSLATCAYEHDDDTRWGDEVGLKYGCSVEDVITGLAIHCRGWESVYSNPARAAFVGVAPTTLAQTILQHKRWSEGNFGIFVSRYCPFVFGRRGKTRLPHQMGYSIYGLWAPNSLPTLYYAVVPSLCLLKGTPLFPELTSPWIAPFVYVAVAKNVYSAWEALWCGDTLRGWWNGQRMWLVRRTTSYLYGFVDTVRDSLGLSKMGFVVSSKVSDEDEAKRYEQEMMEFGTASPEYVIVAAVALLNLVCLAGMAAALDVFFVQVALCGVLVLLNVPVYEAMFVRKDRGRMPFPITLASVGFVTLALIVPFF

SEQ ID NO: 16294 - protein, 135 aa, Zea mays
  VARIANT 21: note = Ancestral polymorphism is R, Derived polymorphism is W
  VARIANT 25..135: note = Derived polymorphism lacks residues 25 to 135
  VARIANT 46: note = Ancestral polymorphism is A, Derived polymorphism is T
  VARIANT 71: note = Ancestral polymorphism is G, Derived polymorphism is S
  VARIANT 78: note = Ancestral polymorphism is P, Derived polymorphism is L
  VARIANT 86: note = Ancestral polymorphism is R, Derived polymorphism is H
  VARIANT 104: note = Ancestral polymorphism is P, Derived polymorphism is L
  VARIANT 118: note = Ancestral polymorphism is P, Derived polymorphism is L
MGTGEVKGKRAMDLKLGSITRDKVQDKYTQYWSFFRRPKETATKAASTEKVPAFVDTFYNLMTDIYEWGWGQSFHFSPSLPGHSHRDATRVHEERVADLLDARPGHRLLDVGCGVGGPMRAIAAHSGSIVTGSRR

SEQ ID NO: 16295 - protein, 150 aa, Zea mays
  VARIANT 17: note = Ancestral polymorphism is P, Derived polymorphism is L
MAARIGCEVGKYNRGGPCLHELSRRRKTNYVTTNLRRVKKKQESNWQRRDSVVGEESRPWNTAQRNTGMTRPKPPSLSTISGLNPRMAARSSASVNSLSFGACRTRPTTGPRHGAPSSSPPISRCFAPLLSSLGFGGGGHAVVPFGSVPA

SEQ ID NO: 16296 - protein, 505 aa, Zea mays
  VARIANT 412: note = Ancestral polymorphism is K, Derived polymorphism is E
  VARIANT 420: note = Ancestral polymorphism is G, Derived polymorphism is A
MRSNNLLYVSLLIVCAAALQLQLHLRADASQEGDQLKKFIRSRRDSSTRSRIDDKGAFKVSNNVVGGLLRAGGYSGSEQSALMKAGDKIAALPGQPDGGVDFDQYSGYVTVDEKNGRALFYYLAEAPRGAASKPLLLWLNGGPGCSSFGIGAMQELGPFRVNSDNKTLSRNKNAWNNVANVIFLESPAGVGFSYSNTSSDYDLSGDQRAADDAYLFLVNWLERFPEYKSRPFYISGESYAGHYVPELAATILIQNSYDDAKTAIINLRGILVGNPLLDWRMNFKGQVDYYWSHGLMSDEVFANITRHCDDDSDSDVGACDGAVQAVDAGQLDYYNIYAPVCVDAANGGSYYPTSAQLPDPCSYHYTYSYLNDPAVQVALHARPTTWSGCANLNWTDSPASMVPTISWLVENKLPVWIFSGDFDTVCPLPATRYSIRDLKLRITTPWRPWTVNMEVGGYVQQYKGGFTFASVRGAGHMVPSSQPERALILLDSFLKGVLPPYVPEQ

SEQ ID NO: 16297 - protein, 119 aa, Zea mays
  VARIANT 107: note = Ancestral polymorphism is Y, Derived polymorphism is C
  VARIANT 84: note = Ancestral polymorphism is G, Derived polymorphism is D
  VARIANT 41: note = Ancestral polymorphism is A, Derived polymorphism is T
MARSASATAPVSCAIDPAMVLSHKFPEVAYEYDERDEVLYALAMGACNADAADEKELQLVYHRDGQSSIKVLPTFISALNAKTGDGFYMDVPGLHYNPTLLLHGQQYIEIYKPIPSRDN

SEQ ID NO: 16298 - protein, 487 aa, Zea mays
  VARIANT 378..487: note = Derived polymorphism lacks residues 378 to 487
MLRLQGRRTSARMANDVGVSTPDVGHEAAALSGGTGDEEPLVSTGTEEPPATEDGVPAEIEEEGKGPAAPLEGSPAVITVEGEEEVKWLGHYSSAQTILIVGDGDFSFSLALATAFDSGANLVATSLDTYEVLKRKYSKAEANIVILKRLGATVLHGVDAKRMRFHTDLKNRRFDRIVFNFPHGGFKGKENDLRMINLHKELVWVFFRNARHLVRQLGEVHVTHKSGEPYDSWDLEHLASESSFAMFDKVPFRREDYPGYNQKRGDGKRCDKPFDLGACCTFKFQIRNLKKQKQMNRRSRLIPNLVGSNFHPGHSVTDRGVFHPVAPVEARSWHHFSPPAHTESMLMSPQPYTVNQWQRSGFPLNSDGIVAGPYLHKQESCHPVVSMPGPWLNDLPAQGGIPPPLPMSRIPSPDLLAPREQPWYQQRTILDHPGVDDYFFAREHQMSLQREYEMKRQVIPLEHRRRDRESVEKLEWLHRMIALYGRK

SEQ ID NO: 16299 - protein, 147 aa, Zea mays
  VARIANT 12: note = Ancestral polymorphism is Q, Derived polymorphism is R
MRGLVRIFEGVQRLGVPVAAAGVPKTVDNNVGIIDRSFGFHTAVEAAQRAIAAAHVEPRARRNRVGLVKLRHAGEMLTVKYIDPSYMVRAVAADNLCCTLLAHSAIDGAMAGYTGFVPGLINGNYGYIPVVEVAEARNPVDTSGLGS

SEQ ID NO: 16300 - protein, 677 aa, Zea mays
  VARIANT 265..677: note = Derived polymorphism lacks residues 265 to 677
  VARIANT 267..677: note = Derived polymorphism lacks residues 267 to 677
MEEEGGRVRPGSIWAKARFGEGVVIGNLDTGVWPEAGSFRDDGMGPAPPGWRGICQDQQASDDAQVRCNRKLIGARFFNKGYLATVGRRQQQQEVNPASTRDTDGHGTHTLSTAAGRLVPGANLFGYGNGTAKGGAPAAHAAAYKVCWRPVNGSECFDADIIAAFDAAIHDGVHVLSVSLGGSPADYFRDGLAIGSFHAARHGVTVVCSAGNSGPGAGTVSNTAPWLLTVGASTMDREFPAYLVLDNNKRIKGQSLSRTRLPANKYYQLISSEEAKGANATVTQAKLCIGGSLDKAKVKGKIVVCVRGKNARVEKGEAVHRAGGAGMVLANDEASGNEVIADAHVLPATHITYADGVTLLAYLKATRLASGYITVPYTALDAKPAPFMAAFSSQGPNTVTPEILKPDITAPGVSILAAFTGEAGPTGLAFDDRRVLFNAESGTSMSCPHVAGIAGLLKAVHPDWSPAAIKSAIMTTARVQDNMRKPMSNSSFLRATPFGYGAGHVQPNRAADPGLVYDANTTDYLSFLCALGYNSSVIATFMAGAGDGHEVHACPARLRPEDLNYPSVAVPHLSPTGGAHTVTRRVRNVGPGGATYDAKVHEPRGVAVDVRPRRLEFAAAGEEKQFTVTFRAREGFFLPGEYVFGRLVWSDGRGRHRVRSPLVARVVNTKKKHISIA

SEQ ID NO: 16301 - protein, 68 aa, Zea mays
  VARIANT 50: note = Ancestral polymorphism is P, Derived polymorphism is R
MCCCPSKACCICTLIVLVLVAVGLVFGFGVYTRGFHKLTSMHLQDDAYGRGGAGGSFRAYGHLAPPPY

SEQ ID NO: 16302 - protein, 181 aa, Zea mays
  VARIANT 74: note = Ancestral polymorphism is K, Derived polymorphism is N
MALVVTRRSACMDQRPPERNAKRAREEEIHAAPAQPDFPFEEEEEEEEEEEEAAAGAGEASRRPPGVFQFPWQKCRGGLGVSAAGSSRELRDVFFRSLVDGGAAAIGVPGDRLVSPPPGRRALLEGVDAWLAAAADGEVDPVWRSALMARSSRMDGRGPSPRMLRPRVASSALRCPPSSAA

SEQ ID NO: 16303 - protein, 257 aa, Zea mays
  VARIANT 35: note = Ancestral polymorphism is R, Derived polymorphism is H
  VARIANT 52: note = Ancestral polymorphism is R, Derived polymorphism is H
  VARIANT 108: note = Ancestral polymorphism is N, Derived polymorphism is D
  VARIANT 191: note = Ancestral polymorphism is A, Derived polymorphism is V
  VARIANT 232: note = Ancestral polymorphism is G, Derived polymorphism is V
MACLLVLVIAATVLTGPPGKLTHAARTSPAEAFWHAALPGAPMPEAIRELLRPAGAAGTNAPDAARSRHHDADPPPMNFKYEDYRSSRRNEATATSAEALDRAGGAGNAAASPAVFFLEEAVRVGGVLPFRGMVPRGTASVAVASPPMRLYKVRAVRAIDGRRFMVCRRDREDGPDGDAVYGCRATGPARAYAVGVVGERGETVAATVVCRTDTSRWNRVRAAFRLLDVKPGGAAVCHAALGAQVIPVKNDSGSSLV

SEQ ID NO: 16304 - protein, 172 aa, Zea mays
  VARIANT 26: note = Ancestral polymorphism is G, Derived polymorphism is E
  VARIANT 31: note = Ancestral polymorphism is D, Derived polymorphism is N
  VARIANT 35: note = Ancestral polymorphism is E, Derived polymorphism is Q
  VARIANT 74..172: note = Derived polymorphism lacks residues 74 to 172
MGLHGGVVVLRAAVLAAVLGFVAAAGFISNDALLERGHDTTGRSLLQAKKDCPVSFEGANYTVITSRCKGPLYQPTLCCGALKDFACPYSTYINDVSTNCAATMFSYINLYGKYPPGLFANTCHEGDKGLTCPEDTPQIEPGQKASGAAAVAAPAAALAAAALAVSLLLMSC

SEQ ID NO: 16305 - protein, 589 aa, Zea mays
  VARIANT 314..589: note = Derived polymorphism lacks residues 314 to 589
MAGASNHGSLTDEWLPPPTPSPRSLVSSFLNEEFSPGPFSGLFSKHGANRPHDQSEKGRGALNSSEEFPTHAVKDPFQKGFSLEPNLFSANHISNSNGGLAERRAARAGFSVPKIDTSRVGSSAVIRSPVSIPPGLSPTTLLESPVFLYNKMAQPSPTTGTLPFLTATNDKSTIPPATKITEDSAVYNDVFSFQPHLGSKETGFSTAEKDYGAYQQKHSLWNIHQQESSLQSSFTAVKDNTSATIGETKTSSSMFSDSHYSADQQQGEETNMKEQGKGVEARSAAFLPAPVHNDASLLDSQDAVDVSSTLSNEEDERATHGTVSIECEGDEDETESKRRLISSIRKLELDALGAIAIATTSTTSTIDMGPASSRAVREPRVVVQTTSEVDILDDGYRWRKYGQKVVKGNPNPRSYYKCTHPGCSVRKHVERASHDLKSVITTYEGKHNHEVPAARSSGQGSSGSGSGPSAPQAGGSHRRQEPAQASFAHFGTSPFSSFGLAPSGQLGPTTGNFRFGMVPPGATIPMPSLGSLAPTKMIGNPSAMQGYPGLMMPGEPKVEPFSRPHFPTSIAPPPAYQQILSRPPFGHQM

SEQ ID NO: 16306 - protein, 134 aa, Zea mays
  VARIANT 55: note = Ancestral polymorphism is A, Derived polymorphism is V
  VARIANT 57: note = Ancestral polymorphism is V, Derived polymorphism is L
  VARIANT 67: note = Ancestral polymorphism is F, Derived polymorphism is S
MAALYLSSSGCGGVAGQGGAAARARGVTCPLQWWIGREEFLNISCDMEYKKRVDALVFFSLLLLGYFAAHAHGNGHVTDDVNVSAPAEEGILREKRAQCAQGFLPCKDNKCYCCIGGRTHDCYYTMAQCSHACF

SEQ ID NO: 16307 - protein, 276 aa, Zea mays
  VARIANT 46..276: note = Derived polymorphism lacks residues 46 to 276
  VARIANT 117..276: note = Derived polymorphism lacks residues 117 to 276
  VARIANT 161..276: note = Derived polymorphism lacks residues 161 to 276
MSTMRNAGAKGWGLTWIWMMMVTIPVHRNGRYRQREFTVPVGLGSQTGSRRCHHSRVRCRLHQRIGFDHLHEPRPHPSAAEEPRPVAVGAGHHRHGRGPQPAMAHPGQHEAGLPEPEVPVDGELKQPEHDERGAPEPQIHRLCPLAVVPECRLPLLHPVYQLLESRRRRDPRDSCAHHARHLGERHARTSGAAMARWRRMSQGDPGSHRGVCGGHGGDARREIRWRPRDGEAIDRDRDFRRQNIAGRMWTPRRNRRPPRRRHHRPQPRERTRRRAA

SEQ ID NO: 16308 - protein, 477 aa, Zea mays
  VARIANT 96..477: note = Derived polymorphism lacks residues 96 to 477
MESAMFAGCWLLAASLVLATLASPHRLGAAAGEGSETKWHVVSVNSLLPSTVCTPTKAAPSSSALTVVHGHGPCSPQESRRGAPSHTEILGRDQDRVDAIRRKVAAVTTAASSSKPKGVPLQVGWGKYLDTTNYFTSLRLGTPATDLLVELDTGSDQSWIQCKPCPDCYEQHEALFDPSKSSTYSDITCSSRECQELGSSHKHNCSSDKKCPYEITYADDSYTVGNLARDTLTLSPTDAVPGFVFGCGHNNAGSFGEIDGLLGLGRGKASLSSQVAARYGAGFSYCLPSSPSATGYLSFSGAAAAAPTNAQFTEMVAGQHPSFYYLNLTGITVAGRAIKVPPSVFATAAGTIIDSGTAFSCLPPSAYAALRSSVRSAMGRYKRAPSSTIFDTCYDLTGHETVRIPSVALVFADGATVHLHPSGVLYTWSNVSQTCLAFLPNPDDTSLGVLGNTQQRTLAVIYDVDNQKVGFGANGCA

SEQ ID NO: 16309 - protein, 114 aa, Zea mays
  VARIANT 12: note = Ancestral polymorphism is A, Derived polymorphism is S
  VARIANT 9: note = Ancestral polymorphism is Q, Derived polymorphism is E
MEAAKERQQRKAAGEGDSTTVQLPTETSPYVQYEGLEDYKMRGYGAQGHLPVSDVPHGGSGTEAPTVPGTAIPVAEPKRRDDVQPQRDLGGDGGGGVRRPGDTSTDAINRHGVP

SEQ ID NO: 16310 - protein, 295 aa, Zea mays
  VARIANT 39..295: note = Derived polymorphism lacks residues 39 to 295
MTSIPRPAADATDTRVDASTSAASSRSRRASAGSEVRERDPHSGKEARGGSKVWEGDPHGVPVLVPIRARDAHGRGSGSLESCPRIPIRTRRMTSIPRPATDVVDARVDASTSAASSRSCRASAGREVRERDPHGGSEARGGSEIPSGFGREEAAPGSAEPDTRRGGARGDATRRNDDVERGQAPANADRNGNGALADTDVRKKAEDVEAKRKAEEAEAEARRKKEDEEWDADLAAYYQEQWATEDEGATGAAAATAETAPLAAIAIPVVPTVRVVITFTKFVPLIEPEEFFTID

SEQ ID NO: 16311 - protein, 496 aa, Zea mays
  VARIANT 243..496: note = Derived polymorphism lacks residues 243 to 496
MATGLALAAAPHVASVTGSGTVEEQAAGVGILLQISMLVLSFVLGHILRRRKFYYIPEASGSLLIELFMFYLTASYPVRIQLSTKTILFELRCYHNICNPGNLHCLHCYSYLGGLLYIVYRLPLVECMMFGALVSATDPVTVLSIFQELGTDTNLYALVFGESVLNDAVCRIFFLIPYPLFIFFPTDAYKILGPFFGLSLKVAISLYRSMASMRTHHSGKNFFLVILRFLENFVGSMSSGILQAEVYPKRADSYVHCKICTRLDLKRFPQNSATPIFKKTFLHQDYIDVFLYFCQVMSQLCHSLIRSNLFKYAALGVEKFIYMGFDIAIERQSWSHIGFIFFSIIFILVARAANVFSCAYILNLARPPHCQIPRQYQQALWYSGLRGAMAFALALQSVHDLPDGHGETIFTATTSIVVLTIGINNACMAMFKVLLIGGSTGTMLEALQVVGDSNRYCQLYEESSNGNDTGYTGQNYDEGASTSSKFRSKLRDLRRR

SEQ ID NO: 16312 - protein, 50 aa, Zea mays
  VARIANT 11: note = Ancestral polymorphism is T, Derived polymorphism is I
MAWGEDEAIDTDVASAGLHVSEHISRDAAAQPDLEARATRFTPTPRIPRK

SEQ ID NO: 16313 - protein, 165 aa, Zea mays
  VARIANT 37..165: note = Derived polymorphism lacks residues 37 to 165
  VARIANT 22..165: note = Derived polymorphism lacks residues 22 to 165
  VARIANT 12..165: note = Derived polymorphism lacks residues 12 to 165
  VARIANT 6: note = Ancestral polymorphism is A, Derived polymorphism is T
MLKQAAHKVFVQMQAHMQRNRQANSSQQSLFSQLSAQQMASNGSAQLHDQKIRPPGPPNQGQKNQVSSSPQAFAPPSGTQPHNSVHYLAHDNPNQNPDAKGTNVVPNQPSRMNTSVPLQTKNKQHQPTQLQQASQQIYGASNPGAQAYPRSITGSLRSPSPVPET

SEQ ID NO: 16314 - protein, 106 aa, Zea mays
  VARIANT 54: note = Ancestral polymorphism is I, Derived polymorphism is M
  VARIANT 31..106: note = Derived polymorphism lacks residues 31 to 106
  VARIANT 29: note = Ancestral polymorphism is G, Derived polymorphism is E
MRVDPSHSAGILPESRFGEDSIIGVLDTGIWPESASFRDDGMSEAPRRWKGQCIAGDRFNATNCNRLASRLGFFHLVVLPAKDFITCLKVTRRILLVVSDIKFMIG

SEQ ID NO: 16315 - protein, 161 aa, Zea mays
  VARIANT 27: note = Ancestral polymorphism is P, Derived polymorphism is R
MGSQSCGSCYVRSIVDRMKPRCLEGKPRRRETNTVRTRSRAEARQGTLEDILYSPQSIDGDAPGAPSPRRHSPKVCPLNMDCAYENNSPNVRESFSIDRMSLRSQNSIVRRVSFRLPDESDVFIIPARKDPDEYSTDDESTEDVSEEVDPKKLVKTARRNE

SEQ ID NO: 16316 - protein, 420 aa, Zea mays
  VARIANT 136: note = Ancestral polymorphism is T, Derived polymorphism is M
  VARIANT 99: note = Ancestral polymorphism is T, Derived polymorphism is I
  VARIANT 93: note = Ancestral polymorphism is G, Derived polymorphism is E
  VARIANT 81: note = Ancestral polymorphism is V, Derived polymorphism is A
  VARIANT 73..420: note = Derived polymorphism lacks residues 73 to 420
  VARIANT 26..420: note = Derived polymorphism lacks residues 26 to 420
MVTASLFSLPSLRVLSRTSAHGPRFQILAARKPVESSTATSGSRRGGSKGAGLLSVLDRAMADEEEYRRARAQVQRKGVEVEGYAIEGISVGGHETCITVPSLNVAFDIGRGPQFAVSQDYLFITHAHLDHIVSATGPVFIFAGSISAFALFAYTPLTPKGGLPMYIATRGLYNLKPPTVFVPPCIRDDVEDLLQVHRRTSQIELKVELVALDLGETYEIRNDLVARPFQTYHTIPSQVLLLRASRHLFFVICHDLMPIDIIHPMNGVKGYVIYSIRRKLKKQYAHLKGSQIMKLKQSGTEVSCEITDTILYPEVAFTGDTKSDFILDPRNADALRAKVLITEATFLDDHVDVEHAREHGHMHLSEIMEHFQWFRNETIVLTHFSNRYSLEDIRQAVSRLQPKLNSKVVALTEGFKSDYR

SEQ ID NO: 16317 - protein, 88 aa, Zea mays
  VARIANT 38: note = Ancestral polymorphism is A, Derived polymorphism is V
  VARIANT 67: note = Ancestral polymorphism is C, Derived polymorphism is Y
MEYRKRVDALVFFSFLLVGYFAAHAYDEKGHVTDEVAVPAPSEGGVMRATGAHCEVSVPCKDKRCYCCVGGRIDECYLTMPFCNYACF

SEQ ID NO: 16318 - protein, 535 aa, Zea mays
  VARIANT 328..535: note = Derived polymorphism lacks residues 328 to 535
  VARIANT 311..535: note = Derived polymorphism lacks residues 311 to 535
  VARIANT 95: note = Ancestral polymorphism is D, Derived polymorphism is G
  VARIANT 90: note = Ancestral polymorphism is T, Derived polymorphism is I
MGTPLLIPLLVTLQLFTTSSPAVASSHISAIISQSGLDFAKDLLVSHAVATLTPMNVPDIERTMSIPLVGTVRMAASGIVLHGLAVTNSTVAVGDAGVVVAASLASANLTMEWNYSYDAWIVTISDSGNASVQVEGMEVGVSMVMKNQNGSIKLSVTECSCYMEDLDITLNGGASWFYQVFIDGFSNHIISSVENAIKNKVMEGALKLDSFLGNLPKKIDLDSVAAMNVTVVNDPIFKSSSVEFDIDGLFIPSDETAPRDMHLGDTQFALPLGSSSKMLWISLDEDVFNSVSALYFKAGLLQRMVDKIPDQFFLNTASWRFLVPRLYREFPDDNMLLNISAVSPPSVRINVGRIDATVDLDITVNVLDFGEIVPVACLSVSVDVYGAAAVSENNLVGRVELDYFSFTLKWSKVGKLHTILVQTVLRILLKKLFVPYVNSYLKHGFRLPIIKGFSVTDAYILTSYSRMIVSCDVAFIEPEVLSPVQESNTNEDLSYEVLSPVQESKTNEELTNEDLSFEVLSSLLLGSAKTSQPTA

SEQ ID NO: 16319 - protein, 265 aa, Zea mays
  VARIANT 117: note = Ancestral polymorphism is T, Derived polymorphism is M
  VARIANT 66: note = Ancestral polymorphism is L, Derived polymorphism is F
MMESKAAIILAAAVLAVLFAPALGQKSSPPAPAPMSLPPTPAPAPAPHYVDLAELLSVAGPFHTFLNYLEKSNVIETFQGQANNTKVGITVFVPKDSAFSALKQSTFSNLTADQLKTLLLYHALPKFYSLAEFKNLSSLNPVNTFAGSPYTLNLTDDMGSIYVQSMWSRPKIASSVYATRPVAVYALNKVLLPMQLFSKDPPLAPVPAPAPEPGASDAPGPAAGKAGGLTGGKGDSTSAARDTGAVGVASSLLLAAAAGCLILQW

SEQ ID NO: 16320 - protein, 381 aa, Zea mays
  VARIANT 205..381: note = Derived polymorphism lacks residues 205 to 381
MAVETSPGPQLLATDDGRTAAATGPEKRTGTSTGEEEERWGKKEWPNVERGRREIETVAMSLKPSVRRCAGGWRDIHVRPDDDRPGLFNSLASHGCVLEVIHLDHANVSKAELKERLAKMYKHKFAKWPERFKSMDLHPTKSWELSGFGFVKFRYLEDATVANGRYMNERTYDYHYQDLKGLDPTLQMPWLQKAKLLLQELKTVKTDLSFAKERYAQLEEEDKMLCESYDKGDNPEANDQAILDHPIRRSENDPHDGKRKCEALWPIFRISHQRSHFIYDLYYRRKEISQELYEFLDPGYADFSRVSEPRTPKRRQLKDLSWRSKLYNPSVGVRVGGGGKNAVEEAPPRNDVERIHIRSENSSEDDEYRVHVGLNKSRVQT

SEQ ID NO: 16321 - protein, 267 aa, Zea mays
  VARIANT 84..267: note = Derived polymorphism lacks residues 84 to 267
  VARIANT 94: note = Ancestral polymorphism is R, Derived polymorphism is H
  VARIANT 99: note = Ancestral polymorphism is S, Derived polymorphism is I
  VARIANT 110: note = Ancestral polymorphism is G, Derived polymorphism is D
  VARIANT 113: note = Ancestral polymorphism is V, Derived polymorphism is G
  VARIANT 119..267: note = Derived polymorphism lacks residues 119 to 267
  VARIANT 150: note = Ancestral polymorphism is R, Derived polymorphism is C
  VARIANT 152: note = Ancestral polymorphism is T, Derived polymorphism is S
  VARIANT 162: note = Ancestral polymorphism is A, Derived polymorphism is T
  VARIANT 165..267: note = Derived polymorphism lacks residues 165 to 267
  VARIANT 189: note = Ancestral polymorphism is G, Derived polymorphism is R
  VARIANT 196: note = Ancestral polymorphism is R, Derived polymorphism is C
  VARIANT 197: note = Ancestral polymorphism is R, Derived polymorphism is C
  VARIANT 227..267: note = Derived polymorphism lacks residues 227 to 267
  VARIANT 229: note = Ancestral polymorphism is C, Derived polymorphism is Y
MASSHCPAHRASEAQPTMFDDYYIMDCDVISAPEVMQRRTDNNDQFVILATVTVAFVLNKGLGEHRLRDLNDEINKLLRERGHWERRIVELGSRDYSRSSNAPLMTDLNGNIVVVPNPSGRGPGYRYFGAARKLPGVRELFDKPPEMRKRRTRYEIHKRINARGRQAPDVALLQLQGPGRAAGGGVAGGPRGPPRRRWYFFNRSASRPTLLHASAQATLAHRRRRPQTCTHRLADPDASVASLLYPPAARPHTSADRRPPSGRPLNA

SEQ ID NO: 16322 - protein, 122 aa, Zea mays
  VARIANT 98: note = Ancestral polymorphism is T, Derived polymorphism is I
  VARIANT 56: note = Ancestral polymorphism is G, Derived polymorphism is R
  VARIANT 55: note = Ancestral polymorphism is S, Derived polymorphism is P
  VARIANT 32: note = Ancestral polymorphism is D, Derived polymorphism is N
MQTDNERNEVKDMSNRLEARELSTALSKNSSDAMYPIVSKESLLQEMFFSAKTTSRRLHLAKELLKLPTDVLKSFAGSKEGLSTLYSWILDSLGKNATQLLRQCVRLLVLVSTDLVVVRLSG

SEQ ID NO: 16323 - protein, 362 aa, Zea mays
  VARIANT 202: note = Ancestral polymorphism is S, Derived polymorphism is C
  VARIANT 6: note = Ancestral polymorphism is R, Derived polymorphism is H
MEPALRELWAESRDLLGLPSSSQDATAVPRVSLPPTPLAFLRDHVSPGRPLLVSAAATRHWPAASLWPTASYLTDALRSTAVSLHLTPDGRADALASHPHPRRPGSSRCFASAHVRRVDFPTAVRLIRGSDPAAGLVAYAQQQDDCLRGEYAAVAGDVDAHVPWATEALGCLPEAVNLWIGNAHSVTSFHKDHYDNIYVVLSGEKHFLLLPPTEHHRLYVRDYPAARYVATEQSSEGGRQLRLKLEMEVPERIVPWSSVDPCPASPEELAVQASSFPLYFDGPAPIRCTVRAGEMLYLPSMWFHHVSQSPGPNGLTIAVNYWYDMQFDIKYAYFNFLRSLEINGCSSGKPDASEGDLEEKKD

SEQ ID NO: 16324 - protein, 23 aa, Zea mays
  VARIANT 11: note = Ancestral polymorphism is E, Derived polymorphism is K
MELFKPNCVAEFTAQHLPWIHCT

SEQ ID NO: 16325 - protein, 595 aa, Zea mays
  VARIANT 119..595: note = Derived polymorphism lacks residues 119 to 595
  VARIANT 118: note = Ancestral polymorphism is A, Derived polymorphism is V
  VARIANT 105: note = Ancestral polymorphism is G, Derived polymorphism is C
  VARIANT 103: note = Ancestral polymorphism is H, Derived polymorphism is Y
  VARIANT 94: note = Ancestral polymorphism is D, Derived polymorphism is Y
  VARIANT 88: note = Ancestral polymorphism is A, Derived polymorphism is T
  VARIANT 76: note = Ancestral polymorphism is H, Derived polymorphism is L
MSAALACLRRTSKRRRDAPDHALPPLLKQPLMAHAGAEAAESSSSSSASASGVDGASAAAAAASASSPSASPRVVHFFVRATDSRTIAMHAGWDDTVGAVLDHLGACGYGRDLRLLYAGRQLALDSTLAELRLPPDSTLHLLARLRSTQHPHAWQLASHIASTAAIAESEPSRMPSAAFSLDELVKEFILRAHRANLRLSRYDRAATVEDRAAADHTAEYLEIFLQAGAALALVRLYLSKSPFRSYAESAIKCFVPTDPSSLPMDLLIVLLEFCRLLSLAAGRNELLYRSCRRTLASALSTRPKLPPSMNSPTRLIEQVLPFARETVDMVLDGLASMPMIISPSDLDEFSNFLKVMCQQARRWISDEGPIPSIFYSRESQHGDTWIWRFHIMSMYMLKRLDECLKTLEMDLPLSSESIGVMESQTIWAARSHILVMLTELDFIAAIYEDVGHNLQLVLLAHKAPLNALVRCSKRNERLHWLVKHKNLLCFEARRSLVFMMLPEGKDDFGELHEMLIDRSHLLDESFNYIAQAEQAELHGALFMEFKNEEATGPGVLREWFCLVCQALFSPKQVLFSPCPEDKRRFYLNESKFPGY

SEQ ID NO: 16326 - protein, 89 aa, Zea mays
  VARIANT 9: note = Ancestral polymorphism is D, Derived polymorphism is A
MEKHTKRVDALVLFSLLLLGSCAQGLQDEVGAPPALSAEEGVMETRAECRQVLLPCKDNKCYCCIGGGTRQCYATLAECRHACLPLNTN

SEQ ID NO: 16327 - protein, 122 aa, Zea mays
  VARIANT 108: note = Ancestral polymorphism is L, Derived polymorphism is Q
MASEQGVVIACHSKAEFDAHMTKAQEAGKLVVIDFTAAWCGPCRAIAPLFVEHAKKFTQVVFLKVDVDEVKEVTAAYEVEAMPTFHFVKNGKTVATIVGARKDELLAQIEKHAAPAPASASA

SEQ ID NO: 16328 - protein, 296 aa, Zea mays
  VARIANT 4: note = Ancestral polymorphism is P, Derived polymorphism is R
MEKPRQVARKFLARPQHEGAGAVVRRSIGRFELRYFDPFLVLDEFTVSAPAGFPDHPHRGFETVTYMLEGAVTHEDFEGHRGTIKAGDVQWMTAGRGIVHSEMPAGPGTSRGLQLWVNLSSANKMVEPGYQEIQSKDIACTSDGDGGVTVRVIAGHAMGVRSPVRTRTPTMYLDFTVRPRGAVRQPVRASWNAFAYVLEGEGVFGAERCAPVGAHHLLLLGHGDGLEVWNKLPDRPLRFLLVAGEPIGEPVAQLGPFVMNTEEEIDMTVNDFECYANGFEKARHWKSQAMLALGVE

SEQ ID NO: 16329 - protein, 201 aa, Zea mays
  VARIANT 168..201: note = Derived polymorphism lacks residues 168 to 201
  VARIANT 118: note = Ancestral polymorphism is P, Derived polymorphism is L
MLYSLVSSENATVAELATTLQADLYQLQAAASFACRLGWAVKLLDTDSVLRDSSTLALSNNILSDEVESSRTSVASEKSGHESLSSDSDGHKNSGMAYVGFIVDANVTSYLMMGSLSPDLKSHAVTLYEAGKLGDSCKADLCNDLASLEGKRFEGVLQEFANHAFSLRCELECSLSGGTSTETADLTTRNIQFHSDASYSI

SEQ ID NO: 16330 - protein, 141 aa, Zea mays
  VARIANT 39: note = Ancestral polymorphism is A, Derived polymorphism is G
  VARIANT 64: note = Ancestral polymorphism is D, Derived polymorphism is E
  VARIANT 70: note = Ancestral polymorphism is V, Derived polymorphism is M
  VARIANT 71: note = Ancestral polymorphism is R, Derived polymorphism is M
MGRSSPNDKLLLVKALRARGHVVAVTGDGTNDAPALHEADIGLSMGIQGTEVAKESSDIIILDDNFASVVRVVRWGRLVYANIQKFIQFQLTVNVAALIINVVAAVSSGNVSLNAVQVLLNYVHGSGIKTVRPNYSKEIFR

SEQ ID NO: 16331 - protein, 130 aa, Zea mays
  VARIANT 61: note = Ancestral polymorphism is G, Derived polymorphism is R
MDGLPRELCLKIFHLLDHQSLASSPQGLTRSLKLWHPNTELEAPVLASQTFFSKLFNDRWRADATAFYAPEGSKSWKDVFAVQDRCDRYGLIIREGKDYYLIYQGEIQRYLDNQKFAMTSFLTKKNCQAQ

SEQ ID NO: 16332 - protein, 195 aa, Zea mays
  VARIANT 131: note = Ancestral polymorphism is P, Derived polymorphism is H
MVVSYTEEHVYRHPWHRVTAAAMRKFTDPAARAASGALSHILDVHTLSRDVDARSGRLRAVRAIAGRTPPLPFPIRAAVAGAGGDVVVLCVERTDVDAPARDMRVASRNATLRGLVDVRERCSYEPHPARPDEWTLFRQETTIRCCAPLAAVAAKVAELVERRCAERFAQNAGRGKEVVERICEDLAAEQDSLAS

SEQ ID NO: 16333 - protein, 163 aa, Zea mays
  VARIANT 72: note = Ancestral polymorphism is R, Derived polymorphism is S
  VARIANT 100: note = Ancestral polymorphism is S, Derived polymorphism is C
MAQRDKKEEPTELRAPEIALCANNCGFPGNPATQNLCQSCFSASRSSSSSSQPSPTSSPSASAPAAAVPQPRPALLDAALQLAPPAAAAGQPVEASARTSANRCSSCRKRVGLTGFRCRCGDLFCGAHRYSDRHGCRYDYRGAARDAIARENPVVRAAKIVRF

SEQ ID NO: 16334 - protein, 440 aa, Zea mays
  VARIANT 17: note = Ancestral polymorphism is V, Derived polymorphism is M
MPLAPLMEIDLHAVRAVRVLGRGAMGTVFLAVNGAGGEAYALKVFDKRSPAVASRPSAGTDAARRARWEVSVLSRLAHPHLPSLLGCAETPDLLAWALPYCPGGDLNELRHAQPDRVFSPAAIRFYVAEVVSALAELHAAGIAYRDLKPENVLLRADGHVTLTDFDLSRQLPPRSPSAASTSTSSSCSATSSPPPQAQSHGRSQHRHVKNIFKRSESAVTASTSGQEEPRNLAWYLSKRIDGGADQIKKAKSARVSPMDRGKKLSSFCSAAAAGERSFSFVGTEEYVAPEVVRGDGHEFAVDWWALGVLVYEMSHGRTPFRGRGRKETFRNVLLREPEFTADARRRWPELTDLIARLLEKDPARRLGFAGGADEVRAHPFFAGVAWDLLGEVSRPPYIPAPADDTVSCEGFSVVEYFDRLHQPPLSPAEYSPEEELLPEF

SEQ ID NO: 16335 - protein, 465 aa, Zea mays
  VARIANT 167: note = Ancestral polymorphism is D, Derived polymorphism is Y
  VARIANT 139..465: note = Derived polymorphism lacks residues 139 to 465
MTSPIQLAAAPLLLLVVVVAGTRSSRIFSVADYGAAGDGFRYDTAAIQAAVDACAAAGGGRVLLPAPGNYLTATVQLRSRVVLEVPPGARLLGGTRQADYPPESRRWYVVLAENTTGAGITGGGEINGQGGAFVVRPSEVKNVMVSWNATGDCLGDECRPRLVGFIDSKDVRIHDITLNQPAYWWLYTCIARSLHLVRCDNTVIHNVSIFGDFKTPNNDGIDIEDSNNTVITDCHIDTGDDAISPKSTTGPVYNLTATNCWMRTKSCAIKFGSASFFDFKRLVFDNITIVDSHRGLGMQIRDGGNVNDVVFSNIKMRTRYYHPLWWGRAEPIYITTCPRHPDSKEGAISDIRFINISSVSENGVFLAGSKHGLLRNLKFKNIDLTYKRWTNYTGGLYDYRPGCQEMVKHKTGGMMLEHISGLEIDNVRMRWARGSLKGWNVNPILFRPSTIDNLSFHDWQSVDVQ

SEQ ID NO: 16336 - protein, 211 aa, Zea mays
  VARIANT 135: note = Ancestral polymorphism is G, Derived polymorphism is D
  VARIANT 118: note = Ancestral polymorphism is G, Derived polymorphism is D
  VARIANT 116: note = Ancestral polymorphism is P, Derived polymorphism is L
  VARIANT 102: note = Ancestral polymorphism is A, Derived polymorphism is T
  VARIANT 91: note = Ancestral polymorphism is A, Derived polymorphism is V
  VARIANT 82: note = Ancestral polymorphism is C, Derived polymorphism is F
  VARIANT 62: note = Ancestral polymorphism is G, Derived polymorphism is V
  VARIANT 52: note = Ancestral polymorphism is R, Derived polymorphism is C
  VARIANT 41: note = Ancestral polymorphism is A, Derived polymorphism is G
  VARIANT 40: note = Ancestral polymorphism is P, Derived polymorphism is L
  VARIANT 31: note = Ancestral polymorphism is G, Derived polymorphism is D
  VARIANT 9: note = Ancestral polymorphism is G, Derived polymorphism is R
  VARIANT 8: note = Ancestral polymorphism is T, Derived polymorphism is M
MFMQLIRTRLSSTGGALQRELIRFLNAGAFGTGTDGHVLPAEATRAAAMLVRINTLLQGYSGIRFEILEAIVKLLNANVTTCLPLRGTVTASRDLVPLSYIADLVTGRENFVALALDGSKVNATEAFKIAGIQGGFFELQPKEGLAMIEAAAIMEHILEGSSFMKLANKLGELDPLMKPKQDRYALRTSPQWLIRSVFSNNVSKCCVWSIK

SEQ ID NO: 16337 - protein, 194 aa, Zea mays
  VARIANT 36: note = Ancestral polymorphism is A, Derived polymorphism is V
  VARIANT 38: note = Ancestral polymorphism is R, Derived polymorphism is L
  VARIANT 103: note = Ancestral polymorphism is V, Derived polymorphism is A
  VARIANT 150: note = Ancestral polymorphism is V, Derived polymorphism is M
MGTPSSRQLLLVAAVCLVVVAVDTAAAAAAAAAAAAMRGRRRVHLRVYMHDVIRGPGQTAIQLVWGVGPPHATMPGRSFGDTAAIDDRHLHAQLAAGGAVLVVDVTLALTAGPYNGSTIVVAGRDRVQDETRELAVVGGTGDLRGASGYVLWRTAKVWSEVHMALEIDVHASVPLPLPDDDDDDNDLVLGSRDE

SEQ ID NO: 16338 - protein, 823 aa, Zea mays
  VARIANT 559..823: note = Derived polymorphism lacks residues 559 to 823
  VARIANT 548..823: note = Derived polymorphism lacks residues 548 to 823
  VARIANT 333: note = Ancestral polymorphism is D, Derived polymorphism is H
  VARIANT 292: note = Ancestral polymorphism is A, Derived polymorphism is D
MTSRFWGQGDSESEEEEEVKPEQGSNSDDDGGRDGAGRSAQNRYLKNQEDDSDESDTGHRVIRSLKDKHNEEMKYIVDQMRNAMKINDWVSLHESFEKLSKHLEKVVRVNESTEVPKMYIKALVLLEDFLAGALANKEARKKMSNSNAKALNAMKQKLKKNNKQYEEQIQKCREHPEGFEDEAVDDKDTHDDDDDDVDESDAEIEDPDKIAMSESEEERDEDDDHKDGWEQKRSKKDNLMDKQFLKDPSEITWDIVDKKLKEIVASRGKKGTGRIERVEQLTFLTRVAKTPAQKLEILFHVISAQFDVNPSLLGHMPVNMWKKCVNNMLLVLDILEQYPNIVVDISFEPDEKETQKGVDYDGTIHVVSDLVAFLERLDSEFFKTLQCTDPYTKDYVQRLREEPLFLVVAQNVQGYLERVGNLKSAAKVALRRVELVYYKPQEVYDAMRKLAEQPEDTVDNDDAEAGDEHQATDDNRGPSPFVVIPEVVRRKPTFPESARTLMDGLLSLIYKYGDERTKARAMLCDIYHHAISDEFSVARDLLLMSHLQDGIQLMDISSQILFNRVMAQLGLCAFRAGLINEAHDCLTELYSTGRVKELLAQGLQQSRFHEKTPEQERLERRRQMPYHMHINLELLEATHLICAMLIEVPNMASSTYDKRRPMSKTFRRLLEVSERQTFVGPPENVRDHVMAATRALNKGDHQKAFSVINSLEIWKLLRNREHVLEMLEVKVKEEALRTYLLSCSSCFSSLSLNQLTTVFDLNEQHAYRIISKMMMHEELHASWYQPTKSIIFHSLDQSRLKVILLKMANKMANKVESRRAVPA

SEQ ID NO: 16339 - protein, 586 aa, Zea mays
  VARIANT 356..586: note = Derived polymorphism lacks residues 356 to 586
MAVVAAGGEEAFAPAAPSTSGAPASRQDVQAAIAKAVELRQLHAALIQRGAPNARAASRSPAVIRLPPLASPARSRAADEEYPVFTPAYDDEEHVAAVAPNHICPDNRSRSENWTGVALDQGGSDDAALSDYDGLQAFSSSNSDVFFPSSNDHRLRNRGTAYKIHPAFMHSAPSADRFLPSAGRVAYTSELNLPPATCGNAFRPATISGTRVPPPSAHSRTKQGGPPQILSWLFPKSRKKAKPPEMTSPTAIERGNMPQLLTEWGALSMESLKKELAEANAHRDAALHEAAEVRSSLGELATKLVSVEAYCSELKKALRQATNSPSVSRRPTKSIEPSRELSMPVSHEVMVEGFLQIASEARLSVKQLCKALIQQVNEESSDGLSDKLNLLLRPYQLALSSGSVSKHCSKAVLYHLEAIMNQVMFQDFENPAFQRNGSPRCLDPAEDSRQSFAAFVALRNLSWNEVLRKGTKYYSEDFSRFCDRKMSVVVATLAWSRPWPEQLLQCFFVAAKCVWLLHLLAFSFGPPLTILRVQDGRAFDELYMEDILHDRQPVQSPCQVKIMVTPGFYVQDRVLKCRVLKTRSAA

SEQ ID NO: 16340 - protein, 210 aa, Zea mays
  VARIANT 137: note = Ancestral polymorphism is V, Derived polymorphism is E
  VARIANT 128: note = Ancestral polymorphism is A, Derived polymorphism is G
  VARIANT 83: note = Ancestral polymorphism is A, Derived polymorphism is T
MARTREKLTLLVAAVAVGLLLAGGAGAGVASAARGREGRRRVHLRLYMHDVIGGPNRTAIRLIWGVGPPHASMPGRTFGDTVAIDDLVTDGPGVGADSRPVGRAQGTYMLSSQHEEVIVVSITVVLTAGPYNGSTLVVAGRDRIYDQTRELAVVGGTGGLRGASGYVLWTTAKVWSEVHMVLELDVHASVPLPDEDHDDNDVLVLGSRDA

SEQ ID NO: 16341 - protein, 167 aa, Zea mays
  VARIANT 53: note = Ancestral polymorphism is R, Derived polymorphism is H
MSSADKTHGSHGAWSVIDEAFMKAPPSDDPACSVQVDAVAYRETIQTWVEDLRAKNGARPLSAAMYRRRRALNHCSVALEFAQRRRVAVGLEDDELCRSVQAAMDTQVVGSCAYCGCNFSVVAVVAVGGLGMACGVCFRLVRVYNPVPLVRNPPANAEERWKGWLPW

SEQ ID NO: 16342 - protein, 126 aa, Zea mays
  VARIANT 104: note = Ancestral polymorphism is E, Derived polymorphism is D
  VARIANT 103: note = Ancestral polymorphism is D, Derived polymorphism is G
  VARIANT 80: note = Ancestral polymorphism is H, Derived polymorphism is N
MAAEEGAVIACHTKDEFDARMAKAKEQGKLVVIDFMAPWCSGCQMMAPVYADCASKYPSAVFLEVDVDELLEVAKIYGVHVMPTFCFIRNGETLESFATVDEDELRDAVRKYAAAGTTTAPASASA

SEQ ID NO: 16343 - protein, 402 aa, Zea mays
  VARIANT 82: note = Ancestral polymorphism is A, Derived polymorphism is T
  VARIANT 89: note = Ancestral polymorphism is V, Derived polymorphism is E
  VARIANT 240: note = Ancestral polymorphism is G, Derived polymorphism is E
  VARIANT 246..402: note = Ancestral polymorphism lacks residues 246 to 402
  VARIANT 299: note = Ancestral polymorphism is W, Derived polymorphism is S
  VARIANT 354: note = Ancestral polymorphism is R, Derived polymorphism is I
MAPAGSGRSPVPFPAAAKSAPTRATSTAARPQPPRNLHPPARRSPLSAPEPSTEPPRIRHYITGHGFGHATRALEVVRHLVTAGHDVHVVIAAPEFVFTTEIASPSLSDKLASPSTSEMLAPAPWMEAQNRLPSRILHHASRPLPARKPPPAHSPPPHPLSGACATASLDQRHAYAITPSLLLPSAVLTFAIAQSIKVLTTWYKENRWDAKQLVGSGGMPSSHSATVTALAVAVGLAYTGRREQLQKVSPRSPLPSSRLKKEGHLYRHQPLAGGGRCSQQNAVDVDFPFRKVKLSDVEWKMCIYASDCSEISLVQVMGSGYSEEHCFSWIQGDAEALSFEDGSMDGYTITFGIRNVTHIEKALSEAYSYDAYSFSMIPAIEELVDGDRQIEDGQHANQACEP

SEQ ID NO: 16344 - protein, 133 aa, Zea mays
  VARIANT 59: note = Ancestral polymorphism is N, Derived polymorphism is S
  VARIANT 96..133: note = Derived polymorphism lacks residues 96 to 133
  VARIANT 101: note = Ancestral polymorphism is V, Derived polymorphism is G
MHPGNCFGDTVAVDDLLTAGLAAGSAPVGRAQGTYMTGSMSRPVFVVAVTLMLAAGPYNGSTLVVAGRDDTSQPVRELAVVGGTGALRRAAGHVLWSTARVESSVHAVLQLDVHASVPAPSKTAAAELLVSSA

SEQ ID NO: 16345 - protein, 278 aa, Zea mays
  VARIANT 161..278: note = Derived polymorphism lacks residues 161 to 278
MGHGPASEDDDDGDDGSSSKASHTQLMRCSCSALAMHDSGGRLQKHVLLKRDNGDVGTIVGDLEKELEAKVSDTQCAAAEIQDLLKQVDAQPVNVKDVDRLRREMQAIEDDIANTEKGKAALEDKFWEVEAKLVTKLEELERHAHQFNQALKQLKPTVAFQYMIDSKGSSPAEMLGTGYKTVLKPALLAHAEENKRICLSNLENLNGLQKQLQGNAKVLEEERNNIFSLQEKNDNLCCAVVGTFLGSGRDGLPRTDRDLTRRPTAVNEYSCGVDTLNI

SEQ ID NO: 16346 - protein, 470 aa, Zea mays
  VARIANT 342: note = Ancestral polymorphism is L, Derived polymorphism is P
  VARIANT 324: note = Ancestral polymorphism is G, Derived polymorphism is R
  VARIANT 116: note = Ancestral polymorphism is E, Derived polymorphism is K
  VARIANT 107: note = Ancestral polymorphism is C, Derived polymorphism is F
  VARIANT 98: note = Ancestral polymorphism is E, Derived polymorphism is K
  VARIANT 90..470: note = Derived polymorphism lacks residues 90 to 470
  VARIANT 70: note = Ancestral polymorphism is E, Derived polymorphism is K
  VARIANT 65..470: note = Derived polymorphism lacks residues 65 to 470
MGSRNRRWPRPPTWVVASADETQRQGARGNDVMDLISQLMSWFMPLIASRRGSPRPPHAARHGQRCRLHEARHGVLPQGGHRCWGQGIPRHGKITDDEINAASVTCCRIYLRSESEPGISQVLRRVLQLLIPWKDTGQPLLLNKDSYLNLSDAIFQLNVNLAGVNTLANVVGWDWNTKARQGMRSTGGARYAYLWWKEKVIDSYLKRKDGLCPLTPELTYYCSLFFCRQPEICHDLVPDQEKLSSTESQLIYWDSKVSEADMDAMWKHPDVYKEWIKSGERRGNVRFSHDAKNMPYLSRVEVKVGLMLRGMDFSNKTAIFLASGKIYKAEKNMASLLEMFPLLQTKETLASEEELAPFKMAAVDYSICAQSEVFVTTQGGNPAFFMGHRRYLYGGHSKTIKPDKRRLAVLFNNPRIGWTALKRHLLNMRAYSDVKGIEMKRPNESIYTFPCPDCMCRLNRTEHSKSKQSR

SEQ ID NO: 16347 - protein, 341 aa, Zea mays
  VARIANT 29: note = Ancestral polymorphism is T, Derived polymorphism is I
MSSSPSLICCSMSLGLLSLLLLLFSACYTAPTYATDCDPADRAALLRVKAQLGDPAQLSSWLPSTNCCAWDPAVFCNAAGRVTGLALYALPDVSARVPPALGDLAALEILQVDSVPGLAGPVPASFANLTRLLDLDINGTSISGPIPGCLLAAAVNLRTLVIANSKLAGPIPSSLAALPGLRYLDLSGNMLSGAIPPELLHGSSRFLILSNNRLTGEIPGEYGDGDVDTIDLSHNQLTGDPSSFLFGITKPAVKIDLSWNQLEFDLTEVRFPHHLRFLDLSHNRVRGRVAKSLMDVRLDHFDVSYNELCGELPAGRFMSMHEAECYAHNKCLCGTPLPPCN

SEQ ID NO: 16348 - protein, 250 aa, Zea mays
  VARIANT 14: note = Ancestral polymorphism is V, Derived polymorphism is A
  VARIANT 3: note = Ancestral polymorphism is T, Derived polymorphism is A
MATTTAPVLLVFLVAIATSVAPSFPILTMAADADNGTTHLSFFMHDITSGASPTAVKVIKGPGAGSTPTAPALGMTFGDTMVIDDPLTEEASPASAALGRMQGFYMLASQTGAALMVCANLLLTSGAHNGSTLAVLGRDDTGQDVREIPVVGGTGTFRMATGYVLWKTPDGINGTDATVQLDVYVTTDGNGTTDAGDADGGGGSPSAGSGSSGSSGGSKSTSGAESRRRRMTGGWVVAVVVAVVGSFWVW

SEQ ID NO: 16349 - protein, 102 aa, Zea mays
  VARIANT 47: note = Ancestral polymorphism is R, Derived polymorphism is K
  VARIANT 23: note = Ancestral polymorphism is A, Derived polymorphism is V
MRVTSYQRLSSSQPEGGAARAWASLRRAAAGVARLYAARRWRVSARRLWVARPLRAKAAAARYGYDSASYARNFDDGVWMAEVGVSWNARSFGACRLAAAQS

SEQ ID NO: 16350 - protein, 287 aa, Zea mays
  VARIANT 19: note = Ancestral polymorphism is P, Derived polymorphism is L
MAEHLASIFGTEKDRVNCPFYFKIGACRHGDRCSRLHNKPSISPTLLLCNMYQRPDMITPGVDAQGNPIDPERIQEDFEDFYEDIFVELSKHGEIESLHVCDNLADHMIGNVYVEFREEEQAARALQALQGRYYSGRPIIAEFSPVTDFREATCRQFEEHSCNRGGYCNFMHVKQVGRDLRRKLFGHLHRSLRSHSRGSRSPSPYRRRGSSSRSRDRDDYHDYYYHYYRSGSGSRRSSERHRSHDSDGSRRRRGRSRSRSRSPVREGSEERRAKIEQWNREREAAQV

SEQ ID NO: 16351 - protein, 120 aa, Zea mays
  VARIANT 80: note = Ancestral polymorphism is A, Derived polymorphism is T
  VARIANT 63: note = Ancestral polymorphism is A, Derived polymorphism is D
MVKEAELHAQKDQERKSPSDLKNSADTTIYTIEKSVSEYKDKVPAEVTKEIESAVSDLRAAMAEEDLDKIKQKLEAANKAVSKIGEHMQQGHRVVVAALSAVSGGNQTPQAEYKGSQDVG

SEQ ID NO: 16352 - protein, 368 aa, Zea mays
  VARIANT 204: note = Ancestral polymorphism is A, Derived polymorphism is T
  VARIANT 192: note = Ancestral polymorphism is W, Derived polymorphism is S
  VARIANT 120: note = Ancestral polymorphism is S, Derived polymorphism is N
MSTGRTEEAAGSAETACVTGAGGYIASWLVKLLLSRGYTVHGTVRDLSDNKTAHLKRLENASENLKLFKADVLDYDAMAGAVAGCQGVFHVATPVPSGKITDPEASFFFCNIRLLLITNNWAQSQFFREMLGPAVTGTINALKAASAANARRVVVVSSMVAVEINPKDWPRDKIKDENCWSDKEFCRNEENWYSVAKISSEEAALEYAKQTGLDVVTVNPAVVFGPLLQPTLNTSCQFLVYFLKGGPDRMRDKLWHIVDVRDTADALLLVYETPQASGRHICAPHFISARDLLELLKTMYPDDYPFISKESIYDMEHPAPMTSDKLKKLGWKVRPLKETIAETVEFCQHAGFLEDVEGFRFPPLYNII

SEQ ID NO: 16353 - protein, 128 aa, Zea mays
  VARIANT 32: note = Ancestral polymorphism is K, Derived polymorphism is Q
  VARIANT 26: note = Ancestral polymorphism is I, Derived polymorphism is V
MAGRTEEARRSGERETVCVTGAGGYIASWLVKLLLSRGYAVHATVRDPRDPKNAHLGQLEWAAENLRLFKADVLDSDALAAAVSGCRGVFHVACPVPTDRVLDPEASACQYRLLHAFIALPFFVFARG

SEQ ID NO: 16354 - protein, 397 aa, Zea mays
  VARIANT 223: note = Ancestral polymorphism is T, Derived polymorphism is R
  VARIANT 89: note = Ancestral polymorphism is H, Derived polymorphism is Y
  VARIANT 52: note = Ancestral polymorphism is C, Derived polymorphism is R
MLLVLGCKQVATGNIRTSRGGYIRTKRRTGGGSFSEALHCSGMASPPPPRVCVTGGGGYVASWLVKLLLSRGYAVHATVRDPSDPKNAHLQQLDGARERLRLFKADVLDRDALATAVVACEGVFHVASPVPADKSEVLSPAVKGTLNVLQACSANNVQKVVVVSSTAAVYFNPSWPQGRTKDESCWSDRDLCIKNENWYCAAKTIAEETAVEYGEKNGLIVVTVCPCIVLGPLLQPLINASSELLVYIIKGGFYIFLLVSNIHWLDNYSHGGPRVLKNLPWNIVDVRDVADALLLVYEKVESSGRYICAPNRISTNNMVNLFKKSYPNYNYVNCDNKDYESEISPVTSEKLKSLGWNPRTMEKTLLDNIEYFEKAGFLRDGEGYPCRLPHIFHFASD

SEQ ID NO: 16355 - protein, 578 aa, Zea mays
  VARIANT 20..578: note = Derived polymorphism lacks residues 20 to 578
  VARIANT 33..578: note = Derived polymorphism lacks residues 33 to 578
  VARIANT 86: note = Ancestral polymorphism is C, Derived polymorphism is R
  VARIANT 177: note = Ancestral polymorphism is G, Derived polymorphism is R
  VARIANT 279..578: note = Derived polymorphism lacks residues 279 to 578
  VARIANT 334: note = Ancestral polymorphism is M, Derived polymorphism is T
  VARIANT 337: note = Ancestral polymorphism is S, Derived polymorphism is I
MAMEVRRRVPPPHGSAPRRQQATGGEGQRVRVQAGDALPLPIRHTNLIFSALFAASLVYLMRRWREKIRSSTPLHVVSLAEIFAICGLVASLIYLLSFFGIAFVQSVVSNSDDEEDFIIDSRHGQARAPPPPAPAAPCALLGSPAAAPEKMPEEDEEIVAAVVAGKIPSYVLETRLGDCRRAAGIRREALRRITGREMDGLPLDGFDYASILGQCCELPVGFVQLPVGVAGPLLLDGRRLYVPMATTEGCLVASTNRGCKAIAESGGASSVVLKDGMTRAPAVRFPSARRAAELKAFLEDPANFDTLAMVFNRSSRFGRLQGVKCAIAGRNLYMRFSCSTGDAMGMNMVSKGVQNVLDYLQADFPDMDVISISGNFCSDKKSAAVNWIDGRGKSVVCEAVIKEEVVKKVLKTNVQALVELNVIKNLAGSAVAGALGGFNAHASNIVAAIFIATGQDPAQNVESSQCITMLEAINDGKDLHISVTMPSIEVGTVGGGTQLASQSACLDLLGVKGANRESPGSNARLLATVVAGAVLAGELSLISAQAAGHLVKSHMKYNRSSKDMSKTLAEETDKPKKC

SEQ ID NO: 16356 - protein, 247 aa, Zea mays
  VARIANT 150: note = Ancestral polymorphism is G, Derived polymorphism is D
  VARIANT 99: note = Ancestral polymorphism is V, Derived polymorphism is M
  VARIANT 29: note = Ancestral polymorphism is K, Derived polymorphism is E
MCEKILQTTARRDPGGSSYAYTRPPTEAKKRSGGRRTPIGEGGGASDLDRPIRHRVPLLSDAYTLSPQCTPARDPCFSSPVRIQKNPSLITVLVLAFGVVFLPKATADDAVLQRFALAPADPASNSIISFNVTATVSLRNPNMYRAIEYGALVVTFSFNGTRFNDSVSVSGFKHKARKTATQSVRVDGVGKPIKLTRPGVGEFRTENDTGSFGVEMRLDTMLQYKGRSHPTFTPPRVVATADLTNDP

SEQ ID NO: 16357 - protein, 1344 aa, Zea mays
  VARIANT 975..1344: note = Derived polymorphism lacks residues 975 to 1344
MTAEGTACNGAGEAPKAEFVPEKVVTASLEEKAAGEREGEDVGGPFVVVNGGDSDGHSDRGSDLGKASGEESSSEEEDVPGSNVAPDLAVGGDHGSARGEVSAQGAALGASSADGSGRASDGAEGGADEGKGEPSSDFDAEAAPQEDVGEEDGGAAALASSGCEPAITGADSEAAPAVDDEVEGKEGTVDGSAVADVAEAVVHQEVSTEHDDALTLPKSSASMESEVIREDNKEQSTADIVGPHEQGTCGASALVENEHLCADMRADSFVAVTEPDSQEDYAVESCMRDDVLICTESGSADIESEVNGKDSKQEQSNADVVEVIGQGVVRADALMANGHLCADIQADSSEAATKPDNIANESKLTEVAESGEDAAASGELDAIDASSQTNGHIYVASGADSFIIASESKSHSFETDGQETDQQEEEVPQTEAELLDGVLKPTERNCARSVEELIGEEVDTDGHPSVDGTADASGEQEAKPMQVEGEATCGILEFEEVDKDGEDSLCNDCMVGVVSSNEETELPMKERTDEAVPSVNVGESEQVTEDTSQDIMQGGLARGVFIGTIFVKPVSDPHVESSLVHKVKAEVHLVDEITAADLKAENMVEVKRTDREVDEIEVKAPGTHEIGNSSEVEPKEEFEMEVDDAVSLHEAAASASENGSEEKSSNIAVDQVEPVNLNVDELAVDDDQPSFNPGYGSAKSSDVAETKNVEAQVTEQKGNAHHASGEWHGDHTQVIGPQRIYIIKVPKFAGDDLWDKIQAAQAHLDQLTQERDAINRRRQKQKAICDEYREKFEAARQEEREARAAHGDKKNDLNSVRSVLEKLHQANSVEELDELIAKKERIMQHETISLKEEKLLIKEINELKSQRKQLSATMGSKAEINEAFDQKDHIHERHKVLKKDSDVLFSNLKVLEENTRKIQKSFADERTALRKLTEEHRAANEIRQKAYSDWTELRSEPSKKNEYFFKYRDARNAAENFRANGDINGLISHCNSQIERVMEIWNKNEDFRKQYVESNKVSTLKRLGTHDGRKLGPGEDPPVIPSRRPSNICPLSASSPEMITLASTPAPVLAAAAAVPSKENSFPALAAPQTSKRAKSKASGSSAQIKNKSVIVSEEEDLEQTLKEKAHQLELARKAEELDRKAEELARKEEELRKERDAAEKERLRMEQKAKAKEAEERKRRKAEKDKERAEFKARKEAEEREKLHYLIIHKDRPSMQQVPILIPTLFEHFQKKAKRDKKKGAAPADSSAIGDSHAAASATADTDSNASDNPREADVSQPAVAPRRPARPAAAIKQLNRLQPMPAPLRNRGRRKLRQYILIAAAVLTVLALFVAGNYIPRLRSHS

SEQ ID NO: 16358 - protein, 227 aa, Zea mays
  VARIANT 32: note = Ancestral polymorphism is H, Derived polymorphism is Q
MSTAAESVHALTAKVVDLDGSVAQFAPPVTAQEALAATASGAQPSSSSRFLCCSDALDFDAPISALAAHDALHPGQLYFALPASMLGRPLSAQGMAALAVKACAALGTAPVGSVPSSSSSLDRSEARAASSWPQRWQSTGRVAPLVVVRADAHGEWKTYPVHGGYKAARVGGGGGGGDQTVGKTKNGVGYKGIARDLAPIQRLSVIVEGAELVSDPFIEQYSVVLVN

SEQ ID NO: 16359 - protein, 122 aa, Zea mays
  VARIANT 64: note = Ancestral polymorphism is C, Derived polymorphism is Y
  VARIANT 38: note = Ancestral polymorphism is A, Derived polymorphism is E
  VARIANT 6: note = Ancestral polymorphism is K, Derived polymorphism is R
  VARIANT 5: note = Ancestral polymorphism is C, Derived polymorphism is Y
MVALCKLICMPFSNFRTHHPMEDTYGSLYTLWRKQFLACRPRENGLADQLHKKNNGKCCARKYCLRICKHSTKPLPREVGHSFSIQSPKSISSLLEAKQQQNYMLPEQQQNYMLPEQQQQKS

SEQ ID NO: 16360 - protein, 602 aa, Zea mays
  VARIANT 344: note = Ancestral polymorphism is I, Derived polymorphism is T
MGMATLLLPPDTLPPLQLWRLDAGSRSRSAMERESRSRVLSETASCAGTPRSVQSTCSLQRRYSSRSILKPHDGALDMSPRFSYCKPAADREKMFNRRHSLNLPEQLPGHYSRKATERTQKASSKSVADLVGEIAALEQEVIRKELHLLALYRRAFDQYVSESCSFTSEQVDQEFLKSIDEGALRLRDIKRSAAFDLPTTTISGSEEQEEAPPEAKAGARHSSLVNFLSASISEYVPKISCKLSEDILGCIAAVYCKLSGAEGECCVASPSPSVSSWSTFSPRRRNDSWSPRSRCNNFDSWSPRPCGVEKESGEQSPGVMMVVVPRIRVDADTFEYASKMLETTRSLIQRLEKVDPVKMTHEEQLCFWINIHNALVMHAFLAYGLHDKRMKSTDMILKAAYNVGGQSVNAQTIQNSILGCRQSHRPSLWVRALFTPAKRSAARHPYALQHPEPVAHFALSTGAFSDPPVYISCVRLIFSTSMEIKAACIIIMSRLSRLQLQVRLYTAKKIQQQLEAARTEFIRGSVAVRKQALLLPKVLHCYARDAALELRHLVELVCETLSDAQQKQLQLGLRRRAVDKCVEWMPYKSSFRYVVHRDLADD

SEQ ID NO: 16361 - protein, 331 aa, Zea mays
  VARIANT 65: note = Ancestral polymorphism is D, Derived polymorphism is N
MVTSSKGKVCVTGASGFVASWLIKRLLESGYHVVGTVRDPGNHQKTAHLWKLPGAKERLQIVRADLLEEGSFDSAVMACEGVFHTASPVLAKPDSTSKEETLVPAVNGTLNVLRSCKKNPFLKRVVLTSSSSAVRIRDDGQSSSNISLDETAWSSVPLCEKMHLWYALAKVFAEKAAWEFAKENGIDLVTVLPSFVIGPSLSHELCVTASDVLGLFQGDTARFSSYGRMGYVHIDDVASSHILVYEAPQAAGRYLCSSVVLDNDELVSSLAKRYPIFPIPRRLNSPYGKQSYQLNTSKLQGLGFKFRGVQEMFDDCVQSLKDQGHLLECPL

SEQ ID NO: 16362 - protein, 236 aa, Zea mays
  VARIANT 91: note = Ancestral polymorphism is G, Derived polymorphism is C
MGGTSAAVPSHGLACAPPAAVTLNPRARRRRASSGSGGHRSSPQQPLRSDLLPPATVACRARSQSASSSNVNFGRGDDADKLLEDLLKQHGEVVYSSGGPPDPTVEADDDAECLSFAVSLAKAASEIKATDIRVLCVRRLVYWTRFFIILTAFSNAQIDAISSKMRDIGEKQFSKVASGDTKPNSWTLLDFGKSLFSMLCDVVVHIFLPQQRAFYNLEEFYGNATPIELPFDTQRQ

SEQ ID NO: 16363 - protein, 714 aa, Zea mays
  VARIANT 522: note = Ancestral polymorphism is C, Derived polymorphism is G
MLGGRDPLAPFLVASLKRAARLRCGEQLHALAAKSGLLASNVFVRNSVLSSYSRLPSSLASALQLFDETPPPLRDATARNSVLAALTRAGYLDRAQGLLEEMPRIHRDAVSYTTLVTSFARAGHAARAVAVFRSMLSENVVPNEATLAGAITAFARCGAPATVGMIHGFALQRALDGFVIVATNLVHAYAGVLELCSARALFDGMTYRNTVTWNVMLNGYVKAKMIDMAAEVFWRIPERDEVSWLTLIDGYICADLISDAMKAYVQMVGEVGANDYEVLLVDLMKACARYSAVTEGQQLHTVILKNGFDAHAFVQATLVHFYGCCGLIGLAQMTFRLSDKSHTASWNALLAALLRNGLIREARELFDDMPERDTVSWSTMISGYVQTGRSDMALKLFYSMLNTSIEPNEVTLASALSAIADSGTLDQGKWIHDYIMNRPVQLTDNLSSGLIDMYAKCGSIADAVQFFNRVNDKFSSVSPWNAMICSLAIHGYAHMSLDLFSQLQRTSIKPNSITFIGVLSACCHAGTVTKGKYYFESMTREYGIQPTIKHYGCMVDLLGRAGYLEEAEQLVSMMPMKPDVVIWGSILSASRAQGNVALGERAAEELAKLDQTHGASKIALSNIYADAGHWINVSVVRKELQDANLERLTGRSGIVFLFSNTKCKHYFQNRLKPSNLTWTAMYMKAEAAQEACCMYRENGPSPFSATFDSDDWNV

SEQ ID NO: 16364 - protein, 434 aa, Zea mays
  VARIANT 341..434: note = Derived polymorphism lacks residues 341 to 434
MVRETGYYDVLEVSPTASEAEIKKAYYVKARQVHPDKNPDDPLAAARFQANTYLMSMQIGLYKKKDATSSSELLLLQELGEAYQVLSNPKQREDYDLHGKPGISTEAIIDPAAIFAMLFGSELFEDYIGQLAMASMASLDGFTENEQIDPRRLQEQMRVVQKEREEKLAEALKDRLHLYVQGNKEEFIQYADAEVTRLSNAGMSYGVDMLSTIGYVYSRQASKELGKQAKYLGVPFIAEWFRNKGHSIKSQITAATGALALMQLQEDWRKHLSDECHYNEEELEAYMLTHKSVMVDSLWKLNVADIEETLSHVFVTVVLVVFNQYQVLHDSSARKEELRVRAKGLKTLGKIFHQAKLSTAEGDPAAMNNTINNLDENDDSSPESSPRSPRDQMFDTNPPYSQSPYVEAPELGGYFSFDFPMPIAPPGAQRDPIP

SEQ ID NO: 16365 - protein, 219 aa, Zea mays
  VARIANT 20: note = Ancestral polymorphism is S, Derived polymorphism is L
MAGKSRPPKRILESYTIKGSDRVIKPGDCVLMRASDASKPPYVARVEAIEAAGSRGTNVRVRVRWYYRPEESIGGRRPFHGSKEVFLSDHYDVQSADTIEGKCNVHSFRSYTKLDSVNAEDFFCRFEYKSATGSFVPDRIAVFCKCEMPYNPDDLMIQCEECSDWFHPACIGMTIKEAKKLEHFFCQTCTAENGKMVENSHEATAQSEEKPVESKRRRR

SEQ ID NO: 16366 - protein, 308 aa, Zea mays
  VARIANT 45..308: note = Derived polymorphism lacks residues 45 to 308
MYSGSNIFTKSMESSKSPQSSKNSRIVVPSDSNRSRFDNDGFSSETASNQMVVFNSEAADELGENRLQKSVITKGISPSIGAFTVQCAKCFKWRLIPTKEKYEEIRERIIQEPFVCKRAREWRPDITCNDPEDISQDGSRLWAIDKPNIAQPPHGWERQIRIRGEGGTKFADVYYTSPTGRKLRSLVEVDRFLQENPEHVAQGVTLAQFSFQIPRPLRQDYVKKKPKLINASDEASTITSKSSEPEEVNPIAWAVPTKHEGDASEEASFADETLASEVVLTRKRKIGSSLSVEPNHLSDELEPKLEDA

SEQ ID NO: 16367 - protein, 319 aa, Zea mays
  VARIANT 65: note = Ancestral polymorphism is H, Derived polymorphism is R
MDAAAVLKRKGEEAPEAWLLGGVVVPATKIRRLDAEVPPPVGSGAGVLSEPQRALGLEEARMSGHVGAPAMDATPLLKRKGEEAPQPWLDVDGVPIPATKIRRLDADVPPVGSGMGVPLAEPGVSVAPQPFVAGDLRMSGDVAPPAAAIAVAAPAVNEERAIVVYQPAEAERNLLDGPLRPGASLRVSPDWIHGLKNTMLQEASNHRALFEEMAARDGNLNLAMVPWAPPEVDVHAASSSTAAAMEMVDADQDGDGASMEVEHDVEGQTTPPAGGALQVEAFNHHYQQQHQWPAQHCVASPQLQLPAASYQASPVTWSW

SEQ ID NO: 16368 - protein, 331 aa, Zea mays
  VARIANT 85: note = Ancestral polymorphism is S, Derived polymorphism is I
  VARIANT 247: note = Ancestral polymorphism is N, Derived polymorphism is K
MNSTDCFSRCVERHVYSSYDEFLRLHEDEFHASRSQDSRRPKIVYQFVLVFLFVGMPDSNELMFNTEQPTYNFGAYKNSKLRKRSKRKRIEEAPPKESAREKKRSEKERRAQLDSIHVKSEAAARSCLAFRWIYLANGMWIRSRGNEPCSQVNCKEMVCSQLVLSGDSITEQPFAPVAAVSHWLTPACSRITSFTDYVFSGLFNFGCNASDNSCISPLVQLPLYLHSVGKLQPHCNKVYKRFAMRKNKFMGSNKVTIAVCIETVLCLELRKTLHGLQNQDKKTDINCDATLRSLFGGRDKVGMLEISKLLSRDFPKISKLLWSMEPGMALW

SEQ ID NO: 16369 - protein, 617 aa, Zea mays
  VARIANT 245: note = Ancestral polymorphism is G, Derived polymorphism is S
MPRREAARLLRRLGPIAVQSPKRGMPHNQYESTNHAVNSYRRFHWIPSVQHPLCGPTSSGGIYEGQRSANKACEVQKRTFGSAATQFQRNPAYSVLNSDDIAYFKSILGENGVVQDEDRVAVANVDWMGKYRAAIPFPESHVRLHNVEKSVHILYSMLSLQVSKILSYCNTKRLAVVPQGGNTGLVGGSVPVFDEVIVGLAGMNKIISFDNVNGILTCEAGCVLENLSTFVENEGCEIVFCYSIGQYKFCKFIWWMPTENHIFDFHARGLVDLDLLLRFIMPLDLGAKGSCHIGGNISTNAGGLRFIRYGSLHGNVLGLEVVLADGTILDMLTTLRKDNTGYDLKHLFIGSEGSLGVVTKISVLTPAKLSSTNVAFLSCNDYTSCQKLLLAARRSLGEILSAFEFMDHHCIDLAMQHLEGVQNPLPASPYKFYVLVETTGSDESSDKTKLEAFLLRSMEDGLVADGVIAQDISQASNFWRIREGISEASVKVGAVYKYDLSITVEKLYDIVEEMRCRLGDNAEVLGYGHLGDGNLHLNIVSSKYDDNILAQIEPFVYEWTSAQRGSISAEHGLGLMKAEKIHYSKSPEAVQLMASIKKLLDPKSILNPYKVLPQSVL

SEQ ID NO: 16370 - protein, 293 aa, Zea mays
  VARIANT 53: note = Ancestral polymorphism is V, Derived polymorphism is A
  VARIANT 50: note = Ancestral polymorphism is F, Derived polymorphism is S
  VARIANT 49: note = Ancestral polymorphism is G, Derived polymorphism is A
  VARIANT 48: note = Ancestral polymorphism is R, Derived polymorphism is T
MAEEKVGRIFVGGLSWNTTERTLERTFGQYGKVIEAQVVVERETGRSRGFGFVTFSEPRAVDAAIRGMHNGELDGRNISVNKAEPRNSDGYGYGGGGGGGYSSGGRGGYRSGADVVPAASDDCFKCGRPGHWARECPYSDGSGRTGRYSPGSRYGGGTGGRGDRFGGSDRFARYDDDRYDGGRYVDSRDTYYGSGRDRYAPAAERYSGDRYSGADRYASSGFARERSYERDGGRSNGGYYRDEPRGTGGYGRGGSRGGGGGGPARFGGSYRDRPAPYDRPSRGGAARAYDDRY

SEQ ID NO: 16371 - protein, 138 aa, Zea mays
  VARIANT 25: note = Ancestral polymorphism is S, Derived polymorphism is R
MVVRIRLARFGCRNRPFYRVMAADSRSPRDGKHLEVLGYYNPLPGKDGGKRMGLKFDRVKYWLSVGAQPSDPVQSILFRAGLLPPPPLLAMARKGGPRDRRPIHPMTGRPLDLEGVAIIDNSNAPEGDTEVPTDEVAQ

SEQ ID NO: 16372 - protein, 421 aa, Zea mays
  VARIANT 385: note = Ancestral polymorphism is G, Derived polymorphism is S
  VARIANT 375: note = Ancestral polymorphism is G, Derived polymorphism is R
  VARIANT 372: note = Ancestral polymorphism is L, Derived polymorphism is R
  VARIANT 361..421: note = Derived polymorphism lacks residues 361 to 421
  VARIANT 322..421: note = Derived polymorphism lacks residues 322 to 421
  VARIANT 312: note = Ancestral polymorphism is W, Derived polymorphism is R
  VARIANT 310..421: note = Derived polymorphism lacks residues 310 to 421
  VARIANT 308..421: note = Derived polymorphism lacks residues 308 to 421
  VARIANT 295: note = Ancestral polymorphism is L, Derived polymorphism is V
  VARIANT 266: note = Ancestral polymorphism is T, Derived polymorphism is I
  VARIANT 262: note = Ancestral polymorphism is I, Derived polymorphism is N
  VARIANT 247: note = Ancestral polymorphism is R, Derived polymorphism is S
  VARIANT 245: note = Ancestral polymorphism is L, Derived polymorphism is F
  VARIANT 244: note = Ancestral polymorphism is M, Derived polymorphism is K
  VARIANT 230: note = Ancestral polymorphism is G, Derived polymorphism is S
  VARIANT 226: note = Ancestral polymorphism is A, Derived polymorphism is P
  VARIANT 207: note = Ancestral polymorphism is V, Derived polymorphism is E
  VARIANT 202: note = Ancestral polymorphism is V, Derived polymorphism is I
  VARIANT 197: note = Ancestral polymorphism is Y, Derived polymorphism is H
  VARIANT 190: note = Ancestral polymorphism is P, Derived polymorphism is L
  VARIANT 137..421: note = Derived polymorphism lacks residues 137 to 421
  VARIANT 124: note = Ancestral polymorphism is L, Derived polymorphism is H
  VARIANT 79..421: note = Derived polymorphism lacks residues 79 to 421
MAVDPRQVVAGFLTLSMFVMLGNMIKHDHFSPVTEEMGLKATGARSNTMKLDNNAEMNSVDMAGVEDLMDTIEEVKPCWTKPSPKNQPSNGFVTFSLTMGPEYHISQITDAVVVARYLGATFVLPDIRGNELGNKRKFQDMYNVDKFVRSLDGVVEVIDEIPDEVSAKKPAVIRVPNRVTESFIMDTIQPIFKKNKYLRLAVIFSSVSLRPKETSNKDLDATACLAMFSGLELKHEYSEVARKMLDRLQELSKKSDGKVLAIDLRTDLLEKKSCKTTSGARRKGCYNPNEVLAFLRSVGFSANTTIYLTETWWHKGLNDLKEEFPNTYTKDDIMPAENKGEFLKSSNADLASALDLEICSQSDVFIPAVAGLFYGHVTGKRIASGRTQIIVPSQSSTSTHASDFTSTYISNKNHLAYTCYC

SEQ ID NO: 16373 - protein, 538 aa, Zea mays
  VARIANT 244..538: note = Derived polymorphism lacks residues 244 to 538
MPPPSPPASQVRTCDAGAAQSPTRGTVSEMARYFRSSNLASRVFERQLISPRPGATVNTIRQFYENLVPSYTIYDIDCPDYSFRKFTDDGKYFVAFSRNHQDLIVYRPIWLTYSCNEECDPHELPPKAKKFDSFFKQLYSIPLASGNEYICKDFFLYMECHRFGLFATSTAQSNESTATEGAIHGVPLIEKITFHLVRLEDGVILDEKAFCNDFINLAHSIGAYMYEDLLCIVSLRYQTIHILQIRDSGNLVEVRSIGAFCREDDELFLHSHVQTGYAGSFLPGIKQRLLSYIFCKTWNEVPDQTLRVQHLKKFYFHFQDYVDLIIWKVQFLDRHHLFVKFGSVDGGVSRSTDQNLAFFAVYNMETTDIVSLHQNSSEELYALFEQFYDHFHANPQASSHGKFISSHSNDIHALDQLRVIKNKASSSSQFVKKMMTSLPYTCQSQSPSPYFDLSLFRYDEKLISAIDRHRHCTEHPIKFISVRQNVVKFKIKPGSDSGASDSRIKRISSFLFHPFFPLALSIQQTYMQPTVLNIHFRR

SEQ ID NO: 16374 - protein, 433 aa, Zea mays
  VARIANT 47: note = Ancestral polymorphism is T, Derived polymorphism is I
MNGVVSVFPSRTLELLITRSWDFVGFPQTPIRELPLEGDVIVGMLDTGVWSDSPSFSDEGFGPPPSRWKVKSSEHALTTEDPAALASRHWTMTATAVTRHPPRPAGSAVGNVSMYGLAGGTARCAQCQARHLQGSLSINTFPTLSNATLAFPANGEPRRRLIHRQDRPLPEGRCKRRFRSSLGRCSTAAGVVIVSRIPDVAFALPLPGLTVSQDQFDQTMAYVNSTSHPVCTIDRTERDYCGSTSSGSRLLLFSRPQPDHPSSLEATPMDTAANSNASALKYGAGQLNPVSAHDPGLVYDASESDYVAMLCAQGYNATQLALVTGSNATAACSNGSTPGSPGDLNYPTMAVPVEPGKNFTAVFPRTVTNVGAATAVYDVSPARLVFSEQNQKVSFTVTVSGTALEEGTVYSFTVVWYNDEHTVRSPVVVYTMQ

SEQ ID NO: 16375 - protein, 544 aa, Zea mays
  VARIANT 429: note = Ancestral polymorphism is R, Derived polymorphism is T
  VARIANT 417: note = Ancestral polymorphism is N, Derived polymorphism is I
MTTSTEDMREAPTVTEVLYKWTNIGKGWQSRWFAIHDRVLSYSEWIHAFHRASYAKSWNSAMFLQCQQVQKDAARLVRKPMDTFPQPAAARGRRALVDVGNLMNGRPSLVNHQKQAVAAAATSHKPLNVGNKKPLVPQAAARGMRPLADVTNLMINDRAAPANRQKPLDAVFNRNGKAVKLKECKVKPEVIVTIPDSEKEKKGKLPGGQRVCRRVPTLFDNLTKCSRYEHKQNSKVKVVSFFFILRMPVYPFCVLCVFTKASDGITTPKKKDPYDIDAPDSCNELAVVEYVEDIYKFYKSTEGTCLPLSSYMSSQAEISERMRAILIDWIIEVQYRLTLMPETLYLTVYIIDQYLSMESVPRKELQLVGISAMLIASKYEEIWAPLVKDLMCLCDNAFTRDQVLTKEKAILDRLHWNLTVPTMYMFIVRYLKAAMCDTELENMAFFYSELALVHYAMLVYPSSVTAVAAVYAARSTLGMNPPWTDILEHHTGLAEPQLLDCARRLISFHTLAPESKQKAVYRKYSKPKLGSVTLQSPVKKLLSG

SEQ ID NO: 16376 - protein, 468 aa, Zea mays
  VARIANT 117: note = Ancestral polymorphism is D, Derived polymorphism is G
  VARIANT 107: note = Ancestral polymorphism is I, Derived polymorphism is K
MHRVSKGAPEQILHLAHNKSDIERRVRAVIDKFAERGDQLAIGKETARRLGMGTNMYPSSALLRQNKDESIASLPIDELIEKADGFAGVFPEHKYEIVKGLQARKHICGMTGDGVNDAPALKKADIGIAVADSTDATRSASDIVLTEPGLSVIISAVLTSRAIFQRMKNYTIYAVSITIRIVLGFMLLALIWKFDFPPFMVLIIAILNDGTIMTISKDRVKPSPQPDSWKLAEIFATGVVLGGYLAMMTVIFFWAAYKTDFFPRLFHVESLEKTAQDDFQKFASAVYLQVSTVSQALIFVTRSRSWSFVERPGFLLVFAFLVAKLIATLIAVYANWAFTAIKGIGWGWAGVIWLYNIVFYFPLDIIKFLIRYALSGRAWNLVLEQRIAFTSKKNFGTEERERKWAHAQRTLHGLQPPEASIFENKTTFNELNQLAEEARRRAEMARLREVSTLKGRMESVVKQKGLDI

SEQ ID NO: 16377 - protein, 281 aa, Zea mays
  VARIANT 1: note = Ancestral polymorphism is M, Derived polymorphism is I
  VARIANT 27: note = Ancestral polymorphism is S, Derived polymorphism is R
  VARIANT 37: note = Ancestral polymorphism is E, Derived polymorphism is K
  VARIANT 40..281: note = Derived polymorphism lacks residues 40 to 281
  VARIANT 48..281: note = Derived polymorphism lacks residues 48 to 281
  VARIANT 51..281: note = Derived polymorphism lacks residues 51 to 281
  VARIANT 85: note = Ancestral polymorphism is D, Derived polymorphism is G
  VARIANT 99: note = Ancestral polymorphism is A, Derived polymorphism is V
  VARIANT 113: note = Ancestral polymorphism is K, Derived polymorphism is N
  VARIANT 117: note = Ancestral polymorphism is R, Derived polymorphism is W
  VARIANT 121..281: note = Derived polymorphism lacks residues 121 to 281
  VARIANT 132: note = Ancestral polymorphism is T, Derived polymorphism is I
  VARIANT 146: note = Ancestral polymorphism is V, Derived polymorphism is A
  VARIANT 153: note = Ancestral polymorphism is C, Derived polymorphism is Y
  VARIANT 164: note = Ancestral polymorphism is E, Derived polymorphism is K
  VARIANT 172: note = Ancestral polymorphism is P, Derived polymorphism is L
  VARIANT 177: note = Ancestral polymorphism is P, Derived polymorphism is S
  VARIANT 191: note = Ancestral polymorphism is S, Derived polymorphism is F
  VARIANT 220: note = Ancestral polymorphism is P, Derived polymorphism is T
  VARIANT 224: note = Ancestral polymorphism is T, Derived polymorphism is I
  VARIANT 226..281: note = Ancestral polymorphism lacks residues 226 to 281
  VARIANT 255: note = Ancestral polymorphism is T, Derived polymorphism is I
  VARIANT 260: note = Ancestral polymorphism is E, Derived polymorphism is K
  VARIANT 263: note = Ancestral polymorphism is W, Derived polymorphism is C
MKVKISEVILKLHTMSLPEQSLNNRRSYLLPDNKKNERIELKFKVPRYIIWKEVASCKEDNINGKDESIPFMLDFVSIAKYRANDIIIPDPVPQRVNGVFIDIYGKLVPILQNDSVWCFLRLLKDCSNKGMTWTFSITSETLTFMVNSNSLRCVKVVLEGKTPKLCGMHANPNCINSYGYFPIHKAADKFFCDMIKLLLRHGAPFDLHTVGNDVIENLLPLHVIVLNTCMHKYLEDNLSISKIFMDTIRLLAEKTNNLLEELWNYIENVKLIQSAVLLLAA

SEQ ID NO: 16378 - protein, 83 aa, Zea mays
  VARIANT 77: note = Ancestral polymorphism is P, Derived polymorphism is L
  VARIANT 60: note = Ancestral polymorphism is T, Derived polymorphism is I
  VARIANT 42: note = Ancestral polymorphism is R, Derived polymorphism is H
  VARIANT 27: note = Ancestral polymorphism is V, Derived polymorphism is I
  VARIANT 26: note = Ancestral polymorphism is T, Derived polymorphism is I
  VARIANT 17: note = Ancestral polymorphism is V, Derived polymorphism is I
  VARIANT 12..83: note = Derived polymorphism lacks residues 12 to 83
  VARIANT 8: note = Ancestral polymorphism is W, Derived polymorphism is R
MSKRNLFWVVSQMQAIVERYPCWGDIVEVNTWVSANGKNGMRRDWHIRDSMTGHTILKATSKWVMMNKLTRKLARILDKCGLK

SEQ ID NO: 16379 - protein, 84 aa, Zea mays
  VARIANT 63: note = Ancestral polymorphism is T, Derived polymorphism is M
  VARIANT 55: note = Ancestral polymorphism is A, Derived polymorphism is T
  VARIANT 49: note = Ancestral polymorphism is D, Derived polymorphism is Y
  VARIANT 47: note = Ancestral polymorphism is A, Derived polymorphism is T
  VARIANT 46: note = Ancestral polymorphism is T, Derived polymorphism is M
  VARIANT 29: note = Ancestral polymorphism is D, Derived polymorphism is N
  VARIANT 7: note = Ancestral polymorphism is A, Derived polymorphism is T
MNTVHFTLQAGLSKLIICFQPKGPKAAVNMGWKDYFMRVVPTALGTALDINLSNASLVFISVTFATMCKSASPIFLLLFAFAFR

SEQ ID NO: 16380 - protein, 258 aa, Zea mays
  VARIANT 153: note = Ancestral polymorphism is R, Derived polymorphism is C
MSTAVAEVRPPYGFPGSGKGSGGGYGKEAHLAAAGKRRSDGFFIEEEEVEEDVLTDNSSIGAPSPSGSSIGENSSSEAGGDDGEEEVESKLKEGDVLGCLDALEDSLPIKKGLSSFYSGKSKSFTSLAEATAAAAAVKEVLAKPEKPFNKRRRILANWSRRASCSSLATATYLPQLLGPDHAVAEGDEGEEDDSDDDVEYSQVPHHGKNVRDAPTSPLPLPRLGGVGSMQRRNGLGSFRSPRSFSLSDLRNSSADGSD

SEQ ID NO: 16381 - protein, 265 aa, Zea mays
  VARIANT 41: note = Ancestral polymorphism is R, Derived polymorphism is W
MSGATPSSGFLPVQKTPSSGNSISPFSLIVKRASESSARFRTLCAQQGLGSIYWYDSVADPTPISGESWPESVSNYTRSGLTRTGSRPLKMMDPVMECLEMMSLSPRPGDDDYDGTGTLPAPLPQHSFQFPGDPTPLESIDLTSFKRSPRDIELKAKDTSFRKSVMADTRISWQEGLVSRMFDMGDLDCCKWLSDDEDSPVFLHTDKALALGTNFEPCNGCCLHEGGDQQEACGFGSVELSCIGDSSPIWIFRFHVLCSKVGKYF

SEQ ID NO: 16382 - protein, 70 aa, Zea mays
  VARIANT 5: note = Ancestral polymorphism is F, Derived polymorphism is L
  VARIANT 33: note = Ancestral polymorphism is R, Derived polymorphism is W
  VARIANT 47..70: note = Derived polymorphism lacks residues 47 to 70
  VARIANT 51: note = Ancestral polymorphism is S, Derived polymorphism is F
  VARIANT 58: note = Ancestral polymorphism is S, Derived polymorphism is L
  VARIANT 59: note = Ancestral polymorphism is S, Derived polymorphism is R
MDRLFLWLHEGLAACLVACDQDGNSHGGYWVFRAYPSSVLNQTPIFKTVPSEVDVTCSSAGARRHHRFLP

SEQ ID NO: 16383 - protein, 75 aa, Zea mays
  VARIANT 62..75: note = Derived polymorphism lacks residues 62 to 75
  VARIANT 57: note = Ancestral polymorphism is E, Derived polymorphism is K
  VARIANT 43: note = Ancestral polymorphism is S, Derived polymorphism is C
  VARIANT 34: note = Ancestral polymorphism is R, Derived polymorphism is W
  VARIANT 31..75: note = Derived polymorphism lacks residues 31 to 75
MHYDFLPCLQVGSDQRPNYLPMEVCKIVAEQQYRKKLEGQQVSKLMDSTCQRPSLREDNICQVLAISVFFCVLSD

SEQ ID NO: 16384 - protein, 448 aa, Zea mays
  VARIANT 173..448: note = Derived polymorphism lacks residues 173 to 448
  VARIANT 167: note = Ancestral polymorphism is S, Derived polymorphism is W
  VARIANT 164: note = Ancestral polymorphism is R, Derived polymorphism is W
  VARIANT 159: note = Ancestral polymorphism is N, Derived polymorphism is Y
  VARIANT 141: note = Ancestral polymorphism is A, Derived polymorphism is T
  VARIANT 134: note = Ancestral polymorphism is G, Derived polymorphism is S
  VARIANT 127: note = Ancestral polymorphism is V, Derived polymorphism is M
  VARIANT 97: note = Ancestral polymorphism is R, Derived polymorphism is W
  VARIANT 86: note = Ancestral polymorphism is A, Derived polymorphism is D
  VARIANT 68: note = Ancestral polymorphism is C, Derived polymorphism is Y
  VARIANT 61..448: note = Derived polymorphism lacks residues 61 to 448
  VARIANT 44: note = Ancestral polymorphism is K, Derived polymorphism is N
  VARIANT 43: note = Ancestral polymorphism is S, Derived polymorphism is C
  VARIANT 36: note = Ancestral polymorphism is L, Derived polymorphism is P
  VARIANT 34: note = Ancestral polymorphism is N, Derived polymorphism is I
  VARIANT 26: note = Ancestral polymorphism is E, Derived polymorphism is K
  VARIANT 25: note = Ancestral polymorphism is V, Derived polymorphism is I
  VARIANT 22: note = Ancestral polymorphism is D, Derived polymorphism is V
  VARIANT 20: note = Ancestral polymorphism is P, Derived polymorphism is L
  VARIANT 19: note = Ancestral polymorphism is I, Derived polymorphism is T
MAGPGPKLRAAAAAPAPCIPDDALVEMFGLLPANSLHRFKCVSKAWCGLVTDPLHRQRFAQTLAGFLCRVDGDGGTESSRLTRPNATVPERKETTRRFVNVSGMAEPHPDASLSFLPPPDAEGLRDVILDARDGLVLLARARGHEPPDLHPPACYLVCNPATARWAWVPGSGWVPSASQRTALTYLLFDAAAEEEEEASPPHRFHFHLLQFRLDDMDSVRAVHTYASADGAWADRAGAWVHGGWRDWARGMALIQPGTGAAVARGALHLVVDTDGTSGPNNLVAVDAEGATRRAIPLPRRDVAEKDWHSVFVGRSRGRLHYVMCVRPPHGRLSEEEPLRLLVWVLQDYDAGEWVLKHTVGFPELFGRIACQFRVEYSVVAVHPDGNWVFFVRHWDRKLVAYDMDRREVRVVADLGPGGDVGDELPTPYVPLYSASAGLTNASVGFRVE

SEQ ID NO: 16385 - protein, 868 aa, Zea mays
  VARIANT 762..868: note = Derived polymorphism lacks residues 762 to 868
MAPKVLMVAEKPSIALSIASALSGGRMSTRKGSTDVHEFDGTFQGSYANFKVTSVIGHVLSVDFPPAYQNWEGTDPMDLFEAPVLRSECNPKAHIRRHLAQEARGCTYLILWLDCDREGENICYEVIDCTGIPENEAGRRIFRARFSSVTEKDISSAMDNLVLPNKDESLSVDARQEIDLKVGVAFTRFQTRYFQGKYGNLDSRVISYGPCQTPTLGFCVQRHQQITTFKPEKFWSLKTYIIKDSDEIQLEWDRKKLFDFDVTVMFQKMVISDGTLKVADISVKEECKTRPSGLNTVNMLKVASSALGIGPQTAMHLAERLYTQGFISYPRTESTAYPSSFDFRGALAALLNNPLWSNDVRKLLDAGFVKPRQGHDAGDHPPITPMRSATEASLGTDAWRLYQYICQHFIGTVSPDCRYTRTAIEFTSGGETFHCVGYRVTSKGFTSIMPWLAVSENSLPAFKKGDSVSIHKADIYEGSTTPPDYLTESELISLMEKNGIGTDASIPVHINNICERNYVQVNSGRRLVPTPLGTTLIRGYQCIDADLCLPDIRSFIEQQITLIAKGKADHLRVVQHVIQQFMKKYSYFVKKIENMDALFEAQFSPLADSGRLLSKCGKCGRYMKYISTQPMRLYCITCEDVYYLPQNGSIKLYKEIVCPLDGFELLLFSMVGPDAKSFPLCPFCYNCPPFEGIDKLFGALKLDDTGKVGKGAGMPCFLCPHPTCKQSMITQGVCACPECSGTLILDPVSAPKWRLYCNMCNCIVLLPHAAHRITTTDKKCLTCESTIIEVDFNKKTTPLQDGATLHEGCILCDDLLHSLIEMKHGKSFFIRRGRGRGRGRGRGRGSSRGRGRRGNSRYDDPKMSFRDF

SEQ ID NO: 16386 - protein, 354 aa, Zea mays
  VARIANT 81: note = Ancestral polymorphism is A, Derived polymorphism is E
MDSDYVASLLMGMGSSAPALDFAALDAGFLETLCGGGGGLFGVSGVAAGAGCGGVSPEGSSVSDPAWARARGDDNVRKRKAPPTGSAGGKEACPGKAAEAKGPDGKRCRVGGSDSPVKPKVEEVAASDASVELKAQKKGKGKTAKPAVEPPKDYVHVRARRGQATDSHSLAERVRREKISQRMKFLQDLVPGCNKVVGKALMLDEIINYVQSLQQQVEFLSMKLATVNPQLDFSNLSTLLHKDMYQPCGPSANSVFPLESDGAAFPFCDQADLFHSFGSGSAAMEDQCSLSLLDTALPHAANPQFAFQKQQRDFWEDGLQNALPTGSEQRQEEDGLLVPNFDGQLHADQTKVEF

SEQ ID NO: 16387 - protein, 133 aa, Zea mays
  VARIANT 112..133: note = Derived polymorphism lacks residues 112 to 133
MAVPLLTQKIVKKRVKQFKRPHLDRYKCLKPSWRRPKGIDSRVRRKFKGCTLMPNIGYGSDKKTRHYLPNKFKKFVVHNVSELELLMMHNRTYCAEIAHNVSTKKRKEIVERAAQLDIVVTNKLARLRSQEDE

SEQ ID NO: 16388 - protein, 163 aa, Zea mays
  VARIANT 105..163: note = Derived polymorphism lacks residues 105 to 163
MAKPQLLLCFLLAASAPLIVATAKKSGDVSELQIGVKAGSYIDAMPGYFKMQYKPESCSIQAHKGDKVKVHYRGKLTDGTVFDSSYERGDPIEFELGTGQVIKGWDQGLLGMCVGEKRKLKIPSKLGYGPQGSPPTIPGGATLIFDTELVAVNGEPTNQSDEL

SEQ ID NO: 16389 - protein, 259 aa, Zea mays
  VARIANT 31..259: note = Derived polymorphism lacks residues 31 to 259
  VARIANT 162: note = Ancestral polymorphism is G, Derived polymorphism is S
MPPKGPRSTLISMLCTEEDPSLRSTDVESRRLPAELPGFYYDPEKNRYFPIRGPIPGAAARRGTPAPPPAVDTTGCSRKRARRPELLNAREMYGGGVMFSNKAARSTFKQQCHYAQASQPMVWKYQATTSVADKALEQLDAMVQTPQGLKESRLLVSGSMNGSIRLYGLGTALSNFENEAEFLPQPACTLVGKHKPGPLPSIWSPGTGFIAFSSSISCIKKLGRHVPDASNTNSSVQRALYPELVTYCTLYLFGHLVLP

SEQ ID NO: 16390 - protein, 454 aa, Zea mays
  VARIANT 331: note = Ancestral polymorphism is C, Derived polymorphism is F
  VARIANT 327: note = Ancestral polymorphism is G, Derived polymorphism is R
  VARIANT 284: note = Ancestral polymorphism is F, Derived polymorphism is I
  VARIANT 231: note = Ancestral polymorphism is G, Derived polymorphism is R
  VARIANT 208: note = Ancestral polymorphism is P, Derived polymorphism is L
  VARIANT 203: note = Ancestral polymorphism is F, Derived polymorphism is L
  VARIANT 149: note = Ancestral polymorphism is N, Derived polymorphism is D
  VARIANT 143: note = Ancestral polymorphism is D, Derived polymorphism is Y
METVAGGIPLPIPEGPFLDVLSRLSIKDLHRSTSLSREWRLARRLHQLSREPSHDDKVGGDNRDGDDDGDGARGDDDGGNGSDWDEDEDEDSSREVGHGRDRACSGNYGLRFFDLLAKSMPVPEDTDTEFSFIELPDHVGTIDLLSSCNGLLLFGCTEEGSESYHSLGYVVCNPATKQWAAVPSSGWVVKQGEEREEEFESTFLFFDPSVPSRFLLIQFWHDEDAALDLVGDKGVHVYSSETGEWSNRSSEWKQFARGGEWGDRYGVMITSWLGSSFLNGMLHFFVQRMCEGDVLVVAIDGEGSVRRTIRWPLHMFSQPVFIGQSQGRLRCVSERRGLRRRQDEAQSHRVTPSYIDIDVLPEDHDEPEESQITMFAIRADDYEVVAVHPHGDLVYFVHRGNGDLIEYDMGGSYPEDEQVLRLCNLGHNFRAVTPYVPCFSMSSALHTNEELFDV

SEQ ID NO: 16391 - protein, 940 aa, Zea mays
  VARIANT 77..940: note = Derived polymorphism lacks residues 77 to 940
METNEKRHGWKEAAALSGGHLCHVCGYQYPNPNPSAKLRRSHRKHCGKALPEAAEEAVVAEVDEAVVGVGVCVGEREDVAGNRNAAGRTVLGEEGGRQREEIGTGEANGGGAALRGSAGEVDSSVEDKVIAAEQFSPTCIGAQVTATELSENHLINCGSSENVFLEDTVPQMDASELSENGLVDCTSNSIEIVNESSGTELLIALTNGSQNIVERPAEREDSIDEYQDASPFLHPSDSEDGAAPSSAFSTEMSNLNAIPSGSSVTTDVNSLGTNGLLKDQISGEPNMTEISADSKAGRNLEEGALRLAKHEVNLKLGGPYEQSVNVDYTYTDMVDSKSDEASVHSVMIEPLDASPLQETRLTILEPESESTCSKMVEGFMEDRMHVLLTMPEASPKSKVVGSDNVQLETITNPSTNPMSTGSDLNVVYTDNTATDCSMELPRLNWSVEDVPGDSQPVENSSKKTLRCPTAVFEDDLPVTKMDDTPVTNVDDVEFTFHEKPQTDTVEENLSIQKTNGFTKEEVCNKQINPEIPTEDQFSRGQKHDTLLMDRVPSVKNPFNLDDDRNDDLFELPTESCFLEVPNVVESRKQVDSTSRMVVPPIVSNQIRMAEVQQCHNSIERILSSSSASENGEVVGPEDITVRSSSELVNKTCLTDHALQENGHTSGDIFVPSQAASTELSTISMQDISALSEVEIMQTEDASAKDMTAVCSIDCIEMKQAINTTANDTYAAIVEEKKLIEGTTARMNGVRETYYVEEQTQASDTKELSAVQNIGNSEENKQTENTDAKETNARFNANDVEHKTQTAKEIAAAESTSSVEEKQQLNIVVVQDGSNKKMNEEIASTGAQLNSGRVRVPLKVLLAEASMENQVKKPSTKERMLSFRRQVTKDNNLSVKSGSRKSGPDDHHWSSPAKLPHKDVDKISREKKQPWMPFICCHSVR

SEQ ID NO: 16392 - protein, 479 aa, Zea mays
  VARIANT 322: note = Ancestral polymorphism is P, Derived polymorphism is L
MAGPPLLSFPFFFLLCVAVAWSEAYGASGGYGLGVNYGRVADDIPSPWRSVELLRAAGAGSVKIYDANPGVLRALAGTRWPVSIMVPNQIIPDLAASAAAADRWVAENLVPYYPATRVKFLLVGNEILSDLSIANSTWPHLVPAMENIHRSLRKRSISSVKIGTTLAMDALADGAFPRPPSAAAFRADIAEAVVRPLLHFLNGTNSYYFVDAYPYFVWADNNLTVSLDYALFQGGRTRYVDPGTGLTYTNLLDEMLDAVVIAMAKLGYGHVKLAIAETGWPNGCDYNQIGGNVHNAAIYNRNLAARMAKNPGTPVRPGAKMPVFVFSLYNEDLKPGPGTERHWGLYYANGTAVYEIDLTGRRPLGSYPPLPAPENNTPYKGPIWCVLSAAASNKLNETAVGNALSYACGQGNGTCDAIQPGKTCYTPNTTAAHASYAFNSYWQQFEKTGATCYFNNLAEQTIKDPSHGSCRFPSSSGSP

SEQ ID NO: 16393 - protein, 346 aa, Zea mays
  VARIANT 103..346: note = Derived polymorphism lacks residues 103 to 346
MAAPKKTMRALRYDKYGGGAEGLKHVEVPVPSPSKGEVLLKLEAASINPIDWKIQKGMVRPFLPRKFPFIPVGDMSGEVVELGSGVTDFKPGDKVISISFPNGGGLAEYAVAPASLTVARPPEVSAAEGASLPTAASTALQQLKAAGVSSFDGGSGSGSGSGADSDGPKNVLVTAASGGVGHYAVQLAKLAGLRVTATCGARNLGLVAGLGADEVLDYKTPEGARLLSPSGTRYDAVAHCATGTPWSVFAPVLADRATVVDVTPGVAAAAKSFLQKVTFSRKRLVPLVLIPKKEEMEWLVEMTRQGKLRTVVDSRYSLSRAQEVWAKSIDGHATGKIVVEMGGAAE

SEQ ID NO: 16394 - protein, 227 aa, Zea mays
  VARIANT 98..227: note = Derived polymorphism lacks residues 98 to 227
  VARIANT 76..227: note = Derived polymorphism lacks residues 76 to 227
MDNEREQSLGDLEKELEAKVSDTQCAAAEIQDLLKQVDAQPVNVKDVDRMRREMQAIEDDIANTEKGKAALEDKFWEVEAKLVTKLEELERHAHQFNQALKQLKPTVAFQYMIDSKGSSPAEMLGTGSKTVLKPALLAHAEENKRICLSNLENLNDLQKQLQGNAKVLEEERNNIFSLQAKNDNLCCAVVGTFLGSGRDGLPRTDRDLTRRPTAVNEYSCGVDTLNI

SEQ ID NO: 16395 - protein, 172 aa, Zea mays
  VARIANT 138: note = Ancestral polymorphism is R, Derived polymorphism is C
MVRPILQPILRRLPSTPHATAPAASTPATARAGCPRPRPPPHNHDHGLNRSASSAIYAHDFNLVRLRLRDGRHLAYCESGVPRDQARFAVVFSHGFTGSQEDSVSASQEQQPPPRPDEVASSLALRASRNSEDERRRRKISSLRRKAIHAFKKRGRRHIDFGFLPAAISIED

SEQ ID NO: 16396 - protein, 156 aa, Zea mays
  VARIANT 76: note = Ancestral polymorphism is V, Derived polymorphism is L
  VARIANT 91: note = Ancestral polymorphism is R, Derived polymorphism is C
  VARIANT 94: note = Ancestral polymorphism is P, Derived polymorphism is S
MDASAAGAGGKAKKGAAGRKAGGPRKKSVTRSVKAGLQFPVGRIGRYLKKGRYAQRVGTGAPVYLAAVLEYLAAEVLELAGNAAKDNKKTRIIPRHVLLAIRNDEELGKLLSGVTIAHGGVLPNINPVLLPKKTAEKAAAKEAKSPKKAAKSPKKA

SEQ ID NO: 16397 - protein, 142 aa, Zea mays
  VARIANT 23: note = Ancestral polymorphism is R, Derived polymorphism is H
  VARIANT 38: note = Ancestral polymorphism is S, Derived polymorphism is F
  VARIANT 40: note = Ancestral polymorphism is R, Derived polymorphism is H
  VARIANT 42: note = Ancestral polymorphism is D, Derived polymorphism is G
  VARIANT 43: note = Ancestral polymorphism is A, Derived polymorphism is S
  VARIANT 50: note = Ancestral polymorphism is R, Derived polymorphism is H
  VARIANT 68: note = Ancestral polymorphism is V, Derived polymorphism is A
  VARIANT 114..142: note = Derived polymorphism lacks residues 114 to 142
  VARIANT 137: note = Ancestral polymorphism is P, Derived polymorphism is L
MAAETKPAAASGVAGEMEVEAYRRLFPVAFLERHLGESIRIDSRRLREARPTTVALGAVSSAHGSALARLGDTAMLASVKLEVMSPPAEHPDEGSVAIEFHMPPICSPLVRPGRQADVAPVISKALEDVLTRFFVSPLTSAL

SEQ ID NO: 16398 - protein, 431 aa, Zea mays
  VARIANT 298..431: note = Derived polymorphism lacks residues 298 to 431
  VARIANT 295: note = Ancestral polymorphism is S, Derived polymorphism is R
  VARIANT 260: note = Ancestral polymorphism is A, Derived polymorphism is V
  VARIANT 125: note = Ancestral polymorphism is R, Derived polymorphism is S
  VARIANT 115..431: note = Derived polymorphism lacks residues 115 to 431
  VARIANT 108: note = Ancestral polymorphism is N, Derived polymorphism is S
  VARIANT 60: note = Ancestral polymorphism is P, Derived polymorphism is S
  VARIANT 58: note = Ancestral polymorphism is P, Derived polymorphism is L
  VARIANT 57: note = Ancestral polymorphism is A, Derived polymorphism is T
  VARIANT 47: note = Ancestral polymorphism is C, Derived polymorphism is F
  VARIANT 39: note = Ancestral polymorphism is A, Derived polymorphism is V
  VARIANT 37: note = Ancestral polymorphism is A, Derived polymorphism is V
  VARIANT 15: note = Ancestral polymorphism is R, Derived polymorphism is W
MAGRRRRCVHPRQARLLPLPSPGVPSPLESNTLREVAVAESPSKKICHALSSTPSSAPGPDVWVDLLDSLLLQIIVLVSSFHDLLAFIGTCRSWRAVLSSLPPVYTFNIPPLHLRSDGCDSHPHRWYMRAKLLSDINWQLTDPAKQTSSLSCSALQDFQVYMRYLGCSYGYLIFSNLEQCLLVNVYSGATVRPPKLKFTDNRNVYHGALVAPINLSNSCLLFCSRSSIFQWKVGSDFWSEHPLGVECISQIVSFKGEIFAIDLLRRLHRIQLEPQLSLQEVAVVWDADMFLGLDSTQWLVVCGDMLLMVHLSVTIDSPCSGFSETFNVCRLDFQVEPAKWVKVDNMGDNALFVGTDGRSPTFSCLGPEKWGGKRNCIYIASPLADSNEPWGVFEVGQAVRCYNAKKYLTRVHSSRLPSLWVLPSLVYGVGQ

SEQ ID NO: 16399 - protein, 214 aa, Zea mays
  VARIANT 193..214: note = Derived polymorphism lacks residues 193 to 214
  VARIANT 181: note = Ancestral polymorphism is A, Derived polymorphism is T
  VARIANT 164: note = Ancestral polymorphism is G, Derived polymorphism is R
  VARIANT 135: note = Ancestral polymorphism is S, Derived polymorphism is L
  VARIANT 130: note = Ancestral polymorphism is R, Derived polymorphism is C
  VARIANT 124: note = Ancestral polymorphism is K, Derived polymorphism is N
  VARIANT 117..214: note = Derived polymorphism lacks residues 117 to 214
  VARIANT 57: note = Ancestral polymorphism is R, Derived polymorphism is S
MSENKSPAKEMFCSEIKSPAKQVFGDQNKSSSNQIFGDENKEPSAWGAIETPMCDVRVTDSPVSSQLSPIVCQVVGAPLSEELNTCSAMEGSDPSKEKNSLAGQKDGGGLLEVYIKWESGNLIKGLKLLRNSCLSDLRKLIEAHFEEVGSKQQQQQQFIFLLLGHVPTVQFTELYSDRWTAQRIRMTDLNTLEVAHRDAARVGQYVGEDEDTFL

SEQ ID NO: 16400 - protein, 40 aa, Zea mays
  VARIANT 3: note = Ancestral polymorphism is T, Derived polymorphism is M
  VARIANT 24..40: note = Derived polymorphism lacks residues 24 to 40
MKTCRFLAERGALILLIGKDETTGTEGIRGKLAGGNYGCS

SEQ ID NO: 16401 - protein, 374 aa, Zea mays
  VARIANT 22: note = Ancestral polymorphism is A, Derived polymorphism is T
MPLRSETGTAGEGDEEQRLRAALRHLQAEAGVLERLVYKHRNQHRGAAYFQYLLKVRRDLKLLLGAGLAEVLNAVFPVLACRKPANTILVPNKQTKKKPGANHSHHQRLLGVARLLSQMSEPVMKAAIQITFLLARSFFVDLCTAVLSLLARVRVLIQQMLLDVVSIYNKVTDLTERKQAVKISISGVQAFREYYPSMNDACTVLECVWIKDKFVLHEKVKDISQETQVENQKCRDPESTVQYETLALISEDMKILEETNLPDRQTDTALAEQPDKMIHCNDAGDSQKGRQLENESSARLVPDTLSTRKHLKPESRKRVAFVAVGNSKVTGAASEIKSSEVNKKQRLDMISPSNIQSGLYNKLLDCEFAEKSLL

SEQ ID NO: 16402 - protein, 184 aa, Zea mays
  VARIANT 139: note = Ancestral polymorphism is C, Derived polymorphism is S
  VARIANT 100: note = Ancestral polymorphism is A, Derived polymorphism is V
MDVRVPPPRRGVTLAEQLAASSNLRNLLKLRDDGGEGGGRPAAAGRRRTLLDAIRDADEGRRPPAVASGRHSVRPAPGGTATAAPGSAARGASQRVSLMALLERTEQQWTWKRADAEEAAPEEEEKEKGGGMGGRCCVCVARGKGAAFIPCGHTFCRACARELRTGRGRCPLCNATIREVLNLF

SEQ ID NO: 16403 - protein, 676 aa, Zea mays
  VARIANT 122..676: note = Derived polymorphism lacks residues 122 to 676
  VARIANT 134: note = Ancestral polymorphism is S, Derived polymorphism is I
  VARIANT 220..676: note = Derived polymorphism lacks residues 220 to 676
  VARIANT 244..676: note = Derived polymorphism lacks residues 244 to 676
  VARIANT 292..676: note = Derived polymorphism lacks residues 292 to 676
  VARIANT 451..676: note = Derived polymorphism lacks residues 451 to 676
  VARIANT 528: note = Ancestral polymorphism is D, Derived polymorphism is N
  VARIANT 542: note = Ancestral polymorphism is G, Derived polymorphism is E
MRAVSPPRITPPPSSNRASTPSSRRLLPPSSAHRPAASCPPPPHEPQPAPADRVRALSPLLPLPLSVHDWVGYRCPTQGAENFADICAGEERPPDQALGRRAGRWMTMAGGGGLNRSSSRGQLPPQELLDDLCSRFLLNVPKEELESFERILFLLEQAPPLDHLLLARRPSSTRSAKILRKTLGGGMRQVGVLCAAAHVAVRDNVGKLADDHRKAKALAEPKFGLIDKPDADTNDMISEKLMVQINLNEGIEEDIPPSQYTTRCEEKLTMTQAAISREAGPPGYDPGENCLQDFVHVWHPHNQNVGATGSGLSGVATVSSTLGVLRAYSPNSTSASSSNLSTVHMGGLTCITQPTTELGSEDTVIAQFLSNPGQVGPSESPVLFSGTVGAASTFSPLASNDLPVSVTTVSTNEISAMVPPPSTSADRLGSILPEPLNIIQELLLPRTKNTQEKILLRIIVAQSLMVYKCEEKLTMTQAAISREAGPPGYDPGENFLQEDGLLHTACGTPNYVAPEVLADKGYDGMAADVWSCGIILFVLMAGYLPFDDANLMRLYKLICHATFSYPPWFSFGARKFIKRILDPNPDTRIKIAEFLEDEWFKKGYKPPHFEQGEDVNLDDVDAALIDSEVLHPQSMRPDREGDIPVRVKNSYNPKAPGTLFATAEQCSAAVTLRMLY

SEQ ID NO: 16404 - protein, 397 aa, Zea mays
  VARIANT 61: note = Ancestral polymorphism is S, Derived polymorphism is F
  VARIANT 106: note = Ancestral polymorphism is L, Derived polymorphism is Q
  VARIANT 112: note = Ancestral polymorphism is T, Derived polymorphism is I
  VARIANT 129..397: note = Derived polymorphism lacks residues 129 to 397
  VARIANT 159..397: note = Derived polymorphism lacks residues 159 to 397
MDGGDAPAAGGGKVACAAWIRRREDKSAAAPARVFAAYGRAGAAGSPAALEVLGFDAKECSLSPSPLARAVIGDGGAGDAPRGIAVHPAGDELVCATAKGCRLFKLIFDEFTVRIIPRDAPLLESVGPQKCLAFSTDGAKFAIGGEDGHLRIFHWPSIKVLLDEPKAHKSFRDMDISLDSEFLVSTSIDGSARIWKIDEGAPLVNLTRSSDEKIECCRFSRDGMKPFLFCTVAKGPKVVTVVWNISDWERIGYKRLLGKPISTLSVSLDGKYLALGSHDGDFCAVDVKKMEVSHWSKKVHLGSPVTSIEFCPSERVVISTSHQWGAELTKLNVPADWKEWQVWLVLLALFLASAVLFYVFFERSDTFWNFPMGRHQPAKPWNVLKESPPVPEDQTPW

SEQ ID NO: 16405 - protein, 203 aa, Zea mays
  VARIANT 18..203: note = Derived polymorphism lacks residues 18 to 203
MPRRLATRRSAVSGSAAQERLHGCCPRGWVTALVSEIRGRVPSIGGLLKTPTSQSETVLEAYPRDLAEFGTGLRHEIEVLSKAVARAACFEAQLHALQADPATFTPDPEDAEDFARGARRRSPSPPPPPVTAPRPLTAATPTPAPPPGPTSEDAEDYAVWSKGFILDEREEEIEALCYDSDVLEAMADRLVPDAMPRKVFSFN

SEQ ID NO: 16406 - protein, 625 aa, Zea mays
  VARIANT 204..625: note = Derived polymorphism lacks residues 204 to 625
  VARIANT 187..625: note = Derived polymorphism lacks residues 187 to 625
MVFAASGGSSPATAAPGSALGVILTRGFARQVLVGRWFTVLASLLIMASSGATYVFGSYSGALKSSLGYDQRTLNTVSFFKDLGANLGVLPGLLNEVTPPWVVLATGAGMNLFGYLMVYLAVSGRTARPPPWAVCAYFFVGANSQAFANTGALVTCVNNFPETRGVVLGILKGFVGLSGAVYAQLYQALYGGEDAESLILLVAWLPAAVSVAFVHTIRYMPYPRRRRSGGGGGQETSSDPFFCFLYLSIALACFLLVMIVVQGQVPFSRAAYGVAAAPLLILLLMPLGVVVKQEYKIYRERQLDAAADPPPTIAVVDAGAPPVPSSVQMSSAAATAAVEETEQQQQAATSSASSSCCLGSLGGWGVRTMFRPPARGEDYTILQALVSVDMLVLFVATTCGMGGTLTAIDNMGQIGKSLGYPAKSVNTFVSLISIWNYAGRVAAGYVSEAALARHRVPRPLLLTGVLLLACAGHALIALGAPRSLYAASVVVGFCFGAQWPLVFAIVSELFGLRRFSTLHNLGGLASPVGSYILNVRVAGRLYDAAAARQRGGSGRVCLGVECYRRSFLIITAATAAGALVSLVLVWRTWRFYRGDIYARFRDGDGRLPVDRQQEEREKATAANGR

SEQ ID NO: 16407 - protein, 346 aa, Zea mays
  VARIANT 245: note = Ancestral polymorphism is A, Derived polymorphism is S
  VARIANT 214: note = Ancestral polymorphism is S, Derived polymorphism is L
  VARIANT 102: note = Ancestral polymorphism is P, Derived polymorphism is T
MRGFSDSRGCFLSFFLGAAVAAACIVLLQPSALCPFDGLTPADRQELAILSNRTHAAPCSKKLHMPATTSPDDVRLLALLRRASMDDNTIIMTFTNKAWTAPGSLMDLFLESFRVGVRTEPLLKHLVIVAVDDKAHERCGQVHPLCYRLRVRGVDYAAEQSFMEKDYLDMMWRRNRFQARVLRLGYSFVFTDMDIVWLRNPLLRVPVGADLAMSSDYFYGDNPYDLNKTANGGFVYARASARTVAFYGGWYEAREAYPRRNEQDVFDRVKHVLSARHGVRVQFLDTAYLGGFCELRKDFHKVCTVHGNCLFGLRDKLQKLTQVLDEWKQFRADAALMGSNSTALTD

SEQ ID NO: 16408 - protein, 286 aa, Zea mays
  VARIANT 267: note = Ancestral polymorphism is W, Derived polymorphism is R
  VARIANT 256..286: note = Derived polymorphism lacks residues 256 to 286
  VARIANT 179: note = Ancestral polymorphism is A, Derived polymorphism is T
  VARIANT 172: note = Ancestral polymorphism is G, Derived polymorphism is C
  VARIANT 70: note = Ancestral polymorphism is A, Derived polymorphism is T
  VARIANT 31: note = Ancestral polymorphism is I, Derived polymorphism is V
MKKLHMQAGNSTDHELLELLKRAAMDDRTIIMTFTNEAWTAPGSLLDLFLQSFRLGVRTAPLLKHLIVVAVDAMAYERCQHVHRLCYHLRVDGVDYAAEQSYMQKDYLDMMWRRNRFQARILELGYSFVFTDVDIIWLRNPLLRIPVGADMAMSCDFFYGDNPYDLNKLANGGFVYAKANARMVAFYGSWYESRKGFPGAHEQYVFDQVKQELSARHGVRVQFVDTAYLSGFCELRKDFYRVCTVHANCLVGLQSKLQKLTQVFDEWKQFREKAALLGSNTTALTD

SEQ ID NO: 16409 - protein, 203 aa, Zea mays
  VARIANT 37: note = Ancestral polymorphism is E, Derived polymorphism is K
  VARIANT 47: note = Ancestral polymorphism is V, Derived polymorphism is M
  VARIANT 49: note = Ancestral polymorphism is T, Derived polymorphism is M
  VARIANT 54..203: note = Derived polymorphism lacks residues 54 to 203
  VARIANT 55: note = Ancestral polymorphism is A, Derived polymorphism is T
  VARIANT 57: note = Ancestral polymorphism is P, Derived polymorphism is L
  VARIANT 62: note = Ancestral polymorphism is C, Derived polymorphism is Y
  VARIANT 104: note = Ancestral polymorphism is P, Derived polymorphism is L
  VARIANT 110: note = Ancestral polymorphism is L, Derived polymorphism is P
  VARIANT 117: note = Ancestral polymorphism is S, Derived polymorphism is F
  VARIANT 137: note = Ancestral polymorphism is T, Derived polymorphism is M
  VARIANT 153: note = Ancestral polymorphism is G, Derived polymorphism is S
MRQWKSLVPALHLHAPAASCFPHLPSHLQVVRLVICEGSMRAYAPPMTTRELMQAHPRHLVCRADVLLIGEKIPVVAAAEELRPGEAYFLLPMHLFRSALSFVPLASSLLLVLSVASATGNGNDKRPAARPFELQHMLAGTLRLFFHDCFVNSCDASVLVSPLCSSDTRPTLPGRPPQSPLLGGAAAPYLPDRASRTLRRLTP

SEQ ID NO: 16410 - protein, 500 aa, Zea mays
  VARIANT 50..500: note = Derived polymorphism lacks residues 50 to 500
MGEEANVPLLVPANNGDDDHLRLTVIHGDQGKTAAGDTGLLPAASSASAWPWAEVKGQLAFAAPMVATSMAYYAIPLVSVMFAGRLGDLQLAAATLGNSWGTVTGIALMTGLSGSLETLCGQGYGAKAYRTMGVHLQASLLTSALASAVVSLLWIYSEPLLVFLRQDPETSRLAADFLRHSVPALFAYGFIQCALRFLQAQSVVAPLVAFSLLPLAAHVGVAHALVNVLGMGFAGAAVATSASLWLSFLMLAAYVMLSARFRETWPGFTTEAFRHVLPGMKLAIPSAVMVCFEYWSFEILVLFAGLMPDSQLSTSIIAMCQNTEAISYMITYGFAAVISTRVSNELGARNIANAKKALTVSLTLSLMLGVAFLLLLGLGHDLWVRLFTTSEVVVSAFASMTPLLIGSVVLDSTQGVLCGVARGCGWQHLAAWTNLVAFYVIGLPLAILFGFTLGFQTKGLWMGQICGLLCQNCVLFFITLRTNWEELDLTMFNKDNDFVC

SEQ ID NO: 16411 - protein, 247 aa, Zea mays
  VARIANT 125: note = Ancestral polymorphism is I, Derived polymorphism is T
  VARIANT 105: note = Ancestral polymorphism is P, Derived polymorphism is S
MAAAKIAPSMLSSDFANLASEAERMVRLGADWLHMDIMDGHFVPNLTIGAPVIQSLRKHTKAYLDCHLMVTKPSDYVEPFGKAGASGFTFHIEVARGEHTSVEWPSIFSSPLMEKLYADNWQDLIQSIKSKGMRPGVSLRPGTPVEEVFPLVEAENPVELVLVMTVEPGFGGQKFMPEMMDKVRTLRKKYPSLDIEVDGGLGPSTIDVAASAGANCIVAGSSIFGAADPGAIISVLRKSVEGSQNKN

SEQ ID NO: 16412 - protein, 221 aa, Zea mays
  VARIANT 29: note = Ancestral polymorphism is A, Derived polymorphism is G
MSRRGDWVYENNGGTCVAIAGADYCVVAADTRLSVGYSILTRDHSKICDLADKCVLASSGFQGDIKALHKNLAARELLYQHQHNKRMSCPAMAQLLSNTLYYKRFFPYYAFNVLGGLDSEGKGCVFTYDAVGSYERTGYSAQGTGSTLIMPVLDNQLKSPSPLLLPARDAVTPLSESEAIDLVKDVFASATERDIYTGDKLEIVVINKVGTKREYIDLRKD

SEQ ID NO: 16413 - protein, 293 aa, Zea mays
  VARIANT 13: note = Ancestral polymorphism is T, Derived polymorphism is I
  VARIANT 33..293: note = Derived polymorphism lacks residues 33 to 293
  VARIANT 40: note = Ancestral polymorphism is S, Derived polymorphism is L
  VARIANT 41: note = Ancestral polymorphism is L, Derived polymorphism is P
  VARIANT 42: note = Ancestral polymorphism is R, Derived polymorphism is M
  VARIANT 61: note = Ancestral polymorphism is G, Derived polymorphism is R
MAPPLPSRRGPVIGVPSAPLTSSTSTAAPLEAWGKDEVDLLRISEEVLAKWEKGFGSLSTRAKNIQNEYTCDSLDSFAQNNIPSFSNNASYFVMPLQSPTNVAYDPISTACHRASSSGSAPYSSPYGACGLPITHWGSAETHKQQGMLSANWFHSSGPATKGHQSTVLVNDTRQLISCTDHAQANVHTGAPPRLKANGHDLKNLSLRSCGLPSRKGNLRKLNPKRVGAAWAEKRRAELEMEKEGEIVPITSDSSWLPNFGSVWQSGTRKESRKEFEKNHKFHDTKSNMTYPWR

SEQ ID NO: 16414 - protein, 409 aa, Zea mays
  VARIANT 150: note = Ancestral polymorphism is T, Derived polymorphism is M
  VARIANT 286..409: note = Derived polymorphism lacks residues 286 to 409
MMLVAVLPWASSPVPPMKLCSGKRTASAMPLAAKKRSASSAHHPGRGRALTAATATAPASCHDDEQRPRLQTLDLLRFLEEDGWVEDQMLSLLTPVDEAWQPADLLPTFAVAAEEQRVQVAELQARAAGVPDELLVCLVGNMITEEGLPTYMTMGNRVGPAEGVTDATGRDGHGWARWLRGWTAEENRHGDLLNRYLYLCGRVDMRQVERTVHHLLRRGMSMTEPSCPYHASIYGAFQERATFVSHARTARRAALHGDACLAKLCGVIAGDEKRHEVAYTRVVARCFEADPDGVVRALAAVMRAKVTMPGERMTDGRDDSLFDHFSAVAQRAGVYTAADYGDMVEHFVRTWRVAGLQGLSGEGRRAQDYVCGLPRKIRRMEELAHDRAAQKEAQSVSISWVFDRPVRLH

SEQ ID NO: 16415 - protein, 164 aa, Zea mays
  VARIANT 60: note = Ancestral polymorphism is F, Derived polymorphism is I
  VARIANT 19: note = Ancestral polymorphism is I, Derived polymorphism is T
MAMTVAAAWLPSTASRRRILSSPLPPFAAPISIHMPRRAPPPSPIHPKPRLFVAYAQLDFSRAVQTAWRVGNDAVEAGSNLVPGSVPRPIARIGVAFAAVSVAFFLVKSIVSTALFVLAMMGLIYLSFLAMNPKEASGSRLDEAMGNPSEDPVEEARRIMDKYK

SEQ ID NO: 16416 - protein, 136 aa, Zea mays
  VARIANT 86: note = Ancestral polymorphism is A, Derived polymorphism is T
  VARIANT 82: note = Ancestral polymorphism is A, Derived polymorphism is T
MVEKELTGTAMAERGRKPGLITKTLGRCRSGARRSRPAPEGCFTVCVGAGRQRFVVRTECVNHPLFRALLEEAEEAFGYAAAGPLALPCDADAFVRVLEQIEDAGRAAAVARCGLVRGHSAYRLLVPARPLLVGRS

SEQ ID NO: 16417 - protein, 443 aa, Zea mays
  VARIANT 269..443: note = Derived polymorphism lacks residues 269 to 443
  VARIANT 255..443: note = Derived polymorphism lacks residues 255 to 443
  VARIANT 219: note = Ancestral polymorphism is L, Derived polymorphism is S
  VARIANT 214..443: note = Derived polymorphism lacks residues 214 to 443
  VARIANT 203..443: note = Derived polymorphism lacks residues 203 to 443
  VARIANT 162..443: note = Derived polymorphism lacks residues 162 to 443
  VARIANT 48: note = Ancestral polymorphism is P, Derived polymorphism is L
MNMYEFVLNKAQRLTFDSSSPNGILMFREVNPGNAPLVVGQLLDDECPEDFIKGLILSVRSLLPVEPLVDECEKSNNNPEHFLTTNPFYDSRVVGKYCEKRDPTLAVVAYRRGQCDYELINVTNKNSLFKLQARYVVERMDGDLWDKVLQPENEYRRQLIDQVVSTALPESKSPEQVSAAVKAFMTADLPHELIELLEKIVLQNSAFNGNFNLQNLLISTAIKADPSRVMDYVNRLDNFDGPAVGEVAIEAQLYEEAFAIFKKFNLNVQAVDVLLNNIRSIERAEEFAFRVEEDVVWSQVAKAQLREGLVSEAIESFIRADDAAHFLDVIRAAEEANVYNDLVKYLLMDSSCAKELHKDGTSYSDFDLELDSLSEIDQPALIPHIAEAKSQKYSYEVLFRSLQKLLIDTATSEYLFTDDFFGEESIFHDIFAGLLEAQYFLVR

SEQ ID NO: 16418 - protein, 411 aa, Zea mays
  VARIANT 66..411: note = Derived polymorphism lacks residues 66 to 411
  VARIANT 209: note = Ancestral polymorphism is A, Derived polymorphism is V
  VARIANT 211: note = Ancestral polymorphism is Y, Derived polymorphism is F
  VARIANT 230: note = Ancestral polymorphism is G, Derived polymorphism is C
  VARIANT 296..411: note = Derived polymorphism lacks residues 296 to 411
MLGAARRQLGSGPMLGQVLRRLRPAAAAEVARGYSAAAKEVRGRFTETYPPASVLFPCCSFYVFMWQVIYIIVLHVQMTVRDALNSALDEEMSADPSVFLMGEEVGEYQGAYKISKGLLDKYGPDRVLDTPITEAGFTGIGVGAAYQGLRPVIEFMTFNFSMQAIDHIINSAAKSNYMSAGQISVPIVFRGPNGAAAGVGAQHSQCYAVWFAHVPGLKVLTPYSSEDARGLLKAAIRDPDPVIFLENELLYGESFPVSAEVLDSSFCLPIGKAKIERGGKDVTITAFSKMVGYALQAAEILSKEGISAEVINLRSIRPLDRAAINASVRKTNRLVTVEEGFPQHGIGAEICMSVVEESFEYLDAPVERIAGADVPMPYAANLERMAVPQVDDIVRAAKRACYRAVPMAAAA

SEQ ID NO: 16419 - protein, 675 aa, Zea mays
  VARIANT 362: note = Ancestral polymorphism is L, Derived polymorphism is I
MPATTGAPVAAPAGARRPLLFGAAPRPQAPSPPLTTTRCRRAAHGTPPPPSSSSGAAARRRGVKEYVEAAREMARHKDGGPPRWFSPLECGGGRVPGAPTLLYLPGTVSVSSDRMFDLWCLHIPVEDRTPFAGLVEYVERAVKSESSRAPDRPIYLVGESVGACVALAVAARNPGIDLVLILVNPGTSFHRSQLQTLSAFLDLVPEPFHLTTPQLLNFLTGNLMKMPEAFVGRGLSLQEAGPRLSETTSSMLDSLTILVDVLTKESIVCKLEMLKASSSFVNSRLHAVKAQTLVLASGNDELLPSTQEAERLRGALEKCRTRVFRDNGHKILLEAGFDLATTIKGAGYYRRTRRTDFVADYIPPTPDELQQAIDHDRGATEVLNFQGPKACHRPVMLSTLGDGRVVRGLAGLPREGPAVLVGYHMLLGLELGPMVTGILSGTGVHVRGLAHPFMFDGGTERLMPDSAHFDLHRVMGAVPVTGANFYRLLADKEFVLLYPGGAREALHRKGEEYKLFWPEQPEFVRMASRFGATIVPFGVVGEDDICHLLLDYNDLQKVPFYGMLDEALNRDGLRLRTDSMGEVKDQRMHPLLLAPKVPGRFYFVFGKPIETRGREKELRDKEAAQRLYLQVKSEVEGCINYLKEKREEDPYRSILPRLLYQALHGPNAEIPTFEP

SEQ ID NO: 16420 - protein, 202 aa, Zea mays
  VARIANT 9: note = Ancestral polymorphism is R, Derived polymorphism is H
  VARIANT 13: note = Ancestral polymorphism is P, Derived polymorphism is H
  VARIANT 25: note = Ancestral polymorphism is L, Derived polymorphism is I
  VARIANT 29: note = Ancestral polymorphism is R, Derived polymorphism is G
  VARIANT 35: note = Ancestral polymorphism is I, Derived polymorphism is N
  VARIANT 36: note = Ancestral polymorphism is A, Derived polymorphism is T
  VARIANT 39: note = Ancestral polymorphism is R, Derived polymorphism is H
  VARIANT 41..202: note = Derived polymorphism lacks residues 41 to 202
  VARIANT 43: note = Ancestral polymorphism is E, Derived polymorphism is K
  VARIANT 45: note = Ancestral polymorphism is K, Derived polymorphism is N
  VARIANT 50: note = Ancestral polymorphism is E, Derived polymorphism is G
  VARIANT 54: note = Ancestral polymorphism is D, Derived polymorphism is Y
  VARIANT 65: note = Ancestral polymorphism is T, Derived polymorphism is M
  VARIANT 93: note = Ancestral polymorphism is T, Derived polymorphism is I
  VARIANT 97..202: note = Derived polymorphism lacks residues 97 to 202
  VARIANT 111: note = Ancestral polymorphism is S, Derived polymorphism is L
  VARIANT 169: note = Ancestral polymorphism is E, Derived polymorphism is K
  VARIANT 171: note = Ancestral polymorphism is E, Derived polymorphism is K
  VARIANT 173: note = Ancestral polymorphism is G, Derived polymorphism is D
  VARIANT 174: note = Ancestral polymorphism is V, Derived polymorphism is D
MVEAGSPSRNIMPPILVSDVASVWLTISRRAAVKIAALRLQLENKDREVERLKDLCLRHWEEIRTLKDVVLFLHVEPEPEPDRRLQDDISTLTDRIQCLAQELAQEAEKHSARSCFDEDGYCSSPRTPGFNEDTAFSLECNIGKLRRRTTVDIVVLEGYNIAELLVIYEAESGVRSLVLGSTSHLYSLFLTCTIYKCLNQEL

SEQ ID NO: 16421 - protein, 105 aa, Zea mays
  VARIANT 29: note = Ancestral polymorphism is E, Derived polymorphism is V
  VARIANT 39: note = Ancestral polymorphism is V, Derived polymorphism is A
  VARIANT 56..105: note = Derived polymorphism lacks residues 56 to 105
MHKSESPSSLQTPIGFVYGENCEGNADPESLSDIDDAEADGYLHNEEETQYKKIIWEEMNKEYLEEQAAKEALAAELAATGIDPEAGKKVRNNLGRPNFLFNFGN

SEQ ID NO: 16422 - protein, 568 aa, Zea mays
  VARIANT 15: note = Ancestral polymorphism is C, Derived polymorphism is R
MCFILTNLCQMYHFRFLMFYPFAVVNGHIKRPQDEDIQSNVLEIVGTNVQSTYITCPADPSATLGIKLPFLAIIVKNLKKYFTFEIQVLDDKNVRRRFRASNFQVFLLILSVKHHLLSINSISHEHIDHSKKNGGICDEEDDSDPANSQQRRLPPQPPRESVHLRIGAQFVSGRSRALCLVEEAERTCTGSGASGFNEQPSLQPLNDFPTWGGEREMQLVGGTSGSSRRICSQPFTDACAAQVNDAQLQPIIDACAAQLIDVQLDAWANSFITEEKTQESPSPSWKQCRQLVNEASNIGVRTDSFIDGDRTKGTLAVGSLNQSRSASPQYQLAAAGPLEGDRTDSPQANGPLGLLDEELRYLMSPRQDDLVADPVEWAMTDLTHQVYLTKVVRTTLTLGAPDASYSERKSSTRKLLPQPSHCTTGNELPRTLLIRDRQSFKKLVVYSRKRFNSRDKSRNLNEERSGPNASGTCGIDTDENAVPTARESVTRVKPYICTMPLKLDDGWNNIQLNLADLTKRAYGTNYVETLRVQVHANCRLRRIYFSDRLYSEEELPPEFKLYLPIQKS

SEQ ID NO: 16423 - protein, 287 aa, Zea mays
  VARIANT 12: note = Ancestral polymorphism is H, Derived polymorphism is R
MASFPHLTQMEHGLASGASHGTPSFFFCHGTATADSASLETSSGVLDTSPRGTSSDDNKACRKHKEDSGASFSSARSKDSNSKESSKRSGGKRDRSSKKVDEEEPKGYIHVRARRGQATDNHSLAERVRRERISERMRVLQALVPGCDKVTGKALILDEIINYVQSLQNQVEFLSMRIASLSPVLYGFGMDSSDAFSDLITQKIEGMAHHEAFAMPSSSVLNGTPSEALVDTHTSSSSPSYEVHGDGGTASVSFPQDSGSYMVQTVGEPRQELFSQVVFSNHMCPFQ

SEQ ID NO: 16424 - protein, 837 aa, Zea mays
  VARIANT 765..837: note = Derived polymorphism lacks residues 765 to 837
MFFSRLDDSPMFRKQMQSLEEGAELLRERCLKFHKGCRKYTEGLGEAYDGDIAFASSLETFGGGHNDPISVTFGGPVMTKFTIALREIGTYKEVLRSQVEHMLNDKLLQFVDIDLHEMKDARKRFDKATLLYDQAREKYLSLKKGTRTDVATAVEDELHSARSLFEQARFNLVTALSNIEAKKRFEFLEAVSGTMDAHLRYFKQGYELLHQMEPYINQVLAFAQQSRERSNYEQAALLERMQEFKRQIDRESRWSPNGMNDSPNGDGIQTIGRSSHKMIEEAMQSASKGKVQTIRQGYLSKRSSNLRGDWKRRFFVLDSRGMLYYYRKQNSRPSSGYSNQRTSIPSEHGSGLLSRWFSSHYHGGVHDEKSVARHTVNLLTSTIKVDADQSDLRFCFRIISPTKNYTLQAESAMDQMDWIEKITGVIASLLSSQSPERHLISSPKGSSHHRTASSSSSFSSSTELEHSISEDCMLEKNSGSGYFEHSARVAQHHRTSMMKPDKPIDLLRKVAGNNCCADCGASEPDWASLNLGILLCIECSGVHRNMGVHISKVRSLTLDVRVWEQSVINLFQSIGNTFANSVWEEMLPSSSCVDHGDISRADGLENMSHGFAPKKPKQSDSIAVKEKFIHAKYAEKDFVRKHNMDGIQLAEQMWDNVSSNNKKGVYSLIVGSNADVNFSYGHTSFNSALTLGKALLLQEQSASPSNGSSRCFDRNPLEKGCTGDSVSPASTSARIDGPDDYVEGLSLLHLACRAADLGMVELLLQYGANVNSTDSRGRTPLHHSIMKGRHVYAKLLLSRGADSQAADRDGRTALQYAIDSGTIEDEEILVLLEDPSR

SEQ ID NO: 16425 - protein, 130 aa, Zea mays
  VARIANT 118..130: note = Derived polymorphism lacks residues 118 to 130
  VARIANT 93: note = Ancestral polymorphism is S, Derived polymorphism is Y
  VARIANT 81: note = Ancestral polymorphism is S, Derived polymorphism is R
MKILRVVSVVLFLCQMKPLQIPRSFPVPVNSGLVYEEESCDDDDDNDSDNVGLLETQPDSIESEALTCPAEELDLLQQEGSKERIFFFQFPKSLPLPKRSSSAGKEVMEGSNLQQLPQGYLGKKAGVGGA

SEQ ID NO: 16426 - protein, 568 aa, Zea mays
  VARIANT 10: note = Ancestral polymorphism is T, Derived polymorphism is I
MLPLLLALLTGAAPTVSASGDGCRVGCPLALAAYYFSAESNLSFIASLFGIADHNKLLPYNPGIVDPNYIVTGERVSVPFPCSCLGLPADPASTFLAGSLPYTLSGGETYDDVASEFANLTTASWLGVTNADPAGKLPAAGKINVTVNCSCGDKRVSPRYGLFLTYPLWEGETLSSVAEQYGFSSPAQLELLRRYNPGIGMDRASGKGIVFVPVKDADGSYRPLESDAGTLLHFCEICFYIRDIKHRQAKFDGKVSQDEGIKVDRSIEFSYEELSDATNNFSMDHKIGQGGFGSVYYAELRGEKAAIKKMDTKASQEFLNELKILTRVHHTNLVRLIGYCVESCLFLVYEFIENGNLSQHLHGTGYEPLSWTSRVQIALDSARGLEYIHEHTVPVYVHRDIKSANILIDRDLRAKVADFGLTKLSEIGTTSQSLPSLRVVGTFGYMPPEYARYGEVSPKVDVYAFGIVLYELLSAKEAIVRSTEFTDAQGLVYLFEETLSMPNPMEALQEMIDPRLGGDYPIDSAVKIAYLAKSCTHEEPRMRPTMRSVVVALMALSSKDHELTRGHD

SEQ ID NO: 16427 - protein, 191 aa, Zea mays
  VARIANT 8: note = Ancestral polymorphism is P, Derived polymorphism is T
MRISKSAPDLLKKAVTSVKSKTVALRTKLIILASMRRRLAMVGAISRQIHELVASDSREKPVRVEHRSKALTMPKAMTKGEDDSAGDHGATAPPGLFDVAMFEEGYHAGYPDWIDSLFEDGYCHRDEEDDDDDDHDDLDILDTPEEPSVIDIIRSKREVEGLEFNMDHDIDEACDMFIRRFRSRMNMNRSL

SEQ ID NO: 16428 - protein, 375 aa, Zea mays
  VARIANT 234: note = Ancestral polymorphism is E, Derived polymorphism is K
  VARIANT 218: note = Ancestral polymorphism is Q, Derived polymorphism is L
  VARIANT 199: note = Ancestral polymorphism is L, Derived polymorphism is P
MADWSSLPANLVNRIADCLLSTDDLDYYMDLRAVCRGWRSSTTDPKSRPLDPRFRPHQWAMLDEVHQSDERLFVNAGTGRFVRRYLPLLRRYIVVAGAGGGSVVLAERTAPHAARVLNPFTGAMISFDAPVPPNVWQVAAHVIGSSPTLVLLCKDSCTIYWADPCSRIFMEHYEGRFARPLVRLALESRVYAAAREGRPLVSFFVPDASKVLDIAAMQLAEYFAGGNQRFFLVESGGEILIVVKLIHGVVVFKIDTGTGQLELVKNLGSRALFVGDCRCLSVDADKFASVEANCVYYVVEEPWFDVCVYSLRDKTEVRAGGAIDSLNPITLSVDPPFSEVQLLCCYTFVVQDVFAMLLVDELMERNRSMILWNLE
